United States Patent Application Publication US 2011/0183924 A1 - sequence listing, part 20

SEQ ID NO: 49864 - DNA, 3109 bp, Homo sapiens
  misc_feature (83)..(83): n is a, c, g, or t
aagcagcaccagaacaccacctacttcatggccgacatcatctctgacatgtctgtgagctctgaagagttggtttcatgacntgaagcagcaccagaacaccacctacttcctggcccagcacctcaacaaggacagcctccttgcccgcaaggacctgcccttccggatccagagctgtgcagcccaggccgttcttacggccccttactctcttgggcgcccggatcccaacccatctctccaacccattgccacaggccagagtcctggcccccctggcgctcggaggaagctgccccagtcagagggccaggtacagggagaacgaacatactccttggcagtgcacccagcactgtccccacagcttagtgaacagaagaatctgagtctgctgtccccagttcctgaggacaaagggcctggccacactagggcaggcctagaaatgtcactgagggcagccacatcatccctcagtgaagagcaggtctctgagctgagggacaacctgcccaaggaggtcaggttgagccccaagcttatcctcgacccaaagagcagtgtgacccctgccatcatctcggccgccctacagcaagtggttcacaataagagtctagtcactgctggtggggctttggggaacccccccagcaggggtgagagaaggctggaggccagcatggggaggccagaggttagcatgatgagcagcagtgccagtaagaatctgaagttcaaaattagccccagtgctccagagacctcatggaattctcaacatcagctgggtgcagaggtctcttccagccccagagcacccacaggcagccgggctgacagcctgcacctctcccaacaagaggacagtctgcctgttcaaaatttccctcccaaaagctatcttttgcgaacaagccgagagtcagtgggcaagcaagctacaggggaggtggcaggcaaaggcgggccagtgggtggtaagcccaccctgcagaagcagggcaccatctccagccaaggggagaaggcgcagctggagagcacacccaaaagaagcaagctcgaagagaccagcctggttccccgagctacctaccccatggctctgcagagccccagctgccagtcaagaagccacagccccagctgccagcctcatggccacagccccagcagccagtctcgaggtcagagccccagctgccaacctcgaggccagagcccactgaggtctcaggctgccagccggcaggtgagcaccatgccctctaggaagcttgaaacaactctcaatggagcccactcgacctctgaaggccctgccaaacccaagtcatcccgaggtcctttccggctacgcaatttattctctgccaccttcccaacccgccagaagaaggagacagatgagcggcaggcccaactgcagaaggtaaagcagtatgaactggagttccttgaggaacttctaaagccaccaagccagggggagctgccaggcaccgagtacctgcaacctccagcacctggccgctgcagctgccagctccgcagcagccctgtgcagcaggggcctggcatgtcccgtgagcagaggcgcagctgtgactgcaagcgcatctgccgggggggccggccacaagccacccagacaccagtgcccagcctccgggggagggaaagggacagagtcctccctagccagaggcagccagaggctggcccaggcgtgagcctcagcagccccatcaatgtccagcgcattcgttctaccagcctggagtcccgagagtgccgatcggaccctgagagtggtgtttcgtgcctgaccacgtgtgcctcggggggcgagtgtctgggagctcccaattacaggaaactgatgcgccgctacagtatcagtgagctggaccagggtgacagggcctcgctgacctcggatgtctacccacatcctcccctgggcatgctgcccagggaggccaaggaggtagaggcaagcctccccatagccttgggtcccaaaagcaggtctctggagtcaccgacgctgggagacccctcctacgtccaggttgccccagagaccaaaggccccagacagatggccgtgttctcactgcccgaggaggtgtaccggaagcctgccgagctagacgaggacagtgagagcagcaagtgctgctccatccgctactgcttctactaccgcaagtgtgacatggcagatgatgccagtgatggcaaggatgagctctcctactctatccccatgaagatcctgcctggcatgaagctggacgagcaggtggtgcctgtggtgagcaggaccctgcaggtgctggatgctgctacctgcagcagcagcagccctgaggcctcccgcactcaggagattgacctccgtgtgtccaccttcgaggggagcctggccaagatcaatgccctgcgggcccatgcctatggcctccctgatggcttcctggctgcccggctggacaccaacgagctgctgacagtcctgcggcagtgtgtggccagccccgaggcccgtgcccccaagccctatgtgtctcagatctccgagtataagcttgagctagctctcaagttcaaggagctccgggcctcctgccgccgtgtggccaatgtggacaagagcccaactcacatgctggcagccatcacgggcagcttccaggtgctgagcagcctcattgagaccttcgtgcggctggtgttcattgtgcgctccgaggcccagcgccaagagctgctggccaaggtagaagaggtggtgaggaactacaccttcctgctgcgtgcagctgaggagtccacagcccgtaaccttaaccagcagcagcagcaacaacaacagcagcagcagcaacaacaacagcagcagcaacaacaacagcagcagcagcagcagcaggtggcagcagctgcaggggcagccacagagcatccaccaggctccccaacttcggcgactgttatgagcacattcacccactccttaaaaacccttattaagtagggcatctgcccacacctgtcccccttccccaaccgccatctcgagggatcctctaac

SEQ ID NO: 49865 - DNA, 387 bp, Homo sapiens
aactttcaattttggggctgtgttatgcaaatcaaattttattttaggttggtcatttccccttcatggcagcctcaatcaactcatattaatcttgaaactaacatgataacatctttacctcttcctttcatataagctgcggctgccaggtccctcttcctctgttggcaagtattctgcactgctgcttcctggttgaaccccactaactgtgggtgttgttacacaggatgattcttagcactccacacctcaactcctcaaactgctgtaattggagttcctatttctgttctgcttctctctgcctcaacttgtctttcctgtctgcacccttactcccattccttcctggcttgttccaagaggagtgtcagatagaat

SEQ ID NO: 49866 - DNA, 734 bp, Homo sapiens
  misc_feature (494)..(494): n is a, c, g, or t
  misc_feature (658)..(658): n is a, c, g, or t
ctgtcttggaaacctacctagaacctccaccctctgacaccatggttaactcttgttgtggctctgtctgctctgaccagggctgtgatcaaggcctctgccaagagacctgctgccgccccagctgctgccagaccacctgttgctgccccagctgtgttgtatccagctgctgccgcccatcctgctctcagactacctgctgccagaccacttgctgtcgccccagctgctgccgcccagtctgttgtcagaccacctgccgccccagctgtggtgtgtccagctgctgccgtccactctgttgtcagaccacctgccgccccagctgtggtgtgtccagctgctgccgtccactctgctgtcagaccacctgctgccgtacaacttgctgccgccccagctgctgtggatcctcttgttgaacctcatattggactatcaaccatgagccagtcaccatcccatgatatgaaagtgtcatttatatcaanttgtccatgtgttaaatggccatcagctttattatcctgttattccactaagtaactggtgaaagggcatccatctacatttaataccactcatttttcccatggatctcttcccagcattcagacctcagatgcatgatgcagttagactaagcctctaagtntctgactgttatgcttgatttgaccttcaaaattacatattaactgttcttcaataaatattatcttaatatcagt

SEQ ID NO: 49867 - DNA, 592 bp, Homo sapiens
gatcgctggaatatggaacacagagggcaactgagaaaatccttgaatttgtgaagtcaaagactattgggaggccatgcctgccatttccctgaaaagcacttcatttaccaaatactaatcagattcgaatggacatcagcccgggcgagttgttaaattattgctgtaatttgaaaaatgagtgtgtcagagtatcagggaagctcaagaatctggccagagctgtcatttagagaggcagaagtggacgtccttgggtgctgagggccctcaggactctcctggcccacaccagtgcctccccacataggcactagttggacaacaagtggaaagatgtggccttccctgctccctttttttttcctttttttaaacttatggtaaaatacgtataacaaaatttaccatctgaatcatttctaagtgcacatttcagtagtgttaagtacattcggctgggtgcggtggttcacgcctgtaatcccagcactttgggaggccgaggtgggcagatcacaaggtcaggagatcgagaccctcctggccaacacagtgacaccccgtctctactaaaaaaaaaaaaaaa

SEQ ID NO: 49868 - DNA, 377 bp, Homo sapiens
acagctgactcatgagtgggatttggaaaaagcgtggactcctgcccatggcctgagtcctttaagatcagaaattatgtctcccatcatggcctctccatagaggcatgtatcttcagcaggcgttaggtcacaagccacatgatgccaagctgacagtggcttgcataatggggatatgtgactgtcgcataactagaattctggaagagtgcagtgccaggcttggggcagctttccagccatgtcattaagaatccagccttctcctggccttcagctatgccacgtggccagtgtctacacctgggatgtcaagagacaggctgcaggtccaccctcctggcctcatactatggaagaggctttccttttgg

SEQ ID NO: 49869 - DNA, 348 bp, Homo sapiens
gaactatagggttctgcagaataaatatgtggttaccaaatactaggctttgcctatgaatgtctcatatagtctttccttcccttgtttctcttctctttttaaagttaaaggtgaattaaaatgaattttgtttggggaaattttaaggtggcctttgatattactggaaatgttttagtataatatcaaattagaattgggaatcactaatacgaattttaagtttgttgaaaattatattacatgcagatgttttttgaggactttgataatgaaagaaaaaagtgatttacagtaagttttatatattttgaaataattcctcttttttaaaaaacaggtgtt

SEQ ID NO: 49870 - DNA, 483 bp, Homo sapiens
aactcccagtgacattgcgatatgtctggaatggaatctaatcccttctccctaagaggttagtgaattccttagtatggagcagctgagggaattgtctctgtccaagtccatctggatgcttctgactcatctgctgatcctcctctgcgtggatgtctggcccacaccctaaagctaatctgagtcccaaggggcattttcttgtccaaaagttgatatgctaatttcagagaagtgctagcctttctgtctaaaattgctcacagttcacacctcatgtcttgtcttctgctctgtttccttcctaatttggcattacacaggtctgtgcaaagccagactttaaggaagttccctctcctcccgtgtcctctgccaaatgcttcccgtctgtcattggcaaaggctctgtcttgccatgatgggagaggccaggagctgctccaaagctggtggaaagagagccgttccacgttcagt

SEQ ID NO: 49871 - DNA, 380 bp, Homo sapiens
tacaaaaggtatgttgggtgcgacctgcgttgtttctagagtgacgtgttcttttaggagtgcccttgcccagcactcttctaatctggcactctctcataaactggctccagagaaacactttcatgattggccaataacattctggatcaggatgttgtctttttaaatataagaaccctttttcttttgcaatagcttttcctaaagtgacacattttcactgtaaaagattcatctggtgtttcagtgaacattaacaccagatacctctctatgcatacacagacacatgacttaaactgtacattgctgttctatacactgcttttatcccctcacatttttcatgtcactagaaatctacataattttcagta

SEQ ID NO: 49872 - DNA, 450 bp, Homo sapiens
attcctttagaacaagaaggtgttatgcatatttttatgtgtctggcattcaataaatgtttgttaggtaaacaaaattccattcatttctaattttctcatggtttctagtaaaagacaaacactcatcttcaaaatgttatgagagttgggagatgagtggtacaaaaaattgactgaaataataaatttcacggtttctctatcatccatcttgaaataatctctctgtcatggtgtgctcaagatgctttgcttttcaacacctcaaaaaatctttggttggctgggcatagtggcgcatacttttaattccagcacttcgggaggctgaggcaggtggattgtttgagctcaggggtttgcgacaagcctcggcaacatggtgaaaccccatctctaccaaaaatacaaaaattagccagtcttataacctggtctcaaaaaaaa

SEQ ID NO: 49873 - DNA, 481 bp, Homo sapiens
aatgaagtttgccacatcagttgacacttccatgaaagatttctctgtagcatatgatactgttggggtaacatttcaccccacagtataactttcaaaattggaagcaagtactttcagaccttgccagtgcttatcagctgtgttcatgtgatactcattttaacagtctaaacaacatttttaccagagtagatttcacctcaagaaaccattttcggctgggagtaaaggtcgcgcctgtaatcctagcactttgggagtccgaggtgggtggattgcctgagctcaggagtttgagaccagcctgggcattatggtgaaaccctatctctactaaaatacaaaaaatcagctggctgtgatggcttgtgcctgtagtctcagctactcagtaggttgaggcacgagaattgcttgaacccgagagctgaggttgcagtgagccaagatgacaacggtggaaactctgtctcaaaag

SEQ ID NO: 49874 - DNA, 656 bp, Homo sapiens
catcctcacagggttaacaagaattagatgctgggttctggacagaaatatagttgtaattaagcattaatcaggctgcactttggcccacttcttcgtaaccaaaagtcccagagcaccagatgctaaccatttgcctcctcattgttcctacagagaagatttctgatgttagaatcataaggcctttgtttgtttaaaaatggcttaagatgtttttcagatcctgaattccagcaaaagagctattgccaaccagtttgaagaccgcccccccgcctctccccaagaggaactgaatcagcatgaaaatgcagtttcttcatctcaccatcctgtattcttcaaccagtgatcccccacctcggtcactccaactcccttaaaatacctagacctaaacggctcagacaggcagatttgaggtttccccctgtctccttattcggcagccttatgattaaacttccttctctgctgcaaacctgagatcctcggtgtattgacttgccatgaattaggcaacaaacctattacagttacagttacttttttaaaggaaattcaatcgttggattggtccacctgcttatttcttcccttttcaaaaaaaatgtctacatattgaatttttatacattaagtggttcatgaaa

SEQ ID NO: 49875 - DNA, 482 bp, Homo sapiens
catcctcacagggttaacaagaattagatgctgggttctggacagaaatatagttgtaattaagcattaatcaggctgcactttggcccacttcttcgtaaccaaaagtcccagagcaccagatgctaaccatttgcctcctcattgttcctacagagaagatttctgatgttagaatcataaggcctttgtttgtttaaaaatggcttaagatgtttttcagatcctgaattccagcaaaagagctattgccaaccagtttgaagaccgcccccccgcctctccccaagaggaactgaatcagcatgaaaatgcagtttcttcatctcaccatcctgtattcttcaaccagtgatcccccacctcggtcactccaactcccttaaaatacctagacctaaacggctcagacaggcagatttgaggtttccccctgtctccttattcggcagccttatgattaaacttccttctctgctgca

SEQ ID NO: 49876 - DNA, 561 bp, Homo sapiens
aagctcaggaaagaagagaaatccactgagaacagtctgtaaaggtccgtagtgctatctacatccagacggtggaagggagagaaagagaaagaaggtatcctaggaatacctgcctgcttagaccctctataaaagctctgtgcatcctgccactgaggactccgaagaggtagcagtcttctgaaagacttcaactgtgaggacatgtcgttcagatttggccaacatctcatcaagccctctgtagtgtttctcaaaacagaactgtccttcgctcttgtgaataggaaacctgtggtaccaggacatgtccttgtgtgcccgctgcggccagtggagcgcttccatgacctgcgtcctgatgaagtggccgatttgtttcagacgacccagagagtcgggacagtggtggaaaaacatttccatgggacctctctcaccttttccatgcaggatggccccgaagccggacagactgtgaaggtgagtgcttattatgtgcatacaaattaataagaggcgattatgagaactaataaaaaatcacaacgagtcata

SEQ ID NO: 49877 - DNA, 320 bp, Homo sapiens
gatcgagctctgtaccggatagggagaacggaatgacagcagtctatgacggagctccagaaacatgacaaggaggactttcctgcctcttggagatcagaggaggaaatggcagcagaagccgcagctctgcgggtctactttcagtgacacaggtaaagactgcatttcgtcattacccagaccctcccgtgggcctcaggaaagaggctgcactctcagaatggggatgcacaaaaacaccttcaccagcatccttgggtggtggctgcaaaggacaaagagctggaggggagaaaaccctggcccttgagtactgt

SEQ ID NO: 49878 - DNA, 453 bp, Homo sapiens
gatcgagctctgtaccggatagggagaacggaatgacagcagtctatgacggagctccagaaacatgacaaggaggactttcctgcctcttggagatcagaggaggaaatggcagcagaagccgcagctctgcgggtctactttcagtgacacaggcctttgtttgtttaaaaatggcttaagatgtttttcagatcctgaattccagcaaaagagctattgccaaccagtttgaagaccgcccccccgcctctccccaagaggaactgaatcagcatgaaaatgcagtttcttcatctcaccatcctgtattcttcaaccagtgatcccccacctcggtcactccaactcccttaaaatacctagacctaaacggctcagacaggcagatttgaggtttccccctgtctccttattcggcagccttatgattaaacttccttctctgctgca

SEQ ID NO: 49879 - DNA, 657 bp, Homo sapiens
gatcgagctctgtaccggatagggagaacggaatgacagcagtctatgacggagctccagaaacatgacaaggaggactttcctgcctcttggagatcagaggaggaaatggcagcagaagccgcagctctgcgggtctactttcagtgacacaggcatatcaagaagacaaggtgcatgggggaaaaccaaagagtcagcttccctagggctgatgggtcaaatctcagtgcttgcctctgacattttgcttgccgacagtctgtcttgaaaaccaacaggttgcaaagaagaatgtgaacacctatatccagagatgccctatataagaataaagactataagaccaaaaagatgttcttgacttaatgtttggggtggacatacctagttatacgatttggctgtttccccacccacatctcatcttgaattgtagctcccataatccccacatgtcatgggagggacccagtgggaggtaactgaatcaagggggagggtctttcccatgctgttctcatgattgatagtgatggttttataaaggacatttcccctgaatacgctgtcttgcctgctgccatgtaagatgtggctttgctcctcttttgccttcctccatgattgcgagtccattaaacctcattcctttat

SEQ ID NO: 49880 - DNA, 1089 bp, Homo sapiens
aagctcaggaaagaagagaaatccactgagaacagtctgtaaaggtccgtagtgctatctacatccagacggtggaagggagagaaagagaaagaaggtatcctaggaatacctgcctgcttagaccctctataaaagctctgtgcatcctgccactgaggactccgaagaggtagcagtcttctgaaagacttcaactgtgaggacatgtcgttcagatttggccaacatctcatcaagccctctgtagtgtttctcaaaacagaactgtccttcgctcttgtgaataggaaacctgtggtaccaggacatgtccttgtgtgcccgctgcggccagtggagcgcttccatgacctgcgtcctgatgaagtggccgatttgtttcagacgacccagagagtcgggacagtggtggaaaaacatttccatgggacctctctcaccttttccatgcaggatggccccgaagccggacagactgtgaagcacgttcacgtccatgttcttcccaggaaggctggagactttcacaggaatgacagcatctatgaggagctccagaaacatgacaaggaggactttcctgcctcttggagatcagaggaggaaatggcagcagaagccgcagctctgcgggtctactttcagtgacacagatcctgaattccagcaaaagagctattgccaaccagtttgaagaccgcccccccgcctctccccaagaggaactgaatcagcatgaaaatgcagtttcttcatctcaccatcctgtattcttcaaccagtgatcccccacctcggtcactccaactcccttaaaatacctagacctaaacggctcagacaggcagatttgaggtttccccctgtctccttattcggcagccttatgattaaacttccttctctgctgcaaacctgagatcctcggtgtattgacttgccatgaattaggcaacaaacctattacagttacagttacttttttaaaggaaattcaatcgttggattggtccacctgcttatttcttcccttttcaaaaaaaatgtctacatattgaatttttatacattaagtggttcatgaaa

SEQ ID NO: 49881 - DNA, 915 bp, Homo sapiens
aagctcaggaaagaagagaaatccactgagaacagtctgtaaaggtccgtagtgctatctacatccagacggtggaagggagagaaagagaaagaaggtatcctaggaatacctgcctgcttagaccctctataaaagctctgtgcatcctgccactgaggactccgaagaggtagcagtcttctgaaagacttcaactgtgaggacatgtcgttcagatttggccaacatctcatcaagccctctgtagtgtttctcaaaacagaactgtccttcgctcttgtgaataggaaacctgtggtaccaggacatgtccttgtgtgcccgctgcggccagtggagcgcttccatgacctgcgtcctgatgaagtggccgatttgtttcagacgacccagagagtcgggacagtggtggaaaaacatttccatgggacctctctcaccttttccatgcaggatggccccgaagccggacagactgtgaagcacgttcacgtccatgttcttcccaggaaggctggagactttcacaggaatgacagcatctatgaggagctccagaaacatgacaaggaggactttcctgcctcttggagatcagaggaggaaatggcagcagaagccgcagctctgcgggtctactttcagtgacacagatcctgaattccagcaaaagagctattgccaaccagtttgaagaccgcccccccgcctctccccaagaggaactgaatcagcatgaaaatgcagtttcttcatctcaccatcctgtattcttcaaccagtgatcccccacctcggtcactccaactcccttaaaatacctagacctaaacggctcagacaggcagatttgaggtttccccctgtctccttattcggcagccttatgattaaacttccttctctgctgca

SEQ ID NO: 49882 - DNA, 107 bp, Homo sapiens
aaattaaggtgcactctgttcccgacgattccatctggctgggctgaggtggagtcccctcgattccccagtgagggctgggaacccatcactcgctccagcaacag

SEQ ID NO: 49883 - DNA, 1153 bp, Homo sapiens
cccaattctgatgtaacagccttgggaaagaggttgcagtgaaaagctggtcctgctgtggtggagagaatggaggaaagataataaaaggccaaacctttgctccaactttctccttagcttccctttggatctggaaagctggggacccacacggcagagccatggtactggaggagccattaacaaagctttcaataaacctctctttcttgaagttacctgagaatggatccattccctgcaactgaagattctaaggaactgggtttctcagtatacaatgggaatggttgggaggaggtaaagagtagaagacagtatcaagaatccagagcccagcacctgtagtcctaactattcagattccttgagcccaggagtttgagtccagcctggacaacatattgagacccccatctctctaaaaaaaaagagaaagaaagaaggaaagaaaaaaagaaagaaagaaagaaagaaagaaagaaagaaagaaagaaagaaagaaagaaagaaagaaagaaagaaagaaggaaagaaggaaagaaggaaagaaagaaagagaaagaaagaaaagaagattgtagctagggggagagtaggtgaaaagatgaacaacatgaccgggaagatttcctaatctcaccacagcctggctctaccttaagtctttaataaaagcttgactgaaggtaccaaggtgtgctgaagtggaagcaaagttctccaaagtccagcatggtagacatcagtggtggtaaccaaggacagaccccaaggcaaggtgaacctcaaaaatggaacctcaagtctatgcagtccagctgccctccccaccagaaagtccttgttccagcccaacatcagtgcctctgagtttgtttactagaaacaaaggaagaatttccttgtaaaaatatagacagagtagtccctggctttctcctcttgcaggaaggatggattctcccattccataccatctttcccccacactggccccagaaatacttaattcaactatgtgaaaataaagattgtttttggtttgagggcatagggatccatttatccttattctttatgaggcactaaattagctttgtatgttattaaatgtgtctcgtcaatgctgttggcattgtttcatttt

SEQ ID NO: 49884 - DNA, 1300 bp, Homo sapiens
cccaattctgatgtaacagccttgggaaagaggttgcagtgaaaagctggtcctgctgtggtggagagaatggaggaaagataataaaaggccaaacctttgctccaactttctccttagcttccctttggatctggaaagctggggacccacacggcagagccatggtactggaggagccattaacaacgaggctccttctgtaaggttgcctggatactgcatctggctgacagagtccccagacagaacttgaataggcactgccagggtgtgtacttctatgactctccttttgcaatgggcccacaccacccacctcatttttctaataagagctttcaataaacctctctttcttgaagttacctgagaatggatccattccctgcaactgaagattctaaggaactgggtttctcagtatacaatgggaatggttgggaggaggtaaagagtagaagacagtatcaagaatccagagcccagcacctgtagtcctaactattcagattccttgagcccaggagtttgagtccagcctggacaacatattgagacccccatctctctaaaaaaaaagagaaagaaagaaggaaagaaaaaaagaaagaaagaaagaaagaaagaaagaaagaaagaaagaaagaaagaaagaaagaaagaaagaaagaaagaaggaaagaaggaaagaaggaaagaaagaaagagaaagaaagaaaagaagattgtagctagggggagagtaggtgaaaagatgaacaacatgaccgggaagatttcctaatctcaccacagcctggctctaccttaagtctttaataaaagcttgactgaaggtaccaaggtgtgctgaagtggaagcaaagttctccaaagtccagcatggtagacatcagtggtggtaaccaaggacagaccccaaggcaaggtgaacctcaaaaatggaacctcaagtctatgcagtccagctgccctccccaccagaaagtccttgttccagcccaacatcagtgcctctgagtttgtttactagaaacaaaggaagaatttccttgtaaaaatatagacagagtagtccctggctttctcctcttgcaggaaggatggattctcccattccataccatctttcccccacactggccccagaaatacttaattcaactatgtgaaaataaagattgtttttggtttgagggcatagggatccatttatccttattctttatgaggcactaaattagctttgtatgttattaaatgtgtctcgtcaatgctgttggcattgtttcatttt

SEQ ID NO: 49885 - DNA, 920 bp, Homo sapiens
cccaattctgatgtaacagccttgggaaagaggttgcagtgaaaagctggtcctgctgtggtggagagaatggaggaaagataataaaaggccaaacctttgctccaactttctccttagcttccctttggatctggaaagctggggacccacacggcagagccatggtactggaggagccattaacaaagctttcaataaacctctctttcttgaagttacctgagaatggatccattccctgcaactgaagattctaaggaactgggtttctcagtatacaatgggaatggttgggaggaggtaaagagtagaagacagtatcaagaatccagagcccagcacctgtagtcctaactattcagattccttgagcccaggagtttgagtccagcctggacaacatattgagacccccatctctctaaaaaaaaagagaaagaaagaaggaaagaaaaaaagaaagaaagaaagaaagaaagaaagaaagaaagaaagaaagaaagaaagaaagaaagaaagaaagaaagaaggaaagaaggaaagaaggaaagaaagaaagagaaagaaagaaaagaagattgtagctagggggagagtaggtgaaaagatgaacaacatgaccgggaagatttcctaatctcaccacagcctggctctaccttaaggtaggtagatggacaagtatagctacctgggtcacagatgctaagatgacatccagacaggtcagaaattaagaagaaaggcagatgaggaaggataaaccctatcttataagacaaattcctggcactcatttcttttttaagtttcctttttgctttccctagtcctgcatttttgttgaaggcagaagattagagagagacaaagaatggctgagttgatatccttgtagttacagtctgagttcccag

SEQ ID NO: 49886 - DNA, 236 bp, Homo sapiens
aattactaactgaattcagcaaagactgatgaataaagtttgaaatgaaacacaagtaagtaataagtaatatttctcttatcttactgtggtttcttatacagatcaagctaaaatgtaactaagtgtctatttaaagatgataataacataaagttcattacttgggtataaacacagctgaggtaggtgctgaggataggaaatggaaagagcgaccatctgagaattagaaa

SEQ ID NO: 49887 - DNA, 367 bp, Homo sapiens
gcctcgtgattctgctgtgttgtatggcacagttgacctttaggtagagagattgtgcaggtgcctgatctagctgcaaagagtcctcaaaagcaaaaggggagccagagagattaggaatgatggcgggaagagctccacacatccaggtgaaggtggaggggctctgtggcttttaggaacagtgggacatccccagctgacagccatcaaggacctgcacagccgcaatgaaccggtgcctggtaatgatttctcccagagcctctgcaaaggaatgtagccctggctacaccttcattacggcctgtgagacagaatccagcaggacttctgacctacagaactgtaagctaatcagagggtc

SEQ ID NO: 49888 - DNA, 344 bp, Homo sapiens
tgatgtagcaacatgcaggccaagaatttctctaggccccagtgacatgggggctaggtttctctccaccttcttggcagtgtgtggctgagaaaatccctgctctcccttgtctgtggttgagagctcccaaagatagagttcagaatcatctttctaaatcaacaagaggctctttcatcttaattataacagcttaaacttttagagtaagtcaacgtttaccatcattttacgtgtgcttattatcaaaggtggatctgaaggaaaaatgattgattaccttcctaaccgttttaatacttttatatttattggcagaatttgagaagggtttgagctgt

SEQ ID NO: 49889 - DNA, 435 bp, Homo sapiens
catggaacagctgctctggcctgttgcctggactggagatggctgaggacggcatccctccctggtgtcctctgttgaagactgtggcgggtccttgcctgtctttgcttggccatgcctggtggtgctctggcgggctccacttcacttcatctctcatggcatgattcccctctgggtctctgtcttatccttcatcctgctcttgccctagtggtccctgaaacctttgtagtggcattatctctcccgtaccactgtgggctctcaacccatcccagcccgtctgcacctgctcactcccatccacctctatccagacaggatttttctgggtctgtgtaaacaaaagtcagggccacagaggaaggatacactctagccattgttctctctgactttgctgtagcactgagttttctttgatgtagctga

SEQ ID NO: 49890 - DNA, 167 bp, Homo sapiens
actccctctttctgctcttcagtctattgactttgggcacaggcacagctgcagctctagtaggggttgggcctggagtcagtggagacaaaatgtgaaggtaacaggacagtgcacggggcccagtgtgctctgcctgggctgctcagggaagaaaaatcacacac

SEQ ID NO: 49891 - DNA, 486 bp, Homo sapiens
cagtaaaaagtctggtagagagagtgggggactcacaccaaggcacagagtggtgtctccctataatgacctcatgttttaggatccaccttacagtgtaatcactggtggcatggggaagttagagcatggaatttccatcttcagctgcaaaatttatttttcttaatcatttaattctaaattaaattttaaaattctggccagctgcggtgtgtcatgtctgtaatcccagcactttgggaggccgaggcgggcgtgtatcccttgaggtcaggagctcgagaccagcctggccaacatggtgaaatcccatctctactaaaaatacaaaattagccaggtgtggtggcacctgtatgtaatcccagctacttgggcagttgaggtaggagaatcacttgaacctgggaggcagaggttgcagtgagccaagatcgcgccactgtactccagcctgggcaaaaacagcaaaactcttgtctc

SEQ ID NO: 49892 - DNA, 887 bp, Homo sapiens
aagttcatttatatgactcttctccagattgtttctgtgtcactaaccagccaatatagtagccactgcagggcatgaaacaggcctacttgctacaccttagttatctttaaccaagacatacacagcgtctcaactctggttaggccaccactgagtccaggttttgatttgacagatgagcaagctcctagaactgcattcagtcgcccaggttggcacgtggagtccagactccctggtaagctcacccatgttaataaactcaatatagtctataattacatttctctctctttggcagtcacctgcagaatctgtatgcgtggatacttaccccagatctttgccttctaaattcaatgggctgtaaatcttctggtgtgtaaaccttctgggtttgactttgtaatattttttctctggaacatgcaggaaagtggccagttacagacttggggacactgagaaggggagggaacgtggtggtgtggaatgggctgagctctctccctcttacaggaaactccctctggcgggggaatggcaggcctatgaggaagtaagcgttgtccttttcaggggagtgacctagtgctgcatccaaaaattctcattcctgttctcagggcccagttttgacccctgcaggcaatgccctgactttcgcataaagtatgtggggaggctgtgaattcaagtaatttggcagcctatagattctcactaacctagagtttatatttcagctgccttagcactacagcttcaagagataagacaatcaagcctgtgtcgagttaagaattaaatgggaggttgcagtgagccaatatcatgccactgcactccaggctgggcgacaggataagactccatctcaaaat

SEQ ID NO: 49893 - DNA, 2616 bp, Homo sapiens
ggcagccgtccggggccgccactctcctcggccggtccctggctgccggaggggcggccgcgcgtggatgcggcgggagctggaagcctcaagcagccggcgccgtctctgccccggggcgccctatggcttgaagagcctggccacccagtggctccaccgccctgatggatccactgaatctgtcctggtatgatgatgatctggagaggcagaactggagccggcccttcaacgggtcagacgggaaggcggacagaccccactacaactactatgccacactgctcaccctgctcatcgctgtcatcgtcttcggcaacgtgctggtgtgcatggctgtgtcccgcgagaaggcgctgcagaccaccaccaactacctgatcgtcagcctcgcagtggccgacctcctcgtcgccacactggtcatgccctgggttgtctacctggaggtggtaggtgagtggaaattcagcaggattcactgtgacatcttcgtcactctggacgtcatgatgtgcacggcgagcatcctgaacttgtgtgccatcagcatcgacaggtacacagctgtggccatgcccatgctgtacaatacgcgctacagctccaagcgccgggtcaccgtcatgatctccatcgtctgggtcctgtccttcaccatctcctgcccactcctcttcggactcaataacgcagaccagaacgagtgcatcattgccaacccggccttcgtggtctactcctccatcgtctccttctacgtgcccttcattgtcaccctgctggtctacatcaagatctacattgtcctccgcagacgccgcaagcgagtcaacaccaaacgcagcagccgagctttcagggcccacctgagggctccactaaagggcaactgtactcaccccgaggacatgaaactctgcaccgttatcatgaagtctaatgggagtttcccagtgaacaggcggagagtggaggctgcccggcgagcccaggagctggagatggagatgctctccagcaccagcccacccgagaggacccggtacagccccatcccacccagccaccaccagctgactctccccgacccgtcccaccatggtctccacagcactcccgacagccccgccaaaccagagaagaatgggcatgccaaagaccaccccaagattgccaagatctttgagatccagaccatgcccaatggcaaaacccggacctccctcaagaccatgagccgtaggaagctctcccagcagaaggagaagaaagccactcagatgctcgccattgttctcggcgtgttcatcatctgctggctgcccttcttcatcacacacatcctgaacatacactgtgactgcaacatcccgcctgtcctgtacagcgccttcacgtggctgggctatgtcaacagcgccgtgaaccccatcatctacaccaccttcaacattgagttccgcaaggccttcctgaagatcctccactgctgactctgctgcctgcccgcacagcagcctgcttcccacctccctgcccaggccagccagcctcacccttgcgaaccgtgagcaggaaggcctgggtggatcggcctcctcttcaccccggcaggccctgcagtgttcgcttggctccatgctcctcactgcccgcacaccctcactctgccagggcagtgctagtgagctgggcatggtaccagccctggggctgggccccccagctcaggggcagctcatagagtcccccctcccacctccagtccccctatccttggcaccaaagatgcagccgccttccttgaccttcctctggggctctagggttgctggagcctgagtcagggcccagaggctgagttttctctttgtggggcttggcgtggagcaggcggtggggagagatggacagttcacaccctgcaaggcccacaggaggcaagcaagctctcttgccgaggagccaggcaacttcagtcctgggagacccatgtaaataccagactgcaggttggaccccagagattcccaagccaaaaaccttagctccctcccgcaccccgatgtggacctctactttccaggctagtccggacccacctcaccccgttacagctccccaagtggtttccacatgctctgagaagaggagccctcatcttgaagggcccaggagggtctatggggagaggaactccttggcctagcccaccctgctgccttctgacggccctgcaatgtatcccttctcacagcacatgctggccagcctggggcctggcagggaggtcaggccctggaactctatctgggcctgggctaggggacatcagaggttctttgagggactgcctctgccacactctgacgcaaaaccactttccttttctattccttctggcctttcctctctcctgtttcccttcccttccactgcctctgccttagaggagcccacggctaagaggctgctgaaaaccatctggcctggcctggccctgccctgaggaaggaggggaagctgcagcttgggagagcccctggggcctagactctgtaacatcactatccatgcaccaaactaataaaactttgacgagtcaccttc

SEQ ID NO: 49894 - DNA, 2461 bp, Homo sapiens
gaattccgagagccccggcgggcagcagccggcgccgtctctgccccggggcgccctatggcttgaagagcctggccacccagtggctccaccgccctgatggatccactgaatctgtcctggtatgatgatgatctggagaggcagaactggagccggcccttcaacgggtcagacgggaaggcggacagaccccactacaactactatgccacactgctcaccctgctcatcgctgtcatcgtcttcggcaacgtgctggtgtgcatggctgtgtcccgcgagaaggcgctgcagaccaccaccaactacctgatcgtcagcctcgcagtggccgacctcctcgtcgccacactggtcatgccctgggttgtctacctggaggtggtaggtgagtggaaattcagcaggattcactgtgacatcttcgtcactctggacgtcatgatgtgcacggcgagcatcctgaacttgtgtgccatcagcatcgacaggtacacagctgtggccatgcccatgctgtacaatacgcgctacagctccaagcgccgggtcaccgtcatgatctccatcgtctgggtcctgtccttcaccatctcctgcccactcctcttcggactcaataacgcagaccagaacgagtgcatcattgccaacccggccttcgtggtctactcctccatcgtctccttctacgtgcccttcattgtcaccctgctggtctacatcaagatctacattgtcctccgcagacgccgcaagcgagtcaacaccaaacgcagcagccgagctttcagggcccacctgagggctccactaaaggaggctgcccggcgagcccaggagctggagatggagatgctctccagcaccagcccacccgagaggacccggtacagccccatcccacccagccaccaccagctgactctccccgacccgtcccaccatggtctccacagcactcccgacagccccgccaaaccagagaagaatgggcatgccaaagaccaccccaagattgccaagatctttgagatccagaccatgcccaatggcaaaacccggacctccctcaagaccatgagccgtaggaagctctcccagcagaaggagaagaaagccactcagatgctcgccattgttctcggcgtgttcatcatctgctggctgcccttcttcatcacacacatcctgaacatacactgtgactgcaacatcccgcctgtcctgtacagcgccttcacgtggctgggctatgtcaacagcgccgtgaaccccatcatctacaccaccttcaacattgagttccgcaaggccttcctgaagatcctccactgctgactctgctgcctgcccgcacagcagcctgcttcccacctccctgcccaggccagccagcctcacccttgcgaaccgtgagcaggaaggcctgggtggatcggcctcctcttcaccccggcaggccctgcagtgttcgcttggctccatgctcctcactgcccgcacaccctcactctgccagggcagtgctagtgagctgggcatggtaccagccctggggctgggccccccagctcaggggcagctcatagagtcccccctcccacctccagtccccctatccttggcaccaaagatgcagccgccttccttgaccttcctctggggctctagggttgctggagcctgagtcagggcccagaggctgagttttctctttgtggggcttggcgtggagcaggcggtggggagagatggacagttcacaccctgcaaggcccacaggaggcaagcaagctctcttgccgaggagccaggcaacttcagtcctgggagacccatgtaaataccagactgcaggttggaccccagagattcccaagccaaaaaccttagctccctcccgcaccccgatgtggacctctactttccaggctagtccggacccacctcaccccgttacagctccccaagtggtttccacatgctctgagaagaggagccctcatcttgaagggcccaggagggtctatggggagaggaactccttggcctagcccaccctgctgccttctgacggccctgcaatgtatcccttctcacagcacatgctggccagcctggggcctggcagggaggtcaggccctggaactctatctgggcctgggctaggggacatcagaggttctttgagggactgcctctgccacactctgacgcaaaaccactttccttttctattccttctggcctttcctctctcctgtttcccttcccttccactgcctctgccttagaggagcccacggctaagaggctgctgaaaaccatctggcctggcctggccctgccctgaggaaggaggggaagctgcagcttgggagagcccctggggcctagactctgtaacatcactatccatgcaccaaactaataaaactttgacgagtcaccttc

SEQ ID NO: 49895 - DNA, 2765 bp, Homo sapiens
  misc_feature (7)..(7): n is a, c, g, or t
  misc_feature (39)..(39): n is a, c, g, or t
  misc_feature (49)..(50): n is a, c, g, or t
  misc_feature (55)..(55): n is a, c, g, or t
  misc_feature (58)..(58): n is a, c, g, or t
  misc_feature (62)..(63): n is a, c, g, or t
  misc_feature (91)..(91): n is a, c, g, or t
  misc_feature (215)..(215): n is a, c, g, or t
  misc_feature (230)..(230): n is a, c, g, or t
  misc_feature (257)..(257): n is a, c, g, or t
  misc_feature (259)..(259): n is a, c, g, or t
  misc_feature (269)..(269): n is a, c, g, or t
ttaagangtgtttgttgaatgaataaataaatgatggancagctctgtnnaagcncancttnntatgcatttttaaaaaattgtgtttgcncatttgtcctaccagctgtaaaaacttgctagcaaaagagtggcagaaggcccaacatttttagaaaattcttagccgtaaaccttaaatcccgagttggaaaattctcattattaaatgccangagttggtcttcctngagacctctgcaagaggccctctcacngncaccttgtgnccatttttcctgccagagcctggccacccagtggctccaccgccctgatggatccactgaatctgtcctggtatgatgatgatctggagaggcagaactggagccggcccttcaacgggtcagacgggaaggcggacagaccccactacaactactatgccacactgctcaccctgctcatcgctgtcatcgtcttcggcaacgtgctggtgtgcatggctgtgtcccgcgagaaggcgctgcagaccaccaccaactacctgatcgtcagcctcgcagtggccgacctcctcgtcgccacactggtcatgccctgggttgtctacctggaggtggtaggtgagtggaaattcagcaggattcactgtgacatcttcgtcactctggacgtcatgatgtgcacggcgagcatcctgaacttgtgtgccatcagcatcgacaggtacacagctgtggccatgcccatgctgtacaatacgcgctacagctccaagcgccgggtcaccgtcatgatctccatcgtctgggtcctgtccttcaccatctcctgcccactcctcttcggactcaataacgcagaccagaacgagtgcatcattgccaacccggccttcgtggtctactcctccatcgtctccttctacgtgcccttcattgtcaccctgctggtctacatcaagatctacattgtcctccgcagacgccgcaagcgagtcaacaccaaacgcagcagccgagctttcagggcccacctgagggctccactaaagggcaactgtactcaccccgaggacatgaaactctgcaccgttatcatgaagtctaatgggagtttcccagtgaacaggcggagagtggaggctgcccggcgagcccaggagctggagatggagatgctctccagcaccagcccacccgagaggacccggtacagccccatcccacccagccaccaccagctgactctccccgacccgtcccaccatggtctccacagcactcccgacagccccgccaaaccagagaagaatgggcatgccaaagaccaccccaagattgccaagatctttgagatccagaccatgcccaatggcaaaacccggacctccctcaagaccatgagccgtaggaagctctcccagcagaaggagaagaaagccactcagatgctcgccattgttctcggcgtgttcatcatctgctggctgcccttcttcatcacacacatcctgaacatacactgtgactgcaacatcccgcctgtcctgtacagcgccttcacgtggctgggctatgtcaacagcgccgtgaaccccatcatctacaccaccttcaacattgagttccgcaaggccttcctgaagatcctccactgctgactctgctgcctgcccgcacagcagcctgcttcccacctccctgcccaggccagccagcctcacccttgcgaaccgtgagcaggaaggcctgggtggatcggcctcctcttcaccccggcaggccctgcagtgttcgcttggctccatgctcctcactgcccgcacaccctcactctgccagggcagtgctagtgagctgggcatggtaccagccctggggctgggccccccagctcaggggcagctcatagagtcccccctcccacctccagtccccctatccttggcaccaaagatgcagccgccttccttgaccttcctctggggctctagggttgctggagcctgagtcagggcccagaggctgagttttctctttgtggggcttggcgtggagcaggcggtggggagagatggacagttcacaccctgcaaggcccacaggaggcaagcaagctctcttgccgaggagccaggcaacttcagtcctgggagacccatgtaaataccagactgcaggttggaccccagagattcccaagccaaaaaccttagctccctcccgcaccccgatgtggacctctactttccaggctagtccggacccacctcaccccgttacagctccccaagtggtttccacatgctctgagaagaggagccctcatcttgaagggcccaggagggtctatggggagaggaactccttggcctagcccaccctgctgccttctgacggccctgcaatgtatcccttctcacagcacatgctggccagcctggggcctggcagggaggtcaggccctggaactctatctgggcctgggctaggggacatcagaggttctttgagggactgcctctgccacactctgacgcaaaaccactttccttttctattccttctggcctttcctctctcctgtttcccttcccttccactgcctctgccttagaggagcccacggctaagaggctgctgaaaaccatctggcctggcctggccctgccctgaggaaggaggggaagctgcagcttgggagagcccctggggcctagactctgtaacatcactatccatgcaccaaactaataaaactttgacgagtcaccttc

SEQ ID NO: 49896 - DNA, 2632 bp, Homo sapiens
agccagatgctgactgcctgtcagaattcagtccctacacaccccgccccatgtctgtctgtcttgcttcatggaccactcacaccccagagttccgcctgccttctctgttgcccaccaaacccgtgtgtgtttgttcgttcatatgcaagagcctggccacccagtggctccaccgccctgatggatccactgaatctgtcctggtatgatgatgatctggagaggcagaactggagccggcccttcaacgggtcagacgggaaggcggacagaccccactacaactactatgccacactgctcaccctgctcatcgctgtcatcgtcttcggcaacgtgctggtgtgcatggctgtgtcccgcgagaaggcgctgcagaccaccaccaactacctgatcgtcagcctcgcagtggccgacctcctcgtcgccacactggtcatgccctgggttgtctacctggaggtggtaggtgagtggaaattcagcaggattcactgtgacatcttcgtcactctggacgtcatgatgtgcacggcgagcatcctgaacttgtgtgccatcagcatcgacaggtacacagctgtggccatgcccatgctgtacaatacgcgctacagctccaagcgccgggtcaccgtcatgatctccatcgtctgggtcctgtccttcaccatctcctgcccactcctcttcggactcaataacgcagaccagaacgagtgcatcattgccaacccggccttcgtggtctactcctccatcgtctccttctacgtgcccttcattgtcaccctgctggtctacatcaagatctacattgtcctccgcagacgccgcaagcgagtcaacaccaaacgcagcagccgagctttcagggcccacctgagggctccactaaagggcaactgtactcaccccgaggacatgaaactctgcaccgttatcatgaagtctaatgggagtttcccagtgaacaggcggagagtggaggctgcccggcgagcccaggagctggagatggagatgctctccagcaccagcccacccgagaggacccggtacagccccatcccacccagccaccaccagctgactctccccgacccgtcccaccatggtctccacagcactcccgacagccccgccaaaccagagaagaatgggcatgccaaagaccaccccaagattgccaagatctttgagatccagaccatgcccaatggcaaaacccggacctccctcaagaccatgagccgtaggaagctctcccagcagaaggagaagaaagccactcagatgctcgccattgttctcggcgtgttcatcatctgctggctgcccttcttcatcacacacatcctgaacatacactgtgactgcaacatcccgcctgtcctgtacagcgccttcacgtggctgggctatgtcaacagcgccgtgaaccccatcatctacaccaccttcaacattgagttccgcaaggccttcctgaagatcctccactgctgactctgctgcctgcccgcacagcagcctgcttcccacctccctgcccaggccagccagcctcacccttgcgaaccgtgagcaggaaggcctgggtggatcggcctcctcttcaccccggcaggccctgcagtgttcgcttggctccatgctcctcactgcccgcacaccctcactctgccagggcagtgctagtgagctgggcatggtaccagccctggggctgggccccccagctcaggggcagctcatagagtcccccctcccacctccagtccccctatccttggcaccaaagatgcagccgccttccttgaccttcctctggggctctagggttgctggagcctgagtcagggcccagaggctgagttttctctttgtggggcttggcgtggagcaggcggtggggagagatggacagttcacaccctgcaaggcccacaggaggcaagcaagctctcttgccgaggagccaggcaacttcagtcctgggagacccatgtaaataccagactgcaggttggaccccagagattcccaagccaaaaaccttagctccctcccgcaccccgatgtggacctctactttccaggctagtccggacccacctcaccccgttacagctccccaagtggtttccacatgctctgagaagaggagccctcatcttgaagggcccaggagggtctatggggagaggaactccttggcctagcccaccctgctgccttctgacggccctgcaatgtatcccttctcacagcacatgctggccagcctggggcctggcagggaggtcaggccctggaactctatctgggcctgggctaggggacatcagaggttctttgagggactgcctctgccacactctgacgcaaaaccactttccttttctattccttctggcctttcctctctcctgtttcccttcccttccactgcctctgccttagaggagcccacggctaagaggctgctgaaaaccatctggcctggcctggccctgccctgaggaaggaggggaagctgcagcttgggagagcccctggggcctagactctgtaacatcactatccatgcaccaaactaataaaactttgacgagtcaccttc

SEQ ID NO: 49897 - DNA, 1023 bp, Homo sapiens
ggcagccgtccggggccgccactctcctcggccggtccctggctgccggaggggcggccgcgcgtggatgcggcgggagctggaagcctcaagcagccggcgccgtctctgccccggggcgccctatggcttgaagagcctggccacccagtggctccaccgccctgatggatccactgaatctgtcctggtatgatgatgatctggagaggcagaactggagccggcccttcaacgggtcagacgggaaggcggacagaccccactacaactactatgccacactgctcaccctgctcatcgctgtcatcgtcttcggcaacgtgctggtgtgcatggctgtgtcccgcgagaaggcgctgcagaccaccaccaactacctgatcgtcagcctcgcagtggccgacctcctcgtcgccacactggtcatgccctgggttgtctacctggaggtggtaggtgagtggaaattcagcaggattcactgtgacatcttcgtcactctggacgtcatgatgtgcacggcgagcatcctgaacttgtgtgccatcagcatcgacaggtacacagctgtggccatgcccatgctgtacaatacgcgctacagctccaagcgccgggtcaccgtcatgatctccatcgtctgggtcctgtccttcaccatctcctgcccactcctcttcggactcaataacgcagaccagaacgagtgcatcattgccaacccggccttcgtggtctactcctccatcgtctccttctacgtgcccttcattgtcaccctgctggtctacatcaagatctacattgtcctccgcagacgccgcaagcgagtcaacaccaaacgcagcagccgagctttcagggcccacctgagggctccactaaaggtctcaagacaccccccaaccaactccaagggtccccacctaaccattaccaagagggctcatcttatgctcaggtgggggcttgggaaacctcagcaagggttaggtctaggctaaaggaattcccaggagc

SEQ ID NO: 49898 - DNA, 315 bp, Homo sapiens
ggcagccgtccggggccgccactctcctcggccggtccctggctgccggaggggcggccgcgcgtggatgcggcgggagctggaagcctcaagcagccggcgccgtctctgccccggggcgccctatggcttgaaggtaagcaccggccggatggagcggcgggcgactcagtgtcacggggagaggaggagggacctccaaggggagcgaggccaggaccagaagtttgtgcggccactcctggccgcctgctcgggagcgcccgcctgggatccggctctgcatgggctccccgtcgggcgggggcagagggc

SEQ ID NO: 49899 - DNA, 2787 bp, Homo sapiens
  misc_feature (90)..(90): n is a, c, g, or t
  misc_feature (160)..(160): n is a, c, g, or t
  misc_feature (173)..(173): n is a, c, g, or t
  misc_feature (175)..(175): n is a, c, g, or t
  misc_feature (203)..(204): n is a, c, g, or t
ccggcagcctcacgcgcgcaccgcgcctccgccccgtccccgcgctccctcctgcccgcccgccccggcccggccccgccccgccccgcnccgccgcggcccgtccactgctccccgcgggccagagccggccgagctgctgcccgccggggctctgaanggccggcggggcngngagccaggaccggccgaggagagtgcgnncccggacggctgccggaggggcggccgcgcgtggatgcggcgggagctggaagcctcaagcagccggcgccgtctctgccccggggcgccctatggcttgaagagcctggccacccagtggctccaccgccctgatggatccactgaatctgtcctggtatgatgatgatctggagaggcagaactggagccggcccttcaacgggtcagacgggaaggcggacagaccccactacaactactatgccacactgctcaccctgctcatcgctgtcatcgtcttcggcaacgtgctggtgtgcatggctgtgtcccgcgagaaggcgctgcagaccaccaccaactacctgatcgtcagcctcgcagtggccgacctcctcgtcgccacactggtcatgccctgggttgtctacctggaggtggtaggtgagtggaaattcagcaggattcactgtgacatcttcgtcactctggacgtcatgatgtgcacggcgagcatcctgaacttgtgtgccatcagcatcgacaggtacacagctgtggccatgcccatgctgtacaatacgcgctacagctccaagcgccgggtcaccgtcatgatctccatcgtctgggtcctgtccttcaccatctcctgcccactcctcttcggactcaataacgcagaccagaacgagtgcatcattgccaacccggccttcgtggtctactcctccatcgtctccttctacgtgcccttcattgtcaccctgctggtctacatcaagatctacattgtcctccgcagacgccgcaagcgagtcaacaccaaacgcagcagccgagctttcagggcccacctgagggctccactaaagggcaactgtactcaccccgaggacatgaaactctgcaccgttatcatgaagtctaatgggagtttcccagtgaacaggcggagagtggaggctgcccggcgagcccaggagctggagatggagatgctctccagcaccagcccacccgagaggacccggtacagccccatcccacccagccaccaccagctgactctccccgacccgtcccaccatggtctccacagcactcccgacagccccgccaaaccagagaagaatgggcatgccaaagaccaccccaagattgccaagatctttgagatccagaccatgcccaatggcaaaacccggacctccctcaagaccatgagccgtaggaagctctcccagcagaaggagaagaaagccactcagatgctcgccattgttctcggcgtgttcatcatctgctggctgcccttcttcatcacacacatcctgaacatacactgtgactgcaacatcccgcctgtcctgtacagcgccttcacgtggctgggctatgtcaacagcgccgtgaaccccatcatctacaccaccttcaacattgagttccgcaaggccttcctgaagatcctccactgctgactctgctgcctgcccgcacagcagcctgcttcccacctccctgcccaggccagccagcctcacccttgcgaaccgtgagcaggaaggcctgggtggatcggcctcctcttcaccccggcaggccctgcagtgttcgcttggctccatgctcctcactgcccgcacaccctcactctgccagggcagtgctagtgagctgggcatggtaccagccctggggctgggccccccagctcaggggcagctcatagagtcccccctcccacctccagtccccctatccttggcaccaaagatgcagccgccttccttgaccttcctctggggctctagggttgctggagcctgagtcagggcccagaggctgagttttctctttgtggggcttggcgtggagcaggcggtggggagagatggacagttcacaccctgcaaggcccacaggaggcaagcaagctctcttgccgaggagccaggcaacttcagtcctgggagacccatgtaaataccagactgcaggttggaccccagagattcccaagccaaaaaccttagctccctcccgcaccccgatgtggacctctactttccaggctagtccggacccacctcaccccgttacagctccccaagtggtttccacatgctctgagaagaggagccctcatcttgaagggcccaggagggtctatggggagaggaactccttggcctagcccaccctgctgccttctgacggccctgcaatgtatcccttctcacagcacatgctggccagcctggggcctggcagggaggtcaggccctggaactctatctgggcctgggctaggggacatcagaggttctttgagggactgcctctgccacactctgacgcaaaaccactttccttttctattccttctggcctttcctctctcctgtttcccttcccttccactgcctctgccttagaggagcccacggctaagaggctgctgaaaaccatctggcctggcctggccctgccctgaggaaggaggggaagctgcagcttgggagagcccctggggcctagactctgtaacatcactatccatgcaccaaactaataaaactttgacgagtcaccttc

SEQ ID NO: 49900 - DNA, 3088 bp, Homo sapiens
  misc_feature (90)..(90): n is a, c, g, or t
  misc_feature (160)..(160): n is a, c, g, or t
  misc_feature (173)..(173): n is a, c, g, or t
  misc_feature (175)..(175): n is a, c, g, or t
  misc_feature (203)..(204): n is a, c, g, or t
  misc_feature (2953)..(2953): n is a, c, g, or t
ccggcagcctcacgcgcgcaccgcgcctccgccccgtccccgcgctccctcctgcccgcccgccccggcccggccccgccccgccccgcnccgccgcggcccgtccactgctccccgcgggccagagccggccgagctgctgcccgccggggctctgaanggccggcggggcngngagccaggaccggccgaggagagtgcgnncccggacggctgccggaggggcggccgcgcgtggatgcggcgggagctggaagcctcaagcagccggcgccgtctctgccccggggcgccctatggcttgaagagcctggccacccagtggctccaccgccctgatggatccactgaatctgtcctggtatgatgatgatctggagaggcagaactggagccggcccttcaacgggtcagacgggaaggcggacagaccccactacaactactatgccacactgctcaccctgctcatcgctgtcatcgtcttcggcaacgtgctggtgtgcatggctgtgtcccgcgagaaggcgctgcagaccaccaccaactacctgatcgtcagcctcgcagtggccgacctcctcgtcgccacactggtcatgccctgggttgtctacctggaggtggtaggtgagtggaaattcagcaggattcactgtgacatcttcgtcactctggacgtcatgatgtgcacggcgagcatcctgaacttgtgtgccatcagcatcgacaggtacacagctgtggccatgcccatgctgtacaatacgcgctacagctccaagcgccgggtcaccgtcatgatctccatcgtctgggtcctgtccttcaccatctcctgcccactcctcttcggactcaataacgcagaccagaacgagtgcatcattgccaacccggccttcgtggtctactcctccatcgtctccttctacgtgcccttcattgtcaccctgctggtctacatcaagatctacattgtcctccgcagacgccgcaagcgagtcaacaccaaacgcagcagccgagctttcagggcccacctgagggctccactaaagggcaactgtactcaccccgaggacatgaaactctgcaccgttatcatgaagtctaatgggagtttcccagtgaacaggcggagagtggaggctgcccggcgagcccaggagctggagatggagatgctctccagcaccagcccacccgagaggacccggtacagccccatcccacccagccaccaccagctgactctccccgacccgtcccaccatggtctccacagcactcccgacagccccgccaaaccagagaagaatgggcatgccaaagaccaccccaagattgccaagatctttgagatccagaccatgcccaatggcaaaacccggacctccctcaagaccatgagccgtaggaagctctcccagcagaaggagaagaaagccactcagatgctcgccattgttctcggcgtgttcatcatctgctggctgcccttcttcatcacacacatcctgaacatacactgtgactgcaacatcccgcctgtcctgtacagcgccttcacgtggctgggctatgtcaacagcgccgtgaaccccatcatctacaccaccttcaacattgagttccgcaaggccttcctgaagatcctccactgctgactctgctgcctgcccgcacagcagcctgcttcccacctccctgcccaggccagccagcctcacccttgcgaaccgtgagcaggaaggcctgggtggatcggcctcctcttcaccccggcaggccctgcagtgttcgcttggctccatgctcctcactgcccgcacaccctcactctgccagggcagtgctagtgagctgggcatggtaccagccctggggctgggccccccagctcaggggcagctcatagagtcccccctcccacctccagtccccctatccttggcaccaaagatgcagccgccttccttgaccttcctctggggctctagggttgctggagcctgagtcagggcccagaggctgagttttctctttgtggggcttggcgtggagcaggcggtggggagagatggacagttcacaccctgcaaggcccacaggaggcaagcaagctctcttgccgaggagccaggcaacttcagtcctgggagacccatgtaaataccagactgcaggttggaccccagagattcccaagccaaaaaccttagctccctcccgcaccccgatgtggacctctactttccaggctagtccggacccacctcaccccgttacagctccccaagtggtttccacatgctctgagaagaggagccctcatcttgaagggcccaggagggtctatggggagaggaactccttggcctagcccaccctgctgccttctgacggccctgcaatgtatcccttctcacagcacatgctggccagcctggggcctggcagggaggtcaggccctggaactctatctgggcctgggctaggggacatcagaggttctttgagggactgcctctgccacactctgacgcaaaaccactttccttttctattccttctggcctttcctctctcctgtttcccttcccttccactgcctctgccttagaggagcccacggctaagaggctgctgaaaaccatctggcctggcctggccctgccctgaggaaggaggggaagctgcagcttgggagagcccctggggcctagactctgtaacatcactatccatgcaccaaactaataaaactttgacgagtcaccttcaaaaaaaaaaaaaaaaacaacaaaaaacacaccgggggacataagcggcggcggggacaacgggtagaacgggagctggctaagtgtggcccgacccctttctgtgaaggggaaacgggcgcccacaaggaagggaatacgaacctgactgacgccgccgcaacgngaagaaagcgcaacgagaaacaagaaggacagagagcagcacacagacagaacgataacaacatcacatacaaacacgacacaacaacacaagaaggccggccgaccgaccggccaagaacccaagagaccgtgc

SEQ ID NO: 49901 - DNA, 2495 bp, Homo sapiens
agccagatgctgactgcctgtcagaattcagtccctacacaccccgccccatgtctgtctgtcttgcttcatggaccactcacaccccagagttccgcctgccttctctgttgcccaccaaacccgtgtgtgtttgttcgttcatatgcaagagcctggccacccagtggctccaccgccctgatggatccactgaatctgtcctggtatgatgatgatctggagaggcagaactggagccggcccttcaacgggtcagacgggaaggcggacagaccccactacaactactatgccacactgctcaccctgctcatcgctgtcatcgtcttcggcaacgtgctggtgtgcatggctgtgtcccgcgagaaggcgctgcagaccaccaccaactacctgatcgtcagcctcgcagtggccgacctcctcgtcgccacactggtcatgccctgggttgtctacctggaggtggtaggtgagtggaaattcagcaggattcactgtgacatcttcgtcactctggacgtcatgatgtgcacggcgagcatcctgaacttgtgtgccatcagcatcgacagaccagaacgagtgcatcattgccaacccggccttcgtggtctactcctccatcgtctccttctacgtgcccttcattgtcaccctgctggtctacatcaagatctacattgtcctccgcagacgccgcaagcgagtcaacaccaaacgcagcagccgagctttcagggcccacctgagggctccactaaagggcaactgtactcaccccgaggacatgaaactctgcaccgttatcatgaagtctaatgggagtttcccagtgaacaggcggagagtggaggctgcccggcgagcccaggagctggagatggagatgctctccagcaccagcccacccgagaggacccggtacagccccatcccacccagccaccaccagctgactctccccgacccgtcccaccatggtctccacagcactcccgacagccccgccaaaccagagaagaatgggcatgccaaagaccaccccaagattgccaagatctttgagatccagaccatgcccaatggcaaaacccggacctccctcaagaccatgagccgtaggaagctctcccagcagaaggagaagaaagccactcagatgctcgccattgttctcggcgtgttcatcatctgctggctgcccttcttcatcacacacatcctgaacatacactgtgactgcaacatcccgcctgtcctgtacagcgccttcacgtggctgggctatgtcaacagcgccgtgaaccccatcatctacaccaccttcaacattgagttccgcaaggccttcctgaagatcctccactgctgactctgctgcctgcccgcacagcagcctgcttcccacctccctgcccaggccagccagcctcacccttgcgaaccgtgagcaggaaggcctgggtggatcggcctcctcttcaccccggcaggccctgcagtgttcgcttggctccatgctcctcactgcccgcacaccctcactctgccagggcagtgctagtgagctgggcatggtaccagccctggggctgggccccccagctcaggggcagctcatagagtcccccctcccacctccagtccccctatccttggcaccaaagatgcagccgccttccttgaccttcctctggggctctagggttgctggagcctgagtcagggcccagaggctgagttttctctttgtggggcttggcgtggagcaggcggtggggagagatggacagttcacaccctgcaaggcccacaggaggcaagcaagctctcttgccgaggagccaggcaacttcagtcctgggagacccatgtaaataccagactgcaggttggaccccagagattcccaagccaaaaaccttagctccctcccgcaccccgatgtggacctctactttccaggctagtccggacccacctcaccccgttacagctccccaagtggtttccacatgctctgagaagaggagccctcatcttgaagggcccaggagggtctatggggagaggaactccttggcctagcccaccctgctgccttctgacggccctgcaatgtatcccttctcacagcacatgctggccagcctggggcctggcagggaggtcaggccctggaactctatctgggcctgggctaggggacatcagaggttctttgagggactgcctctgccacactctgacgcaaaaccactttccttttctattccttctggcctttcctctctcctgtttcccttcccttccactgcctctgccttagaggagcccacggctaagaggctgctgaaaaccatctggcctggcctggccctgccctgaggaaggaggggaagctgcagcttgggagagcccctggggcctagactctgtaacatcactatccatgcaccaaactaataaaactttgacgagtcaccttc

SEQ ID NO: 49902 - DNA, 511 bp, Homo sapiens
tcagcctcctgagtagctgggattacagacgcacgccaccatgcccggctaatttttgtatttttagtagagacaaggtttccccatattggtcaggctggtcttgaactcctgaccttgtgatccgcccgccttgacctcccaaagtgctgggatgacaggcgtgatccaccgtgcccagccgggaaatccattttttaaaataaattcaattatgtcttgaaaggtacccaggacccgggggaatatcccgggctccggggtacaaagaaaaaatagtcacaaagaatgagtaacacttactacttgctcaggtgtggtggctcacactctgtaagcacagctctttaggagcacaaggcggacagatcgcttaagcacaggattcaaagactagccgggcaacatggcaataccccatctctactaaatatacaaaaaatagccaggcattgtgggcacacttgtagtcccagctacccagatccggggatgagatcctgtagatcgc

SEQ ID NO: 49903 - DNA, 2029 bp, Homo sapiens
tcagcctcctgagtagctgggattacagacgcacgccaccatgcccggctaatttttgtatttttagtagagacaaggtttccccatattggtcaggctggtcttgaactcctgaccttgtgatccgcccgccttgacctcccaaagtgctgggatgacaggcgtgatccaccgtgcccagccgggaaatccattttttaaaataaattcaattatgtcttgaatgtactcagaaaacgagctgtttaaaatgtcccattgtgactgtaatgtgaacaatgacctctaacttgtattttatttggcaaggatgggggatgtgcatcaaatcttcacctctgggatttcctgaggcttggtctacttggctcaccctccacctgcatccccaccccactcctagatattaatacaaatctagccttgacaccgcctactgctccaccaccgcctacgtttttggccatcagagccttggagtttacagagcagaggccatgacattggggagcttgtttaaaaatcaatgatcagaaccccacattttagtttccttttggggagaaagaggagggccgtggaagaaaaggggtgtgcagctggagcgttattatgtctttctcagcggcaggcatgcccgcctctccaccttctccccgccaggcacaggagccagcagctggagcgtgctctgagtttcaggggaccccccacccagactgactggggcttctgggacttctcataggaagagtcaagacctcctgcgcttctttaaaaggtgatgggctcagtgttcccagtggcatctggaggtgaagccggtactgtctcaggagtggaaggcaatggcccactggcctttttctcccccacgtcacagtccccatttgctggagcccttgagggggccaccgaaactgtggctctcattcagcctcccaaagtgttgcactactgaatactcctttctgtttacaccagcagtgaatagagtcatgaaaagaacatattatatgcaatggcttgatgcttagtgtggcaatcaaaagcttgcctgggcagatgtaggcaggggctagacaatagtcatggagttgtcaccaggtcactgtctctctccttccccttccaggtctctactgtcccctgcagccaccacaagggctaagctgttgaatgagccccttggtttttccttataaacgcaatgacttacttgtgattcttggtctaatcccaggctaagaaacaaaacaaaagcttgtgatctgacccattcctttgctgccttccttctctttcaggcacctggacgtatttagtattctgccctgtgccttgcccaggggagggagaagtttctagcaaatgtggctttctgtctgctgcctggtgcttttatagtacttcatctgctttttattgttgttgttgtgttttttaaccaaaatggcatttgtttggctgtcattgtcgagtatatatttattgtgttttacaaacatgagtatatatgtatgtatatgtataaaaccaaacttatatatataagaagtcaaggcatgtatactagatattttaaagagttatttatcaagggaaaaagatgtgtgttataaagtaaacagagtctatattttctatataatgtagatagtcaaacatagcttataaattataggaggttttggttttcttttttattattaaaggaaaaaaagaagaaaaaaaaagacaatgaatgcaactgttcttagtgtttttaaggccaaactactgtggaagctgggaggcggccctccctgcgggcctccagcagccctgtgcctgccgctaggagctccagagctgatgcccgttgtgatctctgcgatgctcgatgctcggagccagcggtcagcatcactcagccagctggcctgtgccgctctgacgtggcttccagctgttctccgcaatttgcattggtgggataaaggaatgaaaaggataaataaagatttaaaagaaaatacaaaaaaagctc

SEQ ID NO: 49904 - DNA, 857 bp, Homo sapiens
tcagcctcctgagtagctgggattacagacgcacgccaccatgcccggctaatttttgtatttttagtagagacaaggtttccccatattggtcaggctggtcttgaactcctgaccttgtgatccgcccgccttgacctcccaaagtgctgggatgacaggcgtgatccaccgtgcccagccgggaaatccattttttaaaataaattcaattatgtcttgaatgtactcagaaaacgagctgtttaaaatgtcccattgtgactgtaatgtgaacaatgacctctaacttgtattttatttggcaaggatgggggatgtgcatcaaatcttcacctctgggatttcctgaggcttggtctacttggctcaccctccacctgcatccccaccccactcctagatattaatacaaatctagccttgacaccgcctactgctccaccaccgcctacgtttttggccatcagagccttggagtttacagagcagaggccatgacattggggagcttgtttaaaaatcaatgatcagaaccccacattttagtttccttttggggagaaagaggagggccgtggaagaaaaggggtgtgcagctggagcgttattatgtctttctcagcggcaggcatgcccgcctctccaccttctccccgccaggcacaggactccagagctgatgcccgttgtgatctctgcgatgctcgatgctcggagccagcggtcagcatcactcagccagctggcctgtgccgctctgacgtggcttccagctgttctccgcaatttgcattggtgggataaaggaatgaaaaggataaataaagatttaaaagaaaatacaaaaaaagctc

SEQ ID NO: 49905 - DNA, 518 bp, Homo sapiens
tggcagttagcccgcccgctcggcgcagggcgtggcttctcgtagccattaggaaacagcaaccctttcacctcagggaacccatgcatctgcctggcatttaggcagcagagcccctgaccgtcccccacagggctctgcctcacgtcctcatctcatttggctgtgtaaagaaatgggaaaagggaaaaggagagagcaattgaggcagttgaccatattcagttttatttatttatttttaatttgtttttttctccaagtccaccagtctctgaaattagaacagtaggcggtatgagataatcaggcctaatcatgttgtgattctcttttcttagtggagtggaatgttctatccccacaagaaggattatatcttatagacttgtcttgttcagattctgtatttacccattttattgaaacatatactaagttccatgtatttttgttacaaatcttctgaaaaaaaacaaaacaatgtgaaacattaaaattaaaaggcattaataata

SEQ ID NO: 49906 - DNA, 1136 bp, Homo sapiens
  misc_feature (530)..(530): n is a, c, g, or t
tggcagttagcccgcccgctcggcgcagggcgtggcttctcgtagccattaggaaacagcaaccctttcacctcagggaacccatgcatctgcctggcatttaggcagcagagcccctgaccgtcccccacagggctctgcctcacgtcctcatctcatttggctgtgtaaagaaatgggaaaagggaaaaggagagagcaattgaggcagttgaccatattcagttttatttatttatttttaatttgtttttttctccaagtccaccagtctctgaaattagaacagtaggcggtatgagataatcaggcctaatcatgttgtgattctcttttcttagtggagtggaatgttctatccccacaagaaggattatatcttatagacttgtcttgttcagattctgtatttacccattttattgaaacatatactaagttccatgtatttttgttacaaatcttctgaaaaaaaacaaaacaatgtgaaacattaaaattaaaaggcattaataataaaaaaaaaaaanaaaaaaaaaaaaaaaaaaaaaaaaaaaaaaaaaaaaaaaaaaaaaaaaaaaaaaaaaaaaaaaaataaaaacaaaaaaaagaagagaagaaagaagagaagagagaggaggaggaggcagaggcgacagagtatatatattattagtagcagcgagagcgacgaagcgattgatgggcgaggagacgtggcgtctatctctctatatatacataacacgtgcctccactccctaacactaactcatcatataatatataaattaatcatcaaactatattatacccaaaaacatatcctatattcatattatacaaacaactacctaaaaaaactaaaaacatcagcatatcctagaatcacacaatccactcaactacatctacaaacaataacaaacacaaaactattcccttgcagccttcaacactgctcctatcgaacaaacagatcattaatttcacaataaacatattatatctccctattacaaatcactccccaatccctcgaacctctactatacatccccctcgtgcaacaacctaatcagatcaaactatcatcactcacacatacctaccacttccttaccctcccttcttca

SEQ ID NO: 49907 - DNA, 759 bp, Homo sapiens
agcggaagagcagaggcttggaaattaggaaacctggatttcagtatcaagctgtgtgatcctgtgcaattaatcccctaagcatcaggattctcctctgtaaaataggaataataagagacccttctaaatgtggctcttgcaggaaaaacatgagataagcatacttttatgccagtaaaggacttagcaggatgcctggctcgccgaatctctttcccccttggaaacttcttttatctacctctctgcccctgactcactggaatcctacaaatgggacatctcaggcagctaaagatcatcaccctggtaaaactttgccagagaacccagcaggattcaccagcacggccactgcagactccagagccctgcttcaggcctatatagatggtcactctgtggtcatcttcagtaggtccacatgcacacgctgtactgaggtaaagaagttatttaaatctctgtgtgttccttattttgtgcttgaacttgatcaaacaggtaagtttctgtttaatatgtaaatcatagctgctgactgtacattttatctcatttattctatctggctttaatttgtcttccttgaggtttttattgtttagtgagcacttgctagctgattcttctttttggtcttttagacagggtactctcctggagctaatcatattcacctttagcctttacctagtgtatagccttggtattacccagagtttcctcttattgaaattattcttcttattactc

SEQ ID NO: 49908 - DNA, 867 bp, Homo sapiens
gcgactaagaccacgtatatgtactgagatgatacttataagttcatatggtcttgtagcacaatataaggcaaaaaatttattcagcagagagatttctcattgccactggtgaaagaccacgttacttgggcatccctggtgacaaagaatactgcatcagcaggtaaaggaaaaaagcagggtggaaaagaaaaacccattgtggatattgctttcgcatttttcttcaaacccactgcgtcaatttcttgggcttcagacagatttctttgccacattgtgccctctctgggggcaggggtttgggagaaagagaaaaaggaaaaatgattttaaaggagaacattttaaatattgaaaacttcaaacattggtcatcttgctacacagagtatcactaacatactagtatagatttacatttgtattcgaaatttatttatgcatgtatgagtatgaaagtatgtaataaaaccaaatggatattcacaaacattttgtaaaataggtatgatacatatatacatttagattttgtaaaatgaggatcatgtattaccctttaacacttgcagagtggctgctaaaagaattagaggctgtcaggccatttagatttatcagaatctagaccctactcaatgctgtttgaatggttgcagtgtcagtgtagaaggacctcctgaaacaagtcaagcaaggagatgttttgctgtgtggtttatttttgcccgtcaaatggtaacactgctgacattgttcaggagctttcaattatgaagtcattaagacagagtgttggtaaatgtgtcttcttggatgctttttgctcaggagtttctgattgtgttataaattactcta

SEQ ID NO: 49909 - DNA, 3908 bp, Homo sapiens
tggcagttagcccgcccgctcggcgcagggcgtggcttctcgtagccattaggaaacagcaaccctttcacctcagttttcttcactccggcatttgcagcagagcgaaaggtggtggagtcctgaaggagggcctgatgtcttcatcattctcaaattcttgtaagctctgcgtcgggtgaaaccagacaaagccgcgagcccagggatgggagcacgcgggggacggcctgccggcggggacgacagcattgcgcctgggtgcagcagtgtgcgtctcggggaagggaagatattttaaggcgtgtctgagcagacggggaggcttttccaaacccaggcagcttcgtggcgtgtgcggtttcgacccggtcacacaaagcttcagcatgtcatgtgaggacggtcgggccctggaaggaacgctctcggaattggccgcggaaaccgatctgcccgttgtgtttgtgaaacagagaaagataggcggccatggtccaaccttgaaggcttatcaggagggcagacttcaaaagctactaaaaatgaacggccctgaagatcttcccaagtcctatgactatgaccttatcatcattggaggtggctcaggaggtctggcagctgctaaggaggcagcccaatatggcaagaaggtgatggtcctggactttgtcactcccacccctcttggaactagatggggtcttggaggaacatgtgtgaatgtgggttgcatacctaaaaaactgatgcatcaagcagctttgttaggacaagccctgcaagactctcgaaattatggatggaaagtcgaggagacagttaagcatgattgggacagaatgatagaagctgtacagaatcacattggctctttgaattggggctaccgagtagctctgcgggagaaaaaagtcgtctatgagaatgcttatgggcaatttattggtcctcacaggattaaggcaacaaataataaaggcaaagaaaaaatttattcagcagagagatttctcattgccactggtgaaagaccacgttacttgggcatccctggtgacaaagaatactgcatcagcagtgatgatcttttctccttgccttactgcccgggtaagaccctggttgttggagcatcctatgtcgctttggagtgcgctggatttcttgctggtattggtttagacgtcactgttatggttaggtccattcttcttagaggatttgaccaggacatggccaacaaaattggtgaacacatggaagaacatggcatcaagtttataagacagttcgtaccaattaaagttgaacaaattgaagcagggacaccaggccgactcagagtagtagctcagtccaccaatagtgaggaaatcattgaaggagaatataatacggtgatgctggcaataggaagagatgcttgcacaagaaaaattggcttagaaaccgtaggggtgaagataaatgaaaagactggaaaaatacctgtcacagatgaagaacagaccaatgtgccttacatctatgccattggcgatatattggaggataaggtggagctcaccccagttgcaatccaggcaggaagattgctggctcagaggctctatgcaggttccactgtcaagtgtgactatgaaaatgttccaaccactgtatttactcctttggaatatggtgcttgtggcctttctgaggagaaagctgtggagaagtttggggaagaaaatattgaggtttaccatagttacttttggccattggaatggacgattccgtcaagagataacaacaaatgttatgcaaaaataatctgtaatactaaagacaatgaacgtgttgtgggctttcacgtactgggtccaaatgctggagaagttacacaaggctttgcagctgcgctcaaatgtggactgaccaaaaagcagctggacagcacaattggaatccaccctgtctgtgcagaggtattcacaacattgtctgtgaccaagcgctctggggcaagcatcctccaggctggctgctgaggttaagccccagtgtggatgctgttgccaagactgcaaaccactggctcgtttccgtgcccaaatccaaggcgaagttttctagagggttcttgggctcttggcacctgcgtgtcctgtgcttaccaccgcccaaggcccccttggatctcttggataggagttggtgaatagaaggcaggcagcatcacactggggtcactgacagacttgaagctgacatttggcagggcatcgaagggatgcatccatgaagtcaccagtctcaagcccatgtggtaggcggtgatggaacaactgtcaaatcagttttagcatgacctttccttgtggattttcttattctcgttgtcaagttttctagggttgaatttttttcttttttctccatggtgttaatgatattagagatgaaaaacgttagcagttgatttttgtccaaaagcaagtcatggctagagtatccatgcaaggtgtcttgttgcatggaagggatagtttggctcccttggaggctatgtaggcttgtcccgggaaagagaactgtcctgcagctgaaatggactgttctttactgacctgctcagcagtttcttctctcatatattcccaaaacaagtacatctgcgatcaactctagccaaatttgcccctgtgtgctacatgatggatgattattattttaaggtctgtttaggaagggaaatggctacttggccagccattgcctggcatttggtagtatagtatgattctcaccattatttgtcatggaggcagacatacaccagaaatgggggagaaacagtacatatctttctgtctttagtttattgtgtgctggtctaagcaagctgagatcatttgcaatggaaaacacgtaacttgtttaaaagtttttctggtagctttagctttatgctaaaaaaaataatgacattgggtatctatttctttctaagactacattagtaggaaaataagtcttttcatgcttatgatttagctgttttgtggtaattgctttttaaaggaagttattaatatcataagttattattaatattttgaacacaggtggatgtgaaggattttcatttaaaaaccaagtggttttgactttttctgttgaatgaacaactgtgccttgtggaatttttgcagaagtgtttatgctttgttagcatttcaacttgcattattataaagaggtattaatgcctcagttatgtgtttgtcaatgtactggctgaggattctatctcagctgtcttttctaactgtgtaggttgagttttgaacacgtgcttgtggacatcaggcctcctgccagcagttcttgaagcttctttttcattcctgctactctacctgtatttctcagttgcagcactgagtggtcaaaatacatttctgggccacctcagggaacccatgcatctgcctggcatttaggcagcagagcccctgaccgtcccccacagggctctgcctcacgtcctcatctcatttggctgtgtaaagaaatgggaaaagggaaaaggagagagcaattgaggcagttgaccatattcagttttatttatttatttttaatttgtttttttctccaagtccaccagtctctgaaattagaacagtaggcggtatgagataatcaggcctaatcatgttgtgattctcttttcttagtggagtggaatgttctatccccacaagaaggattatatcttatagacttgtcttgttcagattctgtatttacccattttattgaaacatatactaagttccatgtatttttgttacaaatcttctgaaaaaaaacaaaacaatgtgaaacattaaaattaaaaggcattaataata

SEQ ID NO: 49910 - DNA, 3671 bp, Homo sapiens
tggcagttagcccgcccgctcggcgcagggcgtggcttctcgtagccattaggaaacagcaaccctttcacctcagttttcttcactccggcatttgcagcagagcgaaaggtggtggagtcctgaaggagggcctgatgtcttcatcattctcaaattcttaggacggtcgggccctggaaggaacgctctcggaattggccgcggaaaccgatctgcccgttgtgtttgtgaaacagagaaagataggcggccatggtccaaccttgaaggcttatcaggagggcagacttcaaaagctactaaaaatgaacggccctgaagatcttcccaagtcctatgactatgaccttatcatcattggaggtggctcaggaggtctggcagctgctaaggaggcagcccaatatggcaagaaggtgatggtcctggactttgtcactcccacccctcttggaactagatggggtcttggaggaacatgtgtgaatgtgggttgcatacctaaaaaactgatgcatcaagcagctttgttaggacaagccctgcaagactctcgaaattatggatggaaagtcgaggagacagttaagcatgattgggacagaatgatagaagctgtacagaatcacattggctctttgaattggggctaccgagtagctctgcgggagaaaaaagtcgtctatgagaatgcttatgggcaatttattggtcctcacaggattaaggcaacaaataataaaggcaaagaaaaaatttattcagcagagagatttctcattgccactggtgaaagaccacgttacttgggcatccctggtgacaaagaatactgcatcagcagtgatgatcttttctccttgccttactgcccgggtaagaccctggttgttggagcatcctatgtcgctttggagtgcgctggatttcttgctggtattggtttagacgtcactgttatggttaggtccattcttcttagaggatttgaccaggacatggccaacaaaattggtgaacacatggaagaacatggcatcaagtttataagacagttcgtaccaattaaagttgaacaaattgaagcagggacaccaggccgactcagagtagtagctcagtccaccaatagtgaggaaatcattgaaggagaatataatacggtgatgctggcaataggaagagatgcttgcacaagaaaaattggcttagaaaccgtaggggtgaagataaatgaaaagactggaaaaatacctgtcacagatgaagaacagaccaatgtgccttacatctatgccattggcgatatattggaggataaggtggagctcaccccagttgcaatccaggcaggaagattgctggctcagaggctctatgcaggttccactgtcaagtgtgactatgaaaatgttccaaccactgtatttactcctttggaatatggtgcttgtggcctttctgaggagaaagctgtggagaagtttggggaagaaaatattgaggtttaccatagttacttttggccattggaatggacgattccgtcaagagataacaacaaatgttatgcaaaaataatctgtaatactaaagacaatgaacgtgttgtgggctttcacgtactgggtccaaatgctggagaagttacacaaggctttgcagctgcgctcaaatgtggactgaccaaaaagcagctggacagcacaattggaatccaccctgtctgtgcagaggtattcacaacattgtctgtgaccaagcgctctggggcaagcatcctccaggctggctgctgaggttaagccccagtgtggatgctgttgccaagactgcaaaccactggctcgtttccgtgcccaaatccaaggcgaagttttctagagggttcttgggctcttggcacctgcgtgtcctgtgcttaccaccgcccaaggcccccttggatctcttggataggagttggtgaatagaaggcaggcagcatcacactggggtcactgacagacttgaagctgacatttggcagggcatcgaagggatgcatccatgaagtcaccagtctcaagcccatgtggtaggcggtgatggaacaactgtcaaatcagttttagcatgacctttccttgtggattttcttattctcgttgtcaagttttctagggttgaatttttttcttttttctccatggtgttaatgatattagagatgaaaaacgttagcagttgatttttgtccaaaagcaagtcatggctagagtatccatgcaaggtgtcttgttgcatggaagggatagtttggctcccttggaggctatgtaggcttgtcccgggaaagagaactgtcctgcagctgaaatggactgttctttactgacctgctcagcagtttcttctctcatatattcccaaaacaagtacatctgcgatcaactctagccaaatttgcccctgtgtgctacatgatggatgattattattttaaggtctgtttaggaagggaaatggctacttggccagccattgcctggcatttggtagtatagtatgattctcaccattatttgtcatggaggcagacatacaccagaaatgggggagaaacagtacatatctttctgtctttagtttattgtgtgctggtctaagcaagctgagatcatttgcaatggaaaacacgtaacttgtttaaaagtttttctggtagctttagctttatgctaaaaaaaataatgacattgggtatctatttctttctaagactacattagtaggaaaataagtcttttcatgcttatgatttagctgttttgtggtaattgctttttaaaggaagttattaatatcataagttattattaatattttgaacacaggtggatgtgaaggattttcatttaaaaaccaagtggttttgactttttctgttgaatgaacaactgtgccttgtggaatttttgcagaagtgtttatgctttgttagcatttcaacttgcattattataaagaggtattaatgcctcagttatgtgtttgtcaatgtactggctgaggattctatctcagctgtcttttctaactgtgtaggttgagttttgaacacgtgcttgtggacatcaggcctcctgccagcagttcttgaagcttctttttcattcctgctactctacctgtatttctcagttgcagcactgagtggtcaaaatacatttctgggccacctcagggaacccatgcatctgcctggcatttaggcagcagagcccctgaccgtcccccacagggctctgcctcacgtcctcatctcatttggctgtgtaaagaaatgggaaaagggaaaaggagagagcaattgaggcagttgaccatattcagttttatttatttatttttaatttgtttttttctccaagtccaccagtctctgaaattagaacagtaggcggtatgagataatcaggcctaatcatgttgtgattctcttttcttagtggagtggaatgttctatccccacaagaaggattatatcttatagacttgtcttgttcagattctgtatttacccattttattgaaacatatactaagttccatgtatttttgttacaaatcttctgaaaaaaaacaaaacaatgtgaaacattaaaattaaaaggcattaataata

SEQ ID NO: 49911 - DNA, 3843 bp, Homo sapiens
tccgtcagttcccacagggccttgtgcgacatgggctgcgccgagggcaaggcagtggcggcggccgccccaacggagctgcagacgaaaggcaagaacggcgatggccgccgtaggtcagctaaagatcatcaccctggtaaaactttgccagagaacccagcaggattcaccagcacggccactgcagactccagagccctgcttcaggcctatatagatggtcactctgtggtcatcttcagtaggtccacatgcacacgctgtactgaggtaaagaagttatttaaatctctgtgtgttccttattttgtgcttgaacttgatcaaacagaggacggtcgggccctggaaggaacgctctcggaattggccgcggaaaccgatctgcccgttgtgtttgtgaaacagagaaagataggcggccatggtccaaccttgaaggcttatcaggagggcagacttcaaaagctactaaaaatgaacggccctgaagatcttcccaagtcctatgactatgaccttatcatcattggaggtggctcaggaggtctggcagctgctaaggaggcagcccaatatggcaagaaggtgatggtcctggactttgtcactcccacccctcttggaactagatggggtcttggaggaacatgtgtgaatgtgggttgcatacctaaaaaactgatgcatcaagcagctttgttaggacaagccctgcaagactctcgaaattatggatggaaagtcgaggagacagttaagcatgattgggacagaatgatagaagctgtacagaatcacattggctctttgaattggggctaccgagtagctctgcgggagaaaaaagtcgtctatgagaatgcttatgggcaatttattggtcctcacaggattaaggcaacaaataataaaggcaaagaaaaaatttattcagcagagagatttctcattgccactggtgaaagaccacgttacttgggcatccctggtgacaaagaatactgcatcagcagtgatgatcttttctccttgccttactgcccgggtaagaccctggttgttggagcatcctatgtcgctttggagtgcgctggatttcttgctggtattggtttagacgtcactgttatggttaggtccattcttcttagaggatttgaccaggacatggccaacaaaattggtgaacacatggaagaacatggcatcaagtttataagacagttcgtaccaattaaagttgaacaaattgaagcagggacaccaggccgactcagagtagtagctcagtccaccaatagtgaggaaatcattgaaggagaatataatacggtgatgctggcaataggaagagatgcttgcacaagaaaaattggcttagaaaccgtaggggtgaagataaatgaaaagactggaaaaatacctgtcacagatgaagaacagaccaatgtgccttacatctatgccattggcgatatattggaggataaggtggagctcaccccagttgcaatccaggcaggaagattgctggctcagaggctctatgcaggttccactgtcaagtgtgactatgaaaatgttccaaccactgtatttactcctttggaatatggtgcttgtggcctttctgaggagaaagctgtggagaagtttggggaagaaaatattgaggtttaccatagttacttttggccattggaatggacgattccgtcaagagataacaacaaatgttatgcaaaaataatctgtaatactaaagacaatgaacgtgttgtgggctttcacgtactgggtccaaatgctggagaagttacacaaggctttgcagctgcgctcaaatgtggactgaccaaaaagcagctggacagcacaattggaatccaccctgtctgtgcagaggtattcacaacattgtctgtgaccaagcgctctggggcaagcatcctccaggctggctgctgaggttaagccccagtgtggatgctgttgccaagactgcaaaccactggctcgtttccgtgcccaaatccaaggcgaagttttctagagggttcttgggctcttggcacctgcgtgtcctgtgcttaccaccgcccaaggcccccttggatctcttggataggagttggtgaatagaaggcaggcagcatcacactggggtcactgacagacttgaagctgacatttggcagggcatcgaagggatgcatccatgaagtcaccagtctcaagcccatgtggtaggcggtgatggaacaactgtcaaatcagttttagcatgacctttccttgtggattttcttattctcgttgtcaagttttctagggttgaatttttttcttttttctccatggtgttaatgatattagagatgaaaaacgttagcagttgatttttgtccaaaagcaagtcatggctagagtatccatgcaaggtgtcttgttgcatggaagggatagtttggctcccttggaggctatgtaggcttgtcccgggaaagagaactgtcctgcagctgaaatggactgttctttactgacctgctcagcagtttcttctctcatatattcccaaaacaagtacatctgcgatcaactctagccaaatttgcccctgtgtgctacatgatggatgattattattttaaggtctgtttaggaagggaaatggctacttggccagccattgcctggcatttggtagtatagtatgattctcaccattatttgtcatggaggcagacatacaccagaaatgggggagaaacagtacatatctttctgtctttagtttattgtgtgctggtctaagcaagctgagatcatttgcaatggaaaacacgtaacttgtttaaaagtttttctggtagctttagctttatgctaaaaaaaataatgacattgggtatctatttctttctaagactacattagtaggaaaataagtcttttcatgcttatgatttagctgttttgtggtaattgctttttaaaggaagttattaatatcataagttattattaatattttgaacacaggtggatgtgaaggattttcatttaaaaaccaagtggttttgactttttctgttgaatgaacaactgtgccttgtggaatttttgcagaagtgtttatgctttgttagcatttcaacttgcattattataaagaggtattaatgcctcagttatgtgtttgtcaatgtactggctgaggattctatctcagctgtcttttctaactgtgtaggttgagttttgaacacgtgcttgtggacatcaggcctcctgccagcagttcttgaagcttctttttcattcctgctactctacctgtatttctcagttgcagcactgagtggtcaaaatacatttctgggccacctcagggaacccatgcatctgcctggcatttaggcagcagagcccctgaccgtcccccacagggctctgcctcacgtcctcatctcatttggctgtgtaaagaaatgggaaaagggaaaaggagagagcaattgaggcagttgaccatattcagttttatttatttatttttaatttgtttttttctccaagtccaccagtctctgaaattagaacagtaggcggtatgagataatcaggcctaatcatgttgtgattctcttttcttagtggagtggaatgttctatccccacaagaaggattatatcttatagacttgtcttgttcagattctgtatttacccattttattgaaacatatactaagttccatgtatttttgttacaaatcttctgaaaaaaaacaaaacaatgtgaaacattaaaattaaaaggcattaataata

SEQ ID NO: 49912 - DNA, 3627 bp, Homo sapiens
aacagagggcacgcggtgcctgcggggccgggacggaagccccgcccccggcgcagttcccgcctgttagcgggggagaagcaccttacacgctccgctctgcttttgtgccacacagaggacggtcgggccctggaaggaacgctctcggaattggccgcggaaaccgatctgcccgttgtgtttgtgaaacagagaaagataggcggccatggtccaaccttgaaggcttatcaggagggcagacttcaaaagctactaaaaatgaacggccctgaagatcttcccaagtcctatgactatgaccttatcatcattggaggtggctcaggaggtctggcagctgctaaggaggcagcccaatatggcaagaaggtgatggtcctggactttgtcactcccacccctcttggaactagatggggtcttggaggaacatgtgtgaatgtgggttgcatacctaaaaaactgatgcatcaagcagctttgttaggacaagccctgcaagactctcgaaattatggatggaaagtcgaggagacagttaagcatgattgggacagaatgatagaagctgtacagaatcacattggctctttgaattggggctaccgagtagctctgcgggagaaaaaagtcgtctatgagaatgcttatgggcaatttattggtcctcacaggattaaggcaacaaataataaaggcaaagaaaaaatttattcagcagagagatttctcattgccactggtgaaagaccacgttacttgggcatccctggtgacaaagaatactgcatcagcagtgatgatcttttctccttgccttactgcccgggtaagaccctggttgttggagcatcctatgtcgctttggagtgcgctggatttcttgctggtattggtttagacgtcactgttatggttaggtccattcttcttagaggatttgaccaggacatggccaacaaaattggtgaacacatggaagaacatggcatcaagtttataagacagttcgtaccaattaaagttgaacaaattgaagcagggacaccaggccgactcagagtagtagctcagtccaccaatagtgaggaaatcattgaaggagaatataatacggtgatgctggcaataggaagagatgcttgcacaagaaaaattggcttagaaaccgtaggggtgaagataaatgaaaagactggaaaaatacctgtcacagatgaagaacagaccaatgtgccttacatctatgccattggcgatatattggaggataaggtggagctcaccccagttgcaatccaggcaggaagattgctggctcagaggctctatgcaggttccactgtcaagtgtgactatgaaaatgttccaaccactgtatttactcctttggaatatggtgcttgtggcctttctgaggagaaagctgtggagaagtttggggaagaaaatattgaggtttaccatagttacttttggccattggaatggacgattccgtcaagagataacaacaaatgttatgcaaaaataatctgtaatactaaagacaatgaacgtgttgtgggctttcacgtactgggtccaaatgctggagaagttacacaaggctttgcagctgcgctcaaatgtggactgaccaaaaagcagctggacagcacaattggaatccaccctgtctgtgcagaggtattcacaacattgtctgtgaccaagcgctctggggcaagcatcctccaggctggctgctgaggttaagccccagtgtggatgctgttgccaagactgcaaaccactggctcgtttccgtgcccaaatccaaggcgaagttttctagagggttcttgggctcttggcacctgcgtgtcctgtgcttaccaccgcccaaggcccccttggatctcttggataggagttggtgaatagaaggcaggcagcatcacactggggtcactgacagacttgaagctgacatttggcagggcatcgaagggatgcatccatgaagtcaccagtctcaagcccatgtggtaggcggtgatggaacaactgtcaaatcagttttagcatgacctttccttgtggattttcttattctcgttgtcaagttttctagggttgaatttttttcttttttctccatggtgttaatgatattagagatgaaaaacgttagcagttgatttttgtccaaaagcaagtcatggctagagtatccatgcaaggtgtcttgttgcatggaagggatagtttggctcccttggaggctatgtaggcttgtcccgggaaagagaactgtcctgcagctgaaatggactgttctttactgacctgctcagcagtttcttctctcatatattcccaaaacaagtacatctgcgatcaactctagccaaatttgcccctgtgtgctacatgatggatgattattattttaaggtctgtttaggaagggaaatggctacttggccagccattgcctggcatttggtagtatagtatgattctcaccattatttgtcatggaggcagacatacaccagaaatgggggagaaacagtacatatctttctgtctttagtttattgtgtgctggtctaagcaagctgagatcatttgcaatggaaaacacgtaacttgtttaaaagtttttctggtagctttagctttatgctaaaaaaaataatgacattgggtatctatttctttctaagactacattagtaggaaaataagtcttttcatgcttatgatttagctgttttgtggtaattgctttttaaaggaagttattaatatcataagttattattaatattttgaacacaggtggatgtgaaggattttcatttaaaaaccaagtggttttgactttttctgttgaatgaacaactgtgccttgtggaatttttgcagaagtgtttatgctttgttagcatttcaacttgcattattataaagaggtattaatgcctcagttatgtgtttgtcaatgtactggctgaggattctatctcagctgtcttttctaactgtgtaggttgagttttgaacacgtgcttgtggacatcaggcctcctgccagcagttcttgaagcttctttttcattcctgctactctacctgtatttctcagttgcagcactgagtggtcaaaatacatttctgggccacctcagggaacccatgcatctgcctggcatttaggcagcagagcccctgaccgtcccccacagggctctgcctcacgtcctcatctcatttggctgtgtaaagaaatgggaaaagggaaaaggagagagcaattgaggcagttgaccatattcagttttatttatttatttttaatttgtttttttctccaagtccaccagtctctgaaattagaacagtaggcggtatgagataatcaggcctaatcatgttgtgattctcttttcttagtggagtggaatgttctatccccacaagaaggattatatcttatagacttgtcttgttcagattctgtatttacccattttattgaaacatatactaagttccatgtatttttgttacaaatcttctgaaaaaaaacaaaacaatgtgaaacattaaaattaaaaggcattaataata

SEQ ID NO: 49913 - DNA, 3561 bp, Homo sapiens
tggcagttagcccgcccgctcggcgcagggcgtggcttctcgtagccattaggaaacagcaaccctttcacctcagttttcttcactccggcatttgcagcagagcgaaaggtggtggagtcctgaaggagggcctgatgtcttcatcattctcaaattcttgcttatcaggagggcagacttcaaaagctactaaaaatgaacggccctgaagatcttcccaagtcctatgactatgaccttatcatcattggaggtggctcaggaggtctggcagctgctaaggaggcagcccaatatggcaagaaggtgatggtcctggactttgtcactcccacccctcttggaactagatggggtcttggaggaacatgtgtgaatgtgggttgcatacctaaaaaactgatgcatcaagcagctttgttaggacaagccctgcaagactctcgaaattatggatggaaagtcgaggagacagttaagcatgattgggacagaatgatagaagctgtacagaatcacattggctctttgaattggggctaccgagtagctctgcgggagaaaaaagtcgtctatgagaatgcttatgggcaatttattggtcctcacaggattaaggcaacaaataataaaggcaaagaaaaaatttattcagcagagagatttctcattgccactggtgaaagaccacgttacttgggcatccctggtgacaaagaatactgcatcagcagtgatgatcttttctccttgccttactgcccgggtaagaccctggttgttggagcatcctatgtcgctttggagtgcgctggatttcttgctggtattggtttagacgtcactgttatggttaggtccattcttcttagaggatttgaccaggacatggccaacaaaattggtgaacacatggaagaacatggcatcaagtttataagacagttcgtaccaattaaagttgaacaaattgaagcagggacaccaggccgactcagagtagtagctcagtccaccaatagtgaggaaatcattgaaggagaatataatacggtgatgctggcaataggaagagatgcttgcacaagaaaaattggcttagaaaccgtaggggtgaagataaatgaaaagactggaaaaatacctgtcacagatgaagaacagaccaatgtgccttacatctatgccattggcgatatattggaggataaggtggagctcaccccagttgcaatccaggcaggaagattgctggctcagaggctctatgcaggttccactgtcaagtgtgactatgaaaatgttccaaccactgtatttactcctttggaatatggtgcttgtggcctttctgaggagaaagctgtggagaagtttggggaagaaaatattgaggtttaccatagttacttttggccattggaatggacgattccgtcaagagataacaacaaatgttatgcaaaaataatctgtaatactaaagacaatgaacgtgttgtgggctttcacgtactgggtccaaatgctggagaagttacacaaggctttgcagctgcgctcaaatgtggactgaccaaaaagcagctggacagcacaattggaatccaccctgtctgtgcagaggtattcacaacattgtctgtgaccaagcgctctggggcaagcatcctccaggctggctgctgaggttaagccccagtgtggatgctgttgccaagactgcaaaccactggctcgtttccgtgcccaaatccaaggcgaagttttctagagggttcttgggctcttggcacctgcgtgtcctgtgcttaccaccgcccaaggcccccttggatctcttggataggagttggtgaatagaaggcaggcagcatcacactggggtcactgacagacttgaagctgacatttggcagggcatcgaagggatgcatccatgaagtcaccagtctcaagcccatgtggtaggcggtgatggaacaactgtcaaatcagttttagcatgacctttccttgtggattttcttattctcgttgtcaagttttctagggttgaatttttttcttttttctccatggtgttaatgatattagagatgaaaaacgttagcagttgatttttgtccaaaagcaagtcatggctagagtatccatgcaaggtgtcttgttgcatggaagggatagtttggctcccttggaggctatgtaggcttgtcccgggaaagagaactgtcctgcagctgaaatggactgttctttactgacctgctcagcagtttcttctctcatatattcccaaaacaagtacatctgcgatcaactctagccaaatttgcccctgtgtgctacatgatggatgattattattttaaggtctgtttaggaagggaaatggctacttggccagccattgcctggcatttggtagtatagtatgattctcaccattatttgtcatggaggcagacatacaccagaaatgggggagaaacagtacatatctttctgtctttagtttattgtgtgctggtctaagcaagctgagatcatttgcaatggaaaacacgtaacttgtttaaaagtttttctggtagctttagctttatgctaaaaaaaataatgacattgggtatctatttctttctaagactacattagtaggaaaataagtcttttcatgcttatgatttagctgttttgtggtaattgctttttaaaggaagttattaatatcataagttattattaatattttgaacacaggtggatgtgaaggattttcatttaaaaaccaagtggttttgactttttctgttgaatgaacaactgtgccttgtggaatttttgcagaagtgtttatgctttgttagcatttcaacttgcattattataaagaggtattaatgcctcagttatgtgtttgtcaatgtactggctgaggattctatctcagctgtcttttctaactgtgtaggttgagttttgaacacgtgcttgtggacatcaggcctcctgccagcagttcttgaagcttctttttcattcctgctactctacctgtatttctcagttgcagcactgagtggtcaaaatacatttctgggccacctcagggaacccatgcatctgcctggcatttaggcagcagagcccctgaccgtcccccacagggctctgcctcacgtcctcatctcatttggctgtgtaaagaaatgggaaaagggaaaaggagagagcaattgaggcagttgaccatattcagttttatttatttatttttaatttgtttttttctccaagtccaccagtctctgaaattagaacagtaggcggtatgagataatcaggcctaatcatgttgtgattctcttttcttagtggagtggaatgttctatccccacaagaaggattatatcttatagacttgtcttgttcagattctgtatttacccattttattgaaacatatactaagttccatgtatttttgttacaaatcttctgaaaaaaaacaaaacaatgtgaaacattaaaattaaaaggcattaataata

SEQ ID NO: 49914 - DNA, 3798 bp, Homo sapiens
tggcagttagcccgcccgctcggcgcagggcgtggcttctcgtagccattaggaaacagcaaccctttcacctcagttttcttcactccggcatttgcagcagagcgaaaggtggtggagtcctgaaggagggcctgatgtcttcatcattctcaaattcttgtaagctctgcgtcgggtgaaaccagacaaagccgcgagcccagggatgggagcacgcgggggacggcctgccggcggggacgacagcattgcgcctgggtgcagcagtgtgcgtctcggggaagggaagatattttaaggcgtgtctgagcagacggggaggcttttccaaacccaggcagcttcgtggcgtgtgcggtttcgacccggtcacacaaagcttcagcatgtcatgtggcttatcaggagggcagacttcaaaagctactaaaaatgaacggccctgaagatcttcccaagtcctatgactatgaccttatcatcattggaggtggctcaggaggtctggcagctgctaaggaggcagcccaatatggcaagaaggtgatggtcctggactttgtcactcccacccctcttggaactagatggggtcttggaggaacatgtgtgaatgtgggttgcatacctaaaaaactgatgcatcaagcagctttgttaggacaagccctgcaagactctcgaaattatggatggaaagtcgaggagacagttaagcatgattgggacagaatgatagaagctgtacagaatcacattggctctttgaattggggctaccgagtagctctgcgggagaaaaaagtcgtctatgagaatgcttatgggcaatttattggtcctcacaggattaaggcaacaaataataaaggcaaagaaaaaatttattcagcagagagatttctcattgccactggtgaaagaccacgttacttgggcatccctggtgacaaagaatactgcatcagcagtgatgatcttttctccttgccttactgcccgggtaagaccctggttgttggagcatcctatgtcgctttggagtgcgctggatttcttgctggtattggtttagacgtcactgttatggttaggtccattcttcttagaggatttgaccaggacatggccaacaaaattggtgaacacatggaagaacatggcatcaagtttataagacagttcgtaccaattaaagttgaacaaattgaagcagggacaccaggccgactcagagtagtagctcagtccaccaatagtgaggaaatcattgaaggagaatataatacggtgatgctggcaataggaagagatgcttgcacaagaaaaattggcttagaaaccgtaggggtgaagataaatgaaaagactggaaaaatacctgtcacagatgaagaacagaccaatgtgccttacatctatgccattggcgatatattggaggataaggtggagctcaccccagttgcaatccaggcaggaagattgctggctcagaggctctatgcaggttccactgtcaagtgtgactatgaaaatgttccaaccactgtatttactcctttggaatatggtgcttgtggcctttctgaggagaaagctgtggagaagtttggggaagaaaatattgaggtttaccatagttacttttggccattggaatggacgattccgtcaagagataacaacaaatgttatgcaaaaataatctgtaatactaaagacaatgaacgtgttgtgggctttcacgtactgggtccaaatgctggagaagttacacaaggctttgcagctgcgctcaaatgtggactgaccaaaaagcagctggacagcacaattggaatccaccctgtctgtgcagaggtattcacaacattgtctgtgaccaagcgctctggggcaagcatcctccaggctggctgctgaggttaagccccagtgtggatgctgttgccaagactgcaaaccactggctcgtttccgtgcccaaatccaaggcgaagttttctagagggttcttgggctcttggcacctgcgtgtcctgtgcttaccaccgcccaaggcccccttggatctcttggataggagttggtgaatagaaggcaggcagcatcacactggggtcactgacagacttgaagctgacatttggcagggcatcgaagggatgcatccatgaagtcaccagtctcaagcccatgtggtaggcggtgatggaacaactgtcaaatcagttttagcatgacctttccttgtggattttcttattctcgttgtcaagttttctagggttgaatttttttcttttttctccatggtgttaatgatattagagatgaaaaacgttagcagttgatttttgtccaaaagcaagtcatggctagagtatccatgcaaggtgtcttgttgcatggaagggatagtttggctcccttggaggctatgtaggcttgtcccgggaaagagaactgtcctgcagctgaaatggactgttctttactgacctgctcagcagtttcttctctcatatattcccaaaacaagtacatctgcgatcaactctagccaaatttgcccctgtgtgctacatgatggatgattattattttaaggtctgtttaggaagggaaatggctacttggccagccattgcctggcatttggtagtatagtatgattctcaccattatttgtcatggaggcagacatacaccagaaatgggggagaaacagtacatatctttctgtctttagtttattgtgtgctggtctaagcaagctgagatcatttgcaatggaaaacacgtaacttgtttaaaagtttttctggtagctttagctttatgctaaaaaaaataatgacattgggtatctatttctttctaagactacattagtaggaaaataagtcttttcatgcttatgatttagctgttttgtggtaattgctttttaaaggaagttattaatatcataagttattattaatattttgaacacaggtggatgtgaaggattttcatttaaaaaccaagtggttttgactttttctgttgaatgaacaactgtgccttgtggaatttttgcagaagtgtttatgctttgttagcatttcaacttgcattattataaagaggtattaatgcctcagttatgtgtttgtcaatgtactggctgaggattctatctcagctgtcttttctaactgtgtaggttgagttttgaacacgtgcttgtggacatcaggcctcctgccagcagttcttgaagcttctttttcattcctgctactctacctgtatttctcagttgcagcactgagtggtcaaaatacatttctgggccacctcagggaacccatgcatctgcctggcatttaggcagcagagcccctgaccgtcccccacagggctctgcctcacgtcctcatctcatttggctgtgtaaagaaatgggaaaagggaaaaggagagagcaattgaggcagttgaccatattcagttttatttatttatttttaatttgtttttttctccaagtccaccagtctctgaaattagaacagtaggcggtatgagataatcaggcctaatcatgttgtgattctcttttcttagtggagtggaatgttctatccccacaagaaggattatatcttatagacttgtcttgttcagattctgtatttacccattttattgaaacatatactaagttccatgtatttttgttacaaatcttctgaaaaaaaacaaaacaatgtgaaacattaaaattaaaaggcattaataata

SEQ ID NO: 49915 - DNA, 3435 bp, Homo sapiens
ctacatcagaatctcttggattttcttacaaacacagaatcctaagccttaatatatcccagaaatcagtaaaattcaagttcgtttctagataaagaaggaaaaagtttgtgtattgttattttagtttaaaattgtcaggggatctgtcttgtattatttaattgtattagtcttataagagaatacttgaagatgaaaaagtggcatatgtgctcaaaatggaggatttgccctttcagattgccttttagagctctgctccctgtatttcacttgagtggttattgagaaatgatctttgccagcagttgaaaagccaaacaagattttgttttattttcttatacagttaagcatgattgggacagaatgatagaagctgtacagaatcacattggctctttgaattggggctaccgagtagctctgcgggagaaaaaagtcgtctatgagaatgcttatgggcaatttattggtcctcacaggattaaggcaacaaataataaaggcaaagaaaaaatttattcagcagagagatttctcattgccactggtgaaagaccacgttacttgggcatccctggtgacaaagaatactgcatcagcagtgatgatcttttctccttgccttactgcccgggtaagaccctggttgttggagcatcctatgtcgctttggagtgcgctggatttcttgctggtattggtttagacgtcactgttatggttaggtccattcttcttagaggatttgaccaggacatggccaacaaaattggtgaacacatggaagaacatggcatcaagtttataagacagttcgtaccaattaaagttgaacaaattgaagcagggacaccaggccgactcagagtagtagctcagtccaccaatagtgaggaaatcattgaaggagaatataatacggtgatgctggcaataggaagagatgcttgcacaagaaaaattggcttagaaaccgtaggggtgaagataaatgaaaagactggaaaaatacctgtcacagatgaagaacagaccaatgtgccttacatctatgccattggcgatatattggaggataaggtggagctcaccccagttgcaatccaggcaggaagattgctggctcagaggctctatgcaggttccactgtcaagtgtgactatgaaaatgttccaaccactgtatttactcctttggaatatggtgcttgtggcctttctgaggagaaagctgtggagaagtttggggaagaaaatattgaggtttaccatagttacttttggccattggaatggacgattccgtcaagagataacaacaaatgttatgcaaaaataatctgtaatactaaagacaatgaacgtgttgtgggctttcacgtactgggtccaaatgctggagaagttacacaaggctttgcagctgcgctcaaatgtggactgaccaaaaagcagctggacagcacaattggaatccaccctgtctgtgcagaggtattcacaacattgtctgtgaccaagcgctctggggcaagcatcctccaggctggctgctgaggttaagccccagtgtggatgctgttgccaagactgcaaaccactggctcgtttccgtgcccaaatccaaggcgaagttttctagagggttcttgggctcttggcacctgcgtgtcctgtgcttaccaccgcccaaggcccccttggatctcttggataggagttggtgaatagaaggcaggcagcatcacactggggtcactgacagacttgaagctgacatttggcagggcatcgaagggatgcatccatgaagtcaccagtctcaagcccatgtggtaggcggtgatggaacaactgtcaaatcagttttagcatgacctttccttgtggattttcttattctcgttgtcaagttttctagggttgaatttttttcttttttctccatggtgttaatgatattagagatgaaaaacgttagcagttgatttttgtccaaaagcaagtcatggctagagtatccatgcaaggtgtcttgttgcatggaagggatagtttggctcccttggaggctatgtaggcttgtcccgggaaagagaactgtcctgcagctgaaatggactgttctttactgacctgctcagcagtttcttctctcatatattcccaaaacaagtacatctgcgatcaactctagccaaatttgcccctgtgtgctacatgatggatgattattattttaaggtctgtttaggaagggaaatggctacttggccagccattgcctggcatttggtagtatagtatgattctcaccattatttgtcatggaggcagacatacaccagaaatgggggagaaacagtacatatctttctgtctttagtttattgtgtgctggtctaagcaagctgagatcatttgcaatggaaaacacgtaacttgtttaaaagtttttctggtagctttagctttatgctaaaaaaaataatgacattgggtatctatttctttctaagactacattagtaggaaaataagtcttttcatgcttatgatttagctgttttgtggtaattgctttttaaaggaagttattaatatcataagttattattaatattttgaacacaggtggatgtgaaggattttcatttaaaaaccaagtggttttgactttttctgttgaatgaacaactgtgccttgtggaatttttgcagaagtgtttatgctttgttagcatttcaacttgcattattataaagaggtattaatgcctcagttatgtgtttgtcaatgtactggctgaggattctatctcagctgtcttttctaactgtgtaggttgagttttgaacacgtgcttgtggacatcaggcctcctgccagcagttcttgaagcttctttttcattcctgctactctacctgtatttctcagttgcagcactgagtggtcaaaatacatttctgggccacctcagggaacccatgcatctgcctggcatttaggcagcagagcccctgaccgtcccccacagggctctgcctcacgtcctcatctcatttggctgtgtaaagaaatgggaaaagggaaaaggagagagcaattgaggcagttgaccatattcagttttatttatttatttttaatttgtttttttctccaagtccaccagtctctgaaattagaacagtaggcggtatgagataatcaggcctaatcatgttgtgattctcttttcttagtggagtggaatgttctatccccacaagaaggattatatcttatagacttgtcttgttcagattctgtatttacccattttattgaaacatatactaagttccatgtatttttgttacaaatcttctgaaaaaaaacaaaacaatgtgaaacattaaaattaaaaggcattaataata

SEQ ID NO: 49916 - DNA, 3625 bp, Homo sapiens
tggcagttagcccgcccgctcggcgcagggcgtggcttctcgtagccattaggaaacagcaaccctttcacctcagttttcttcactccggcatttgcagcagagcgaaaggtggtggagtcctgaaggagggcctgatgtcttcatcattctcaaattcttaggacggtcgggccctggaaggaacgctctcggaattggccgcggaaaccgatctgcccgttgtgtttgtgaaacagagaaagataggcggccatggtccaaccttgaaggcttatcaggagggcagacttcaaaagctactaaaaatgaacggccctgaagatcttcccaagtcctatgactatgaccttatcatcattggaggtggctcaggaggtctggcagctgctaaggaggcagcccaatatggcaagaaggtgatggtcctggactttgtcactcccacccctcttggaactagatggggtcttggaggaacatgtgtgaatgtgggttgcatacctaaaaaactgatgcatcaagcagctttgttaggacaagccctgcaagactctcgaaattatggatggaaagtcgaggagacagttaagcatgattgggacagaatgatagaagctgtacagaatcacattggctctttgaattggggctaccgagtagctctgcgggagaaaaaagtcgtctatgagaatgcttatgggcaatttattggtcctcacaggattaaggcaacaaataataaaggcaaagaaaaaatttattcagcagagagatttctcattgccactggtgaaagaccacgttacttgggcatccctggtgacaaagaatactgcatcagcagtgatgatcttttctccttgccttactgcccgggtaagaccctggttgttggagcatcctatgtcgctttggagtgcgctggatttcttgctggtattggtttagacgtcactgttatggttaggtccattcttcttagaggatttgaccaggacatggccaacaaaattggtgaacacatggaagaacatggcatcaagtttataagacagttcgtaccaattaaagttgaacaaattgaagcagggacaccaggccgactcagagtagtagctcagtccaccaatagtgaggaaatcattgaaggagaatataatacggtgatgctggcaataggaagagatgcttgcacaagaaaaattggcttagaaaccgtaggggtgaagataaatgaaaagactggaaaaatacctgtcacagatgaagaacagaccaatgtgccttacatctatgccattggcgatatattggaggataaggtggagctcaccccagttgcaatccaggcaggaagattgctggctcagaggctctatgcaggttccactgtcaagtgtgactatgaaaatgttccaaccactgtatttactcctttggaatatggtgcttgtggcctttctgaggagaaagctgtggagaagtttggggaagaaaatattgaggtttaccatagttacttttggccattggaatggacgattccgtcaagagataacaacaaatgttatgcaaaaataatctgtaatactaaagacaatgaacgtgttgtgggctttcacgtactgggtccaaatgctggagaagttacacaaggctttgcagctgcgctcaaatgtggactgaccaagtattcacaacattgtctgtgaccaagcgctctggggcaagcatcctccaggctggctgctgaggttaagccccagtgtggatgctgttgccaagactgcaaaccactggctcgtttccgtgcccaaatccaaggcgaagttttctagagggttcttgggctcttggcacctgcgtgtcctgtgcttaccaccgcccaaggcccccttggatctcttggataggagttggtgaatagaaggcaggcagcatcacactggggtcactgacagacttgaagctgacatttggcagggcatcgaagggatgcatccatgaagtcaccagtctcaagcccatgtggtaggcggtgatggaacaactgtcaaatcagttttagcatgacctttccttgtggattttcttattctcgttgtcaagttttctagggttgaatttttttcttttttctccatggtgttaatgatattagagatgaaaaacgttagcagttgatttttgtccaaaagcaagtcatggctagagtatccatgcaaggtgtcttgttgcatggaagggatagtttggctcccttggaggctatgtaggcttgtcccgggaaagagaactgtcctgcagctgaaatggactgttctttactgacctgctcagcagtttcttctctcatatattcccaaaacaagtacatctgcgatcaactctagccaaatttgcccctgtgtgctacatgatggatgattattattttaaggtctgtttaggaagggaaatggctacttggccagccattgcctggcatttggtagtatagtatgattctcaccattatttgtcatggaggcagacatacaccagaaatgggggagaaacagtacatatctttctgtctttagtttattgtgtgctggtctaagcaagctgagatcatttgcaatggaaaacacgtaacttgtttaaaagtttttctggtagctttagctttatgctaaaaaaaataatgacattgggtatctatttctttctaagactacattagtaggaaaataagtcttttcatgcttatgatttagctgttttgtggtaattgctttttaaaggaagttattaatatcataagttattattaatattttgaacacaggtggatgtgaaggattttcatttaaaaaccaagtggttttgactttttctgttgaatgaacaactgtgccttgtggaatttttgcagaagtgtttatgctttgttagcatttcaacttgcattattataaagaggtattaatgcctcagttatgtgtttgtcaatgtactggctgaggattctatctcagctgtcttttctaactgtgtaggttgagttttgaacacgtgcttgtggacatcaggcctcctgccagcagttcttgaagcttctttttcattcctgctactctacctgtatttctcagttgcagcactgagtggtcaaaatacatttctgggccacctcagggaacccatgcatctgcctggcatttaggcagcagagcccctgaccgtcccccacagggctctgcctcacgtcctcatctcatttggctgtgtaaagaaatgggaaaagggaaaaggagagagcaattgaggcagttgaccatattcagttttatttatttatttttaatttgtttttttctccaagtccaccagtctctgaaattagaacagtaggcggtatgagataatcaggcctaatcatgttgtgattctcttttcttagtggagtggaatgttctatccccacaagaaggattatatcttatagacttgtcttgttcagattctgtatttacccattttattgaaacatatactaagttccatgtatttttgttacaaatcttctgaaaaaaaacaaaacaatgtgaaacattaaaattaaaaggcattaataata

SEQ ID NO: 49917 - DNA, 2700 bp, Homo sapiens
tactatacggtcgtttagtagcgaggcctgggtggcgacaaaattggtgaacacatggaagaacatggcatcaagtttataagacagttcgtaccaattaaagttgaacaaattgaagcagggacaccaggccgactcagagtagtagctcagtccaccaatagtgaggaaatcattgaaggagaatataatacggtgatgctggcaataggaagagatgcttgcacaagaaaaattggcttagaaaccgtaggggtgaagataaatgaaaagactggaaaaatacctgtcacagatgaagaacagaccaatgtgccttacatctatgccattggcgatatattggaggataaggtggagctcaccccagttgcaatccaggcaggaagattgctggctcagaggctctatgcaggttccactgtcaagtgtgactatgaaaatgttccaaccactgtatttactcctttggaatatggtgcttgtggcctttctgaggagaaagctgtggagaagtttggggaagaaaatattgaggtttaccatagttacttttggccattggaatggacgattccgtcaagagataacaacaaatgttatgcaaaaataatctgtaatactaaagacaatgaacgtgttgtgggctttcacgtactgggtccaaatgctggagaagttacacaaggctttgcagctgcgctcaaatgtggactgaccaaaaagcagctggacagcacaattggaatccaccctgtctgtgcagaggtattcacaacattgtctgtgaccaagcgctctggggcaagcatcctccaggctggctgctgaggttaagccccagtgtggatgctgttgccaagactgcaaaccactggctcgtttccgtgcccaaatccaaggcgaagttttctagagggttcttgggctcttggcacctgcgtgtcctgtgcttaccaccgcccaaggcccccttggatctcttggataggagttggtgaatagaaggcaggcagcatcacactggggtcactgacagacttgaagctgacatttggcagggcatcgaagggatgcatccatgaagtcaccagtctcaagcccatgtggtaggcggtgatggaacaactgtcaaatcagttttagcatgacctttccttgtggattttcttattctcgttgtcaagttttctagggttgaatttttttcttttttctccatggtgttaatgatattagagatgaaaaacgttagcagttgatttttgtccaaaagcaagtcatggctagagtatccatgcaaggtgtcttgttgcatggaagggatagtttggctcccttggaggctatgtaggcttgtcccgggaaagagaactgtcctgcagctgaaatggactgttctttactgacctgctcagcagtttcttctctcatatattcccaaaacaagtacatctgcgatcaactctagccaaatttgcccctgtgtgctacatgatggatgattattattttaaggtctgtttaggaagggaaatggctacttggccagccattgcctggcatttggtagtatagtatgattctcaccattatttgtcatggaggcagacatacaccagaaatgggggagaaacagtacatatctttctgtctttagtttattgtgtgctggtctaagcaagctgagatcatttgcaatggaaaacacgtaacttgtttaaaagtttttctggtagctttagctttatgctaaaaaaaataatgacattgggtatctatttctttctaagactacattagtaggaaaataagtcttttcatgcttatgatttagctgttttgtggtaattgctttttaaaggaagttattaatatcataagttattattaatattttgaacacaggtggatgtgaaggattttcatttaaaaaccaagtggttttgactttttctgttgaatgaacaactgtgccttgtggaatttttgcagaagtgtttatgctttgttagcatttcaacttgcattattataaagaggtattaatgcctcagttatgtgtttgtcaatgtactggctgaggattctatctcagctgtcttttctaactgtgtaggttgagttttgaacacgtgcttgtggacatcaggcctcctgccagcagttcttgaagcttctttttcattcctgctactctacctgtatttctcagttgcagcactgagtggtcaaaatacatttctgggccacctcagggaacccatgcatctgcctggcatttaggcagcagagcccctgaccgtcccccacagggctctgcctcacgtcctcatctcatttggctgtgtaaagaaatgggaaaagggaaaaggagagagcaattgaggcagttgaccatattcagttttatttatttatttttaatttgtttttttctccaagtccaccagtctctgaaattagaacagtaggcggtatgagataatcaggcctaatcatgttgtgattctcttttcttagtggagtggaatgttctatccccacaagaaggattatatcttatagacttgtcttgttcagattctgtatttacccattttattgaaacatatactaagttccatgtatttttgttacaaatcttctgaaaaaaaacaaaacaatgtgaaacattaaaattaaaaggcattaataata

SEQ ID NO: 49918 - DNA, 3071 bp, Homo sapiens
tggcagttagcccgcccgctcggcgcagggcgtggcttctcgtagccattaggaaacagcaaccctttcacctcagttttcttcactccggcatttgcagcagagcgaaaggtggtggagtcctgaaggagggcctgatgtcttcatcattctcaaattcttaggacggtcgggccctggaaggaacgctctcggaattggccgcggaaaccgatctgcccgttgtgtttgtgaaacagagaaagataggcggccatggtccaaccttgaaggcttatcaggagggcagacttcaaaagctactaaaaatgaacggccctgaagatcttcccaagtcctatgactatgaccttatcatcattggaggtggctcaggaggtctggcagctgctaaggaggcagcccaatatggcaagaaggtgatggtcctggactttgtcactcccacccctcttggaactagatggggtcttggaggaacatgtgtgaatgtgggttgcatacctaaaaaactgatgcatcaagcagctttgttaggacaagccctgcaagactctcgaaattatggatggaaagtcgaggagacagttaagcatgattgggacagaatgatagaagctgtacagaatcacattggctctttgaattggggctaccgagtagctctgcgggagaaaaaagtcgtctatgagaatgcttatgggcaatttattggtcctcacaggattaaggcaacaaataataaaggcaaagaaaaaatttattcagcagagagatttctcattgccactggtgaaagaccacgttacttgggcatccctggtgacaaagaatactgcatcagcagtgatgatcttttctccttgccttactgcccgggtaagaccctggttgttggagcatcctatgtcgctttggagtgcgctggatttcttgctggtattggtttagacgtcactgttatggttaggtccattcttcttagaggatttgaccaggacatggccaacaaaattggtgaacacatggaagaacatggcatcaagtttataagacagttcgtaccaattaaagttgaacaaattgaagcagggacaccaggccgactcagagtagtagctcagtccaccaatagtgaggaaatcattgaaggagaatataatacggtgatgctggcaataggaagagatgcttgcacaagaaaaattggcttagaaaccgtaggggtgaagataaatgaaaagactggaaaaatacctgtcacagatgaagaacagaccaatgtgccttacatctatgccattggcgatatattggaggataaggtggagctcaccccagttgcaatccaggcaggaagattgctggctcagaggctctatgcaggttccactgtcaagtgtgactatgaaaatgttccaaccactgtatttactcctttggaatatggtgcttgtggcctttctgaggagaaagctgtggagaagtttggggaagaaaatattgaggtttaccatagttacttttggccattggaatggacgattccgtcaagagataacaacaaatgttatgcaaaaataatctgtaatactaaagacaatgaacgtgttgtgggctttcacgtactgggtccaaatgctggagaagttacacaaggctttgcagctgcgctcaaatgtggactgaccaaaaagcagctggacagcacaattggaatccaccctgtctgtgcagaggtattcacaacattgtctgtgaccaagcgctctggggcaagcatcctccaggctggctgctgaggttaagccccagtgtggatgctgttgccaagactgcaaaccactggctcgtttccgtgcccaaatccaaggcgaagttttctagagggttcttgggctcttggcacctgcgtgtcctgtgcttaccaccgcccaaggcccccttggatctcttggataggagttggtgaatagaaggcaggcagcatcacactggggtcactgacagacttgaagctgacatttggcagggcatcgaagggatgcatccatgaagtcaccagtctcaagcccatgtggtaggcggtgatggaacaactgtcaaatcagttttagcatgacctttccttgtggattttcttattctcgtatttctttctaagactacattagtaggaaaataagtcttttcatgcttatgatttagctgttttgtggtaattgctttttaaaggaagttattaatatcataagttattattaatattttgaacacaggtggatgtgaaggattttcatttaaaaaccaagtggttttgactttttctgttgaatgaacaactgtgccttgtggaatttttgcagaagtgtttatgctttgttagcatttcaacttgcattattataaagaggtattaatgcctcagttatgtgtttgtcaatgtactggctgaggattctatctcagctgtcttttctaactgtgtaggttgagttttgaacacgtgcttgtggacatcaggcctcctgccagcagttcttgaagcttctttttcattcctgctactctacctgtatttctcagttgcagcactgagtggtcaaaatacatttctgggccacctcagggaacccatgcatctgcctggcatttaggcagcagagcccctgaccgtcccccacagggctctgcctcacgtcctcatctcatttggctgtgtaaagaaatgggaaaagggaaaaggagagagcaattgaggcagttgaccatattcagttttatttatttatttttaatttgtttttttctccaagtccaccagtctctgaaattagaacagtaggcggtatgagataatcaggcctaatcatgttgtgattctcttttcttagtggagtggaatgttctatccccacaagaaggattatatcttatagacttgtcttgttcagattctgtatttacccattttattgaaacatatactaagttccatgtatttttgttacaaatcttctgaaaaaaaacaaaacaatgtgaaacattaaaattaaaaggcattaataata

SEQ ID NO: 49919 - DNA, 4289 bp, Homo sapiens
  misc_feature (3683)..(3683): n is a, c, g, or t
tggcagttagcccgcccgctcggcgcagggcgtggcttctcgtagccattaggaaacagcaaccctttcacctcagttttcttcactccggcatttgcagcagagcgaaaggtggtggagtcctgaaggagggcctgatgtcttcatcattctcaaattcttaggacggtcgggccctggaaggaacgctctcggaattggccgcggaaaccgatctgcccgttgtgtttgtgaaacagagaaagataggcggccatggtccaaccttgaaggcttatcaggagggcagacttcaaaagctactaaaaatgaacggccctgaagatcttcccaagtcctatgactatgaccttatcatcattggaggtggctcaggaggtctggcagctgctaaggaggcagcccaatatggcaagaaggtgatggtcctggactttgtcactcccacccctcttggaactagatggggtcttggaggaacatgtgtgaatgtgggttgcatacctaaaaaactgatgcatcaagcagctttgttaggacaagccctgcaagactctcgaaattatggatggaaagtcgaggagacagttaagcatgattgggacagaatgatagaagctgtacagaatcacattggctctttgaattggggctaccgagtagctctgcgggagaaaaaagtcgtctatgagaatgcttatgggcaatttattggtcctcacaggattaaggcaacaaataataaaggcaaagaaaaaatttattcagcagagagatttctcattgccactggtgaaagaccacgttacttgggcatccctggtgacaaagaatactgcatcagcagtgatgatcttttctccttgccttactgcccgggtaagaccctggttgttggagcatcctatgtcgctttggagtgcgctggatttcttgctggtattggtttagacgtcactgttatggttaggtccattcttcttagaggatttgaccaggacatggccaacaaaattggtgaacacatggaagaacatggcatcaagtttataagacagttcgtaccaattaaagttgaacaaattgaagcagggacaccaggccgactcagagtagtagctcagtccaccaatagtgaggaaatcattgaaggagaatataatacggtgatgctggcaataggaagagatgcttgcacaagaaaaattggcttagaaaccgtaggggtgaagataaatgaaaagactggaaaaatacctgtcacagatgaagaacagaccaatgtgccttacatctatgccattggcgatatattggaggataaggtggagctcaccccagttgcaatccaggcaggaagattgctggctcagaggctctatgcaggttccactgtcaagtgtgactatgaaaatgttccaaccactgtatttactcctttggaatatggtgcttgtggcctttctgaggagaaagctgtggagaagtttggggaagaaaatattgaggtttaccatagttacttttggccattggaatggacgattccgtcaagagataacaacaaatgttatgcaaaaataatctgtaatactaaagacaatgaacgtgttgtgggctttcacgtactgggtccaaatgctggagaagttacacaaggctttgcagctgcgctcaaatgtggactgaccaaaaagcagctggacagcacaattggaatccaccctgtctgtgcagaggtattcacaacattgtctgtgaccaagcgctctggggcaagcatcctccaggctggctgctgaggttaagccccagtgtggatgctgttgccaagactgcaaaccactggctcgtttccgtgcccaaatccaaggcgaagttttctagagggttcttgggctcttggcacctgcgtgtcctgtgcttaccaccgcccaaggcccccttggatctcttggataggagttggtgaatagaaggcaggcagcatcacactggggtcactgacagacttgaagctgacatttggcagggcatcgaagggatgcatccatgaagtcaccagtctcaagcccatgtggtaggcggtgatggaacaactgtcaaatcagttttagcatgacctttccttgtggattttcttattctcgttgtcaagttttctagggttgaatttttttcttttttctccatggtgttaatgatattagagatgaaaaacgttagcagttgatttttgtccaaaagcaagtcatggctagagtatccatgcaaggtgtcttgttgcatggaagggatagtttggctcccttggaggctatgtaggcttgtcccgggaaagagaactgtcctgcagctgaaatggactgttctttactgacctgctcagcagtttcttctctcatatattcccaaaacaagtacatctgcgatcaactctagccaaatttgcccctgtgtgctacatgatggatgattattattttaaggtctgtttaggaagggaaatggctacttggccagccattgcctggcatttggtagtatagtatgattctcaccattatttgtcatggaggcagacatacaccagaaatgggggagaaacagtacatatctttctgtctttagtttattgtgtgctggtctaagcaagctgagatcatttgcaatggaaaacacgtaacttgtttaaaagtttttctggtagctttagctttatgctaaaaaaaataatgacattgggtatctatttctttctaagactacattagtaggaaaataagtcttttcatgcttatgatttagctgttttgtggtaattgctttttaaaggaagttattaatatcataagttattattaatattttgaacacaggtggatgtgaaggattttcatttaaaaaccaagtggttttgactttttctgttgaatgaacaactgtgccttgtggaatttttgcagaagtgtttatgctttgttagcatttcaacttgcattattataaagaggtattaatgcctcagttatgtgtttgtcaatgtactggctgaggattctatctcagctgtcttttctaactgtgtaggttgagttttgaacacgtgcttgtggacatcaggcctcctgccagcagttcttgaagcttctttttcattcctgctactctacctgtatttctcagttgcagcactgagtggtcaaaatacatttctgggccacctcagggaacccatgcatctgcctggcatttaggcagcagagcccctgaccgtcccccacagggctctgcctcacgtcctcatctcatttggctgtgtaaagaaatgggaaaagggaaaaggagagagcaattgaggcagttgaccatattcagttttatttatttatttttaatttgtttttttctccaagtccaccagtctctgaaattagaacagtaggcggtatgagataatcaggcctaatcatgttgtgattctcttttcttagtggagtggaatgttctatccccacaagaaggattatatcttatagacttgtcttgttcagattctgtatttacccattttattgaaacatatactaagttccatgtatttttgttacaaatcttctgaaaaaaaacaaaacaatgtgaaacattaaaattaaaaggcattaataataaaaaaaaaaaanaaaaaaaaaaaaaaaaaaaaaaaaaaaaaaaaaaaaaaaaaaaaaaaaaaaaaaaaaaaaaaaaataaaaacaaaaaaaagaagagaagaaagaagagaagagagaggaggaggaggcagaggcgacagagtatatatattattagtagcagcgagagcgacgaagcgattgatgggcgaggagacgtggcgtctatctctctatatatacataacacgtgcctccactccctaacactaactcatcatataatatataaattaatcatcaaactatattatacccaaaaacatatcctatattcatattatacaaacaactacctaaaaaaactaaaaacatcagcatatcctagaatcacacaatccactcaactacatctacaaacaataacaaacacaaaactattcccttgcagccttcaacactgctcctatcgaacaaacagatcattaatttcacaataaacatattatatctccctattacaaatcactccccaatccctcgaacctctactatacatccccctcgtgcaacaacctaatcagatcaaactatcatcactcacacatacctaccacttccttaccctcccttcttca

SEQ ID NO: 49920 - DNA, 3618 bp, Homo sapiens
tggcagttagcccgcccgctcggcgcagggcgtggcttctcgtagccattaggaaacagcaaccctttcacctcagttttcttcactccggcatttgcagcagagcgaaaggtggtggagtcctgaaggagggcctgatgtcttcatcattctcaaattcttaggacggtcgggccctggaaggaacgctctcggaattggccgcggaaaccgatctgcccgttgtgtttgtgaaacagagaaagataggcggccatggtccaaccttgaaggcttatcaggagggcagacttcaaaagctactaaaaatgaacggccctgaagatcttcccaagtcctatgactatgaccttatcatcattggaggtggctcaggaggtctggcagctgctaaggaggcagcccaatatggcaagaaggtgatggtcctggactttgtcactcccacccctcttggaactagatggggtcttggaggaacatgtgtgaatgtgggttgcatacctaaaaaactgatgcatcaagcagctttgttaggacaagccctgcaagactctcgaaattatggatggaaagtcgaggagacagttaagcatgattgggacagaatgatagaagctgtacagaatcacattggctctttgaattggggctaccgagtagctctgcgggagaaaaaagtcgtctatgagaatgcttatgggcaatttattggtcctcacaggattaaggcaacaaataataaaggcaaagaaaaaatttattcagcagagagatttctcattgccactggtgaaagaccacgttacttgggcatccctggtgacaaagaatactgcatcagcagtgatgatcttttctccttgccttactgcccgggtaagaccctggttgttggagcatcctatgtcgctttggagtgcgctggatttcttgctggtattggtttagacgtcactgttatggttaggtccattcttcttagaggatttgaccaggacatggccaacaaaattggtgaacacatggaagaacatggcatcaagtttataagacagttcgtaccaattaaagttgaacaaattgaagcagggacaccaggccgactcagagtagtagctcagtccaccaatagtgaggaaatcattgaaggagaatataatacggtgatgctggcaataggaagagatgcttgcacaagaaaaattggcttagaaaccgtaggggtgaagataaatgaaaagactggaaaaatacctgtcacagatgaagaacagaccaatgtgccttacatctatgccattggcgatatattggaggataaggtggagctcaccccagttgcaatccaggcaggaagattgctggctcagaggctctatgcaggttccactgtcaagtgtgactatgaaaatgttccaaccactgtatttactcctttggaatatggtgcttgtggcctttctgaggagaaagctgtggagaagtttggggaagaaaatattgaggtttaccatagttacttttggccattggaatggacgattccgtcaagagataacaacaaatgttatgcaaaaataatctgtaatactaaagacaatgaacgtgttgtgggctttcacgtactgggtccaaatgctggagaagttacacaaggctttgcagctgcgctcaaatgtggactgaccaaaaagcagctggacagcacaattggaatccaccctgtctgtgcagaggtattcacaacattgtctgtgaccaagcgctctggggcaagcatcctccaggctggctgctgaggttaagccccagtgtggatgctgttgccaagactgcaaaccactggctcgtttccgtgcccaaatccaaggcgaagttttctagagggttcttgggctcttggcacctgcgtgtcctgtgcttaccaccgcccaaggcccccttggatctcttggataggagttggtgaatagaaggcaggcagcatcacactggggtcactgacagacttgaagctgacatttggcagggcatcgaagggatgcatccatgaagtcaccagtctcaagcccatgtggtaggcggtgatggaacaactgtcaaatcagttttagcatgacctttccttgtggattttcttattctcgttgtcaagttttctagggttgaatttttttcttttttctccatggtgttaatgatattagagatgaaaaacgttagcagttgatttttgtccaaaagcaagtcatggctagagtatccatgcaaggtgtcttgttgcatggaagggatagtttggctcccttggaggctatgtaggcttgtcccgggaaagagaactgtcctgcagctgaaatggactgttctttactgacctgctcagcagtttcttctctcatatattcccaaaacaagtacatctgcgatcaactctagccaaatttgcccctgtgtgctacatgatggatgattattattttaaggtctgtttaggaagggaaatggctacttggccagccattgcctggcatttggtagtatagtatgattctcaccattatttgtcatggaggcagacatacaccagaaatgggggagaaacagtacatatctttctgtctttagtttattgtgtgctggtctaagcaagctgagatcatttgcaatggaaaacacgtaacttgtttaaaagtttttctggtagctttagctttatgctaaaaaaaataatgacattgggtatctatttctttctaagactacattagtaggaaaataagtcttttcatgcttatgatttagctgttttgtggtaattgctttttaaaggaagttattaatatcataagttattattaatattttgaacacaggtggatgtgaaggattttcatttaaaaaccaagtggttttgactttttctgttgaatgaacaactgtgccttgtggaatttttgcagaagtgtttatgctttgttagcatttcaacttgcattattataaagaggtattaatgcctcagttatgtgtttgtcaatgtactggctgaggattctatctcagctgtcttttctaactgtgtaggttgagttttgaacacgtgcttgtggacatcaggcctcctgccagcagttcttgaagcttctttttcattcctgctactctacctgtatttctcagttgcagcactgagtggtcgcagcagagcccctgaccgtcccccacagggctctgcctcacgtcctcatctcatttggctgtgtaaagaaatgggaaaagggaaaaggagagagcaattgaggcagttgaccatattcagttttatttatttatttttaatttgtttttttctccaagtccaccagtctctgaaattagaacagtaggcggtatgagataatcaggcctaatcatgttgtgattctcttttcttagtggagtggaatgttctatccccacaagaaggattatatcttatagacttgtcttgttcagattctgtatttacccattttattgaaacatatactaagttccatgtatttttgttacaaatcttctgaaaaaaaacaaaacaatgtgaaacattaaaattaaaaggcattaataata

SEQ ID NO: 49921 - DNA, 1915 bp, Homo sapiens
tggcagttagcccgcccgctcggcgcagggcgtggcttctcgtagccattaggaaacagcaaccctttcacctcagttttcttcactccggcatttgcagcagagcgaaaggtggtggagtcctgaaggagggcctgatgtcttcatcattctcaaattcttaggacggtcgggccctggaaggaacgctctcggaattggccgcggaaaccgatctgcccgttgtgtttgtgaaacagagaaagataggcggccatggtccaaccttgaaggcttatcaggagggcagacttcaaaagctactaaaaatgaacggccctgaagatcttcccaagtcctatgactatgaccttatcatcattggaggtggctcaggaggtctggcagctgctaaggaggcagcccaatatggcaagaaggtgatggtcctggactttgtcactcccacccctcttggaactagatggggtcttggaggaacatgtgtgaatgtgggttgcatacctaaaaaactgatgcatcaagcagctttgttaggacaagccctgcaagactctcgaaattatggatggaaagtcgaggagacagttaagcatgattgggacagaatgatagaagctgtacagaatcacattggctctttgaattggggctaccgagtagctctgcgggagaaaaaagtcgtctatgagaatgcttatgggcaatttattggtcctcacaggattaaggcaacaaataataaaggcaaagaaaaaatttattcagcagagagatttctcattgccactggtgaaagaccacgttacttgggcatccctggtgacaaagaatactgcatcagcagtgatgatcttttctccttgccttactgcccgggtaagaccctggttgttggagcatcctatgtcgctttggagtgcgctggatttcttgctggtattggtttagacgtcactgttatggttaggtccattcttcttagaggatttgaccaggacatggccaacaaaattggtgaacacatggaagaacatggcatcaagtttataagacagttcgtaccaattaaagttgaacaaattgaagcagggacaccaggccgactcagagtagtagctcagtccaccaatagtgaggaaatcattgaaggagaatataatacggtgatgctggcaataggaagagatgcttgcacaagaaaaattggcttagaaaccgtaggggtgaagataaatgaaaagactggaaaaatacctgtcacagatgaagaacagaccaatgtgccttacatctatgccattggcgatatattggaggataaggtggagctcaccccagttgcaatccaggcaggaagattgctggctcagaggctctatgcaggttccactgtcaagtgtgactatgaaaatgttccaaccactgtatttactcctttggaatatggtgcttgtggcctttctgaggagaaagctgtggagaagtttggggaagaaaatattgaggtttaccatagttacttttggccattggaatggacgattccgtcaagagataacaacaaatgttatgcaaaaataatctgtaatactaaagacaatgaacgtgttgtgggctttcacgtactgggtccaaatgctggagaagttacacaaggctttgcagctgcgctcaaatgtggactgaccaaaaagcagctggacagcacaattggaatccaccctgtctgtgcagaggtattcacaacattgtctgtgaccaagcgctctggggcaagcatcctccaggctggctgctgaggttaagccccagtgtggatgctgttgccaagactgcaaaccactggctcgtttccgtgccctgggcttacaaccgcccaaaggccccttggaactcttggtatagaattggg

SEQ ID NO: 49922 - DNA, 273 bp, Homo sapiens
ggattacaggcgtgagccactgcgcccggccagtctctggtcatttttgagttggatttttaagaaacagactggagaaatgctctaagctgtgtaggaagaggaggggagaaaaatcagcttaattgcattattgtatttttttttgccttaggaacgtgttgtgggctttcacgtactgggtccaaatgctggagaagttacacaaggctttgcagctgcgctcaaatgtggactgaccaaaaagcagctggacagcacaattggaatcca

SEQ ID NO: 49923 - DNA, 439 bp, Homo sapiens
gcagagcccctgaccgtcccccacagggctctgcctcacgtcctcatctcatttggctgtgtaaagaaatgggaaaagggaaaaggagagagcaattgaggcagttgaccatattcagttttatttatttatttttaatttgtttttttctccaagtccaccagtctctgaaattagaacagtaggcggtatgagataatcaggcctaatcatgttgtgattctcttttcttagtggagtggaatgttctatccccacaagaaggattatatcttatagacttgtcttgttcagattctgtatttacccattttattgaaacatatactaagttccatgtatttttgttacaaatcttctgaaaaaaaacaaaacaatgtgaaacattaaaattaaaaggcattaataatatatccacgtgtgccttcttactgaatga

SEQ ID NO: 49924 - DNA, 2101 bp, Homo sapiens
gactagttctagatcgcgatctagaacagacaatgaacgtgttgtgggctttcacgtactgggtccaaatgctggagaagttacacaaggctttgcagctgcgctcaaatgtggactgaccaaaaagcagctggacagcacaattggaatccaccctgtctgtgcagaggtattcacaacattgtctgtgaccaagcgctctggggcaagcatcctccaggctggctgctgaggttaagccccagtgtggatgctgttgccaagactgcaaaccactggctcgtttccgtgcccaaatccaaggcgaagttttctagagggttcttgggctcttggcacctgcgtgtcctgtgcttaccaccgcccaaggcccccttggatctcttggataggagttggtgaatagaaggcaggcagcatcacactggggtcactgacagacttgaagctgacatttggcagggcatcgaagggatgcatccatgaagtcaccagtctcaagcccatgtggtaggcggtgatggaacaactgtcaaatcagttttagcatgacctttccttgtggattttcttattctcgttgtcaagttttctagggttgaatttttttcttttttctccatggtgttaatgatattagagatgaaaaacgttagcagttgatttttgtccaaaagcaagtcatggctagagtatccatgcaaggtgtcttgttgcatggaagggatagtttggctcccttggaggctatgtaggcttgtcccgggaaagagaactgtcctgcagctgaaatggactgttctttactgacctgctcagcagtttcttctctcatatattcccaaaacaagtacatctgcgatcaactctagccaaatttgcccctgtgtgctacatgatggatgattattattttaaggtctgtttaggaagggaaatggctacttggccagccattgcctggcatttggtagtatagtatgattctcaccattatttgtcatggaggcagacatacaccagaaatgggggagaaacagtacatatctttctgtctttagtttattgtgtgctggtctaagcaagctgagatcatttgcaatggaaaacacgtaacttgtttaaaagtttttctggtagctttagctttatgctaaaaaaaataatgacattgggtatctatttctttctaagactacattagtaggaaaataagtcttttcatgcttatgatttagctgttttgtggtaattgctttttaaaggaagttattaatatcataagttattattaatattttgaacacaggtggatgtgaaggattttcatttaaaaaccaagtggttttgactttttctgttgaatgaacaactgtgccttgtggaatttttgcagaagtgtttatgctttgttagcatttcaacttgcattattataaagaggtattaatgcctcagttatgtgtttgtcaatgtactggctgaggattctatctcagctgtcttttctaactgtgtaggttgagttttgaacacgtgcttgtggacatcaggcctcctgccagcagttcttgaagcttctttttcattcctgctactctacctgtatttctcagttgcagcactgagtggtcaaaatacatttctgggccacctcagggaacccatgcatctgcctggcatttaggcagcagagcccctgaccgtcccccacagggctctgcctcacgtcctcatctcatttggctgtgtaaagaaatgggaaaagggaaaaggagagagcaattgaggcagttgaccatattcagttttatttatttatttttaatttgtttttttctccaagtccaccagtctctgaaattagaacagtaggcggtatgagataatcaggcctaatcatgttgtgattctcttttcttagtggagtggaatgttctatccccacaagaaggattatatcttatagacttgtcttgttcagattctgtatttacccattttattgaaacatatactaagttccatgtatttttgttacaaatcttctgaaaaaaaacaaaacaatgtgaaacattaaaattaaaaggcattaataata

SEQ ID NO: 49925 - DNA, 3704 bp, Homo sapiens
tggcagttagcccgcccgctcggcgcagggcgtggcttctcgtagccattaggaaacagcaaccctttcacctcagttttcttcactccggcatttgcagcagagcgaaaggtggtggagtcctgaaggagggcctgatgtcttcatcattctcaaattcttaggacggtcgggccctggaaggaacgctctcggaattggccgcggaaaccgatctgcccgttgtgtttgtgaaacagagaaagataggcggccatggtccaaccttgaaggcttatcaggagggcagacttcaaaagctactaaaaatgaacggccctgaagatcttcccaagtcctatgactatgaccttatcatcattggaggtggctcaggaggtctggcagctgctaaggaggcagcccaatatggcaagaaggtgatggtcctggactttgtcactcccacccctcttggaactagatggggtcttggaggaacatgtgtgaatgtgggttgcatacctaaaaaactgatgcatcaagcagctttgttaggacaagccctgcaagactctcgaaattatggatggaaagtcgaggagacagttaagcatgattgggacagaatgatagaagctgtacagaatcacattggctctttgaattggggctaccgagtagctctgcgggagaaaaaagtcgtctatgagaatgcttatgggcaatttattggtcctcacaggattaaggcaacaaataataaaggcaaagaaaaaatttattcagcagagagatttctcattgccactggtgaaagaccacgttacttgggcatccctggtgacaaagaatactgcatcagcagtgatgatcttttctccttgccttactgcccgggtaagaccctggttgttggagcatcctatgtcgctttggagtgcgctggatttcttgctggtattggtttagacgtcactgttatggttaggtccattcttcttagaggatttgaccaggacatggccaacaaaattggtgaacacatggaagaacatggcatcaagtttataagacagttcgtaccaattaaagttgaacaaattgaagcagggacaccaggccgactcagagtagtagctcagtccaccaatagtgaggaaatcattgaaggagaatataatacggtgatgctggcaataggaagagatgcttgcacaagaaaaattggcttagaaaccgtaggggtgaagataaatgaaaagactggaaaaatacctgtcacagatgaagaacagaccaatgtgccttacatctatgccattggcgatatattggaggataaggtggagctcaccccagttgcaatccaggcaggaagattgctggctcagaggctctatgcaggttccactgtcaagtgtgactatgaaaatgttccaaccactgtatttactcctttggaatatggtgcttgtggcctttctgaggagaaagctgtggagaagtttggggaagaaaatattgaggtttaccatagttacttttggccattggaatggacgattccgtcaagagataacaacaaatgttatgcaaaaataatctgtaatactaaagacaatgaacgtgttgtgggctttcacgtactgggtccaaatgctggagaagttacacaaggctttgcagctgcgctcaaatgtggactgaccaaaaagcagctggacagcacaattggaatccaccctgtctgtgcagaggtattcacaacattgtctgtgaccaagcgctctggggcaagcatcctccaggctggctgctgaggttaagccccagtgtggatgctgttgccaagactgcaaaccactggctcgtttccgtgcccaaatccaaggcgaagttttctagagggttcttgggctcttggcacctgcgtgtcctgtgcttaccaccgcccaaggcccccttggatctcttggataggagttggtgaatagaaggcaggcagcatcacactggggtcactgacagacttgaagctgacatttggcagggcatcgaagggatgcatccatgaagtcaccagtctcaagcccatgtggtaggcggtgatggaacaactgtcaaatcagttttagcatgacctttccttgtggattttcttattctcgttgtcaagttttctagggttgaatttttttcttttttctccatggtgttaatgatattagagatgaaaaacgttagcagttgatttttgtccaaaagcaagtcatggctagagtatccatgcaaggtgtcttgttgcatggaagggatagtttggctcccttggaggctatgtaggcttgtcccgggaaagagaactgtcctgcagctgaaatggactgttctttactgacctgctcagcagtttcttctctcatatattcccaaaacaagtacatctgcgatcaactctagccaaatttgcccctgtgtgctacatgatggatgattattattttaaggtctgtttaggaagggaaatggctacttggccagccattgcctggcatttggtagtatagtatgattctcaccattatttgtcatggaggcagacatacaccagaaatgggggagaaacagtacatatctttctgtctttagtttattgtgtgctggtctaagcaagctgagatcatttgcaatggaaaacacgtaacttgtttaaaagtttttctggtagctttagctttatgctaaaaaaaataatgacattgggtatctatttctttctaagactacattagtaggaaaataagtcttttcatgcttatgatttagctgttttgtggtaattgctttttaaaggaagttattaatatcataagttattattaatattttgaacacaggtggatgtgaaggattttcatttaaaaaccaagtggttttgactttttctgttgaatgaacaactgtgccttgtggaatttttgcagaagtgtttatgctttgttagcatttcaacttgcattattataaagaggtattaatgcctcagttatgtgtttgtcaatgtactggctgaggattctatctcagctgtcttttctaactgtgtaggttgagttttgaacacgtgcttgtggacatcaggcctcctgccagcagttcttgaagcttctttttcattcctgctactctacctgtatttctcagttgcagcactgagtggtcaaaatacatttctgggccacctcagggaacccatgcatctgcctggcatttaggcagcagagcccctgaccgtcccccacagggctctgcctcacgtcctcatctcatttggctgtgtaaagaaatgggaaaagggaaaaggagagagcaattgaggcagttgaccatattcagttttatttatttatttttaatttgtttttttctccaagtccaccagtctctgaaattagaacagtaggcggtatgagataatcaggcctaatcatgttgtgattctcttttcttagtggagtggaatgttctatccccacaagaaggattatatcttatagacttgtcttgttcagattctgtatttacccattttattgaaacatatactaagttccatgtatttttgttacaaatcttctgaaaaaaaacaaaacaatgtgaaacattaaaattaaaaggcattaataatataatcgacgccgtggtcgacgatatcccgtacc

SEQ ID NO: 49926 - DNA, 3959 bp, Homo sapiens
tggcagttagcccgcccgctcggcgcagggcgtggcttctcgtagccattaggaaacagcaaccctttcacctcagttttcttcactccggcatttgcagcagagcgaaaggtggtggagtcctgaaggagggcctgatgtcttcatcattctcaaattcttaggacggtcgggccctggaaggaacgctctcggaattggccgcggaaaccgatctgcccgttgtgtttgtgaaacagagaaagataggcggccatggtccaaccttgaaggcttatcaggagggcagacttcaaaagctactaaaaatgaacggccctgaagatcttcccaagtcctatgactatgaccttatcatcattggaggtggctcaggaggtctggcagctgctaaggaggcagcccaatatggcaagaaggtgatggtcctggactttgtcactcccacccctcttggaactagatggggtcttggaggaacatgtgtgaatgtgggttgcatacctaaaaaactgatgcatcaagcagctttgttaggacaagccctgcaagactctcgaaattatggatggaaagtcgaggagacagttaagcatgattgggacagaatgatagaagctgtacagaatcacattggctctttgaattggggctaccgagtagctctgcgggagaaaaaagtcgtctatgagaatgcttatgggcaatttattggtcctcacaggattaaggcaacaaataataaaggcaaagaaaaaatttattcagcagagagatttctcattgccactggtgaaagaccacgttacttgggcatccctggtgacaaagaatactgcatcagcagtgatgatcttttctccttgccttactgcccgggtaagaccctggttgttggagcatcctatgtcgctttggagtgcgctggatttcttgctggtattggtttagacgtcactgttatggttaggtccattcttcttagaggatttgaccaggacatggccaacaaaattggtgaacacatggaagaacatggcatcaagtttataagacagttcgtaccaattaaagttgaacaaattgaagcagggacaccaggccgactcagagtagtagctcagtccaccaatagtgaggaaatcattgaaggagaatataatacggtgatgctggcaataggaagagatgcttgcacaagaaaaattggcttagaaaccgtaggggtgaagataaatgaaaagactggaaaaatacctgtcacagatgaagaacagaccaatgtgccttacatctatgccattggcgatatattggaggataaggtggagctcaccccagttgcaatccaggcaggaagattgctggctcagaggctctatgcaggttccactgtcaagtgtgactatgaaaatgttccaaccactgtatttactcctttggaatatggtgcttgtggcctttctgaggagaaagctgtggagaagtttggggaagaaaatattgaggtttaccatagttacttttggccattggaatggacgattccgtcaagagataacaacaaatgttatgcaaaaataatctgtaatactaaagacaatgaacgtgttgtgggctttcacgtactgggtccaaatgctggagaagttacacaaggctttgcagctgcgctcaaatgtggactgaccaaaaagcagctggacagcacaattggaatccaccctgtctgtgcagaggtattcacaacattgtctgtgaccaagcgctctggggcaagcatcctccaggctggctgctgaggttaagccccagtgtggatgctgttgccaagactgcaaaccactggctcgtttccgtgcccaaatccaaggcgaagttttctagagggttcttgggctcttggcacctgcgtgtcctgtgcttaccaccgcccaaggcccccttggatctcttggataggagttggtgaatagaaggcaggcagcatcacactggggtcactgacagacttgaagctgacatttggcagggcatcgaagggatgcatccatgaagtcaccagtctcaagcccatgtggtaggcggtgatggaacaactgtcaaatcagttttagcatgacctttccttgtggattttcttattctcgttgtcaagttttctagggttgaatttttttcttttttctccatggtgttaatgatattagagatgaaaaacgttagcagttgatttttgtccaaaagcaagtcatggctagagtatccatgcaaggtgtcttgttgcatggaagggatagtttggctcccttggaggctatgtaggcttgtcccgggaaagagaactgtcctgcagctgaaatggactgttctttactgacctgctcagcagtttcttctctcatatattcccaaaacaagtacatctgcgatcaactctagccaaatttgcccctgtgtgctacatgatggatgattattattttaaggtctgtttaggaagggaaatggctacttggccagccattgcctggcatttggtagtatagtatgattctcaccattatttgtcatggaggcagacatacaccagaaatgggggagaaacagtacatatctttctgtctttagtttattgtgtgctggtctaagcaagctgagatcatttgcaatggaaaacacgtaacttgtttaaaagtttttctggtagctttagctttatgctaaaaaaaataatgacattgggtatctatttctttctaagactacattagtaggaaaataagtcttttcatgcttatgatttagctgttttgtggtaattgctttttaaaggaagttattaatatcataagttattattaatattttgaacacaggtggatgtgaaggattttcatttaaaaaccaagtggttttgactttttctgttgaatgaacaactgtgccttgtggaatttttgcagaagtgtttatgctttgttagcatttcaacttgcattattataaagaggtattaatgcctcagttatgtgtttgtcaatgtactggctgaggattctatctcagctgtcttttctaactgtgtaggttgagttttgaacacgtgcttgtggacatcaggcctcctgccagcagttcttgaagcttctttttcattcctgctactctacctgtatttctcagttgcagcactgagtggtcaaaatacatttctgggccacctcagggaacccatgcatctgcctggcatttaggcagcagagcccctgaccgtcccccacagggctctgcctcacgtcctcatctcatttggctgtgtaaagaaatgggaaaagggaaaaggagagagcaattgaggcagttgaccatattcagttttatttatttatttttaatttgtttttttctcctatctctccccagtcctagctgcttggcaatcacatatactactaacagaccgcaacctcaacaccaccttcttcgaccccgccggagggagggagacccaattcttataccaacagcctattcttgatatttacggtcaccctgaaggttataatatcttatcctaccaggcttcggaattaatctccccatactgtacccttactactccggaaaaaaaagaaccattgccatacatagggtatgggtctgagcttatgatattcaatgggcttcctaagggttaaaatcagtgtggagcacacccaatattattaccaggtacggaatagacgtaggcaccacggagcataatttcacctcggtaaccattttcatcggttatccaacgggggtcaaagatataagcttgagtcgccaaattccagaagcaatttgaattgtctggtgagtggctggagcctagaattaatctcttttcacggtggtcgctgacggattgttacgcacttccctaacatgactaacaaccgaccaggggcact

SEQ ID NO: 49927 - DNA, 1548 bp, Homo sapiens
tggcagttagcccgcccgctcggcgcagggcgtggcttctcgtagccattaggaaacagcaaccctttcacctcagttttcttcactccggcatttgcagcagagcgaaaggtggtggagtcctgaaggagggcctgatgtcttcatcattctcaaattcttaggacggtcgggccctggaaggaacgctctcggaattggccgcggaaaccgatctgcccgttgtgtttgtgaaacagagaaagataggcggccatggtccaaccttgaaggcttatcaggagggcagacttcaaaagctactaaaaatgaacggccctgaagatcttcccaagtcctatgactatgaccttatcatcattggaggtggctcaggaggtctggcagctgctaaggaggcagcccaatatggcaagaaggtgatggtcctggactttgtcactcccacccctcttggaactagatggggtcttggaggaacatgtgtgaatgtgggttgcatacctaaaaaactgatgcatcaagcagctttgttaggacaagccctgcaagactctcgaaattatggatggaaagtcgaggagacagttaagcatgattgggacagaatgatagaagctgtacagaatcacattggctctttgaattggggctaccgagtagctctgcgggagaaaaaagtcgtctatgagaatgcttatgggcaatttattggtcctcacaggattaaggcaacaaataataaaggcaaagaaaaaatttattcagcagagagatttctcattgccactggtgaaagaccacgttacttgggcatccctggtgacaaagaatactgcatcagcaggtaaaggaaaaaagcagggtggaaaagaaaaacccattgtggatattgctttcgcatttttcttcaaacccactgcgtcaatttcttgggcttcagacagatttctttgccacattgtgccctctctgggggcaggggtttgggagaaagagaaaaaggaaaaatgattttaaaggagaacattttaaatattgaaaacttcaaacattggtcatcttgctacacagagtatcactaacatactagtatagatttacatttgtattcgaaatttatttatgcatgtatgagtatgaaagtatgtaataaaaccaaatggatattcacaaacattttgtaaaataggtatgatacatatatacatttagattttgtaaaatgaggatcatgtattaccctttaacacttgcagagtggctgctaaaagaattagaggctgtcaggccatttagatttatcagaatctagaccctactcaatgctgtttgaatggttgcagtgtcagtgtagaaggacctcctgaaacaagtcaagcaaggagatgttttgctgtgtggtttatttttgcccgtcaaatggtaacactgctgacattgttcaggagctttcaattatgaagtcattaagacagagtgttggtaaatgtgtcttcttggatgctttttgctcaggagtttctgattgtgttataaattactcta

SEQ ID NO: 49928 - DNA, 528 bp, Homo sapiens
cgttttcatattgaaatgaatcttacaaggttcagaagagcttattggatactgtgtgcctgagtagcgctgctcatggactggggagcttccctgtggagtggtcggatgtttgagccagttcctcaaatatcagtatctctccggaggttttcctctggggccattccttctcagagaagaatctcctaatctcctgtgaggggaagttgggacagctctgaggtgcctgaaggggctgagtttctcttcctctcctaagcagaaacagggtgctcttaaaatagcctttggagctttgtgatgtgaatacaaccacacagcccttctcagaatttgcttattatggaaaataaaaatcactaggaataggcaccccccgcccccccgcccccaattcattctcatggctgattttaagaagctgcatcttgactgttgctaggtggtttcagggtagaaagcatccaacttccagtcctgggctgccttcacagcatttcagattcatgctgcatggtgcggccg

SEQ ID NO: 49929 - DNA, 484 bp, Homo sapiens
cgttttcatattgaaatgaatcttacaaggttcagaagagcttattggatactgtgtgcctgagtagcgctgctcatggactggggagcttccctgtggagtggtcggatgtttgagccagttcctcaaatatcagtatctctccggaggttttcctctggggccattccttctcagagaagaatctcctaatctcctgtgtaggggatgtaaacctgggtgctggcattctgggagccaggtgggcaagggtcacgggctcttaccattcagtgcacgaagtttagcttttgccttctgcttttcagtctgatgtctcatctcttctcccttccaagctgtggctcccagggttgagaatatgaagatcaaacttttcagtgtggattctgtaggctggaaataaggcgatcccttttctgcctgtcgtaaaggtcacagccgacactcctataccaaaagacagattaacaagagtaagcca

SEQ ID NO: 49930 - DNA, 368 bp, Homo sapiens
agctgccttgtttccaaactgttcagaaaggaggagtcaggaggggaagttgggacagctctgaggtgcctgaaggggctgagtttctcttcctctcctaagcagaaacagggtgctcttaaaatagcctttggagctttgtgatgtgaatacaaccacacagcccttctcagaatttgcttattatggaaaataaaaatcactaggaataggcaccccccgcccccccgcccccaattcattctcatggctgattttaagaagctgcatcttgactgttgctaggtggtttcagggtagaaagcatccaacttccagtcctgggctgccttcacagcatttcagattcatgctgcatggtgcggccg

SEQ ID NO: 49931 - DNA, 377 bp, Homo sapiens
cattcctactgttaaagttttcacttaagagtataaacttcatcagctttctattaggacttattttgtaattggcttcttaggcatccttctttaaaagagaaatccacgttagctctccttgaggtctcgagttccctcggctggaggcacaggttcagtggagaccaaataatgcaggtgaattaccttcgtggccattactgcctccaacgaagtgtgtttattaagaacagttcttatgtcattcttaaggtaggtagggttaatactctccagcaaatttagtagatactctttgccagaaaagagaggagtatatatagtttgataattattgtgtagttttctgtgtacttaatttttgcagttttgta

SEQ ID NO: 49932 - DNA, 652 bp, Homo sapiens
aacaattggaagctatatttaatcagataattctggggatgcctattatgaatatgacctgattttaagggatcttcattgttttttagggcttgacttactatacagtggtcttcctttgtttagtttgctgtttcatgtaatctgcctgtatacttctgacacttctgataaataggtcttttaaaattactgttttcattcaattgctttttcttgccttgaatgtcctacatagtctgtttctgtttctagccatttctctcattattttaatgccacctgatttagaagcagttttttttttgagacagagtctcggctctgtagcccaggctgggagtgcagtggcgcagcctgggccccactggcaagctgcgcctctcaggttcacgccattctcctgcctcagcttcactagagcagttttaagtaataggaatgattatagcatctttgccttgttctttgacacaagtgtttctagtgttctgccattaactattagatttattggttgaaggtttgagagatttcttttttcctgatgttaatgaacattcttaatgaagacctttccgttaatgaggaatgtttaaaaatcaagaatgttgaatttgtttctgttttttgagactgcctcgccaaatgt

SEQ ID NO: 49933 - DNA, 275 bp, Homo sapiens
taaatatgaatatagctagttagcctaaaatttacacaaaatgtattcaagatcaaattagtgaacaaagcaatggttcgtatggctaatttaaaagcaattcaatttaccaatattaaaataattataaaatgtaaaagaaatttcagaggagttgattgaaaattttttgttcagtaattattcttaaactgcattcttaggtttattacataaatatagttgccagattgccatgggcaagtgaatgtcttcatttgaaatattattagaga

SEQ ID NO: 49934 - DNA, 347 bp, Homo sapiens
ttaagtactcagaattctcccatgttcacacatctttttactgtattgctgtgattgttcagttgggcttgaaaaatattatttattttctcatcagttttatgtctaagtttcattgactacaagttggaagatgaccacccagaattacaaatcagggagtaatttggtcctctccctaaaataaagagcttttatcctcttaagaagtaggaatggagtatagtctgtgtctgtgtattttaaactcatgataatgagttgccccatatgtagaaagcatgactctatatggttttcccattcccttctgtaaatattctctagcttacctgcaagttctgtag

SEQ ID NO: 49935 - DNA, 491 bp, Homo sapiens
gccatagggaagctgaaagtgcagggcgaggtctctctggaaaaggaaggctcctcccagggctgagggccagctgcagggctgcagcgctgtgggggtaagggctgccgcgctctggcctggagggacaaggccagcacacggtgcctcaaccaactggacaagggatggcggcagaccaggggccaggccaaagcactggcaggactcaggtgggtggcagggagagaaacccacctaggcctctcagtgtgtccaggatggcattcccagaatgcaggggagagcaggatgccgggtggaggagacaggcaaggtgccgttggcacaccagctcagacaggggcctgcgcagctgcaggggacagaggccaatcactgtcacagcagagtcaccttagaaattggacagctgcatgttctgtgctctccagtttgtcccttccaatattaataaacttcccttttaaatatatttatttgcaagacca

SEQ ID NO: 49936 - DNA, 560 bp, Homo sapiens
taaaattcgttttttttttcaaggcagagcagtcaattgattataagtatttatttcttttttcttcttggagcccagattaaaaagagttattttagatttaaaaatttcctgaaatagttgaaaaattatttttgaggagaaaattgtatccaagaaacccagaatgtaaggatacttgatttttatatccagataattctttcatgcactgaatggaagacagtatatctgtatattaatttttgtttagattttgaatcatttaacccttatccttttttcttgtaataagactatttaatgtttttctcttgtgttttccatctttatcaatgcattcgtgttggtcttgatgtatactacctgttcctagtgttatttttacacgtcatctcacagtaataatatcagcaattcttgctgcattgaacatattaaatacacatgtaaaatgaaaaagtaagcagtaggtaaaatcttgttactctgctttcattctgcctaactcactgcatttgaaaatacatgtcaaattctttctgagggtatgtatgatt

SEQ ID NO: 49937 - DNA, 611 bp, Homo sapiens
cagtgcattagaaacacaaattacagatgtctagggttaggatttctcaaagtgacactattggcatttggggccagataattcttgattctgaggggctggcttgtgcgtttcaggatatttagcagcatgcctggcctctaccccttagacgcaagaagtatgcccctgttttgacagccaaacatgcctccagggtattgccaaatgttccttgagggacagaattgcctctggttgagaacctctggtctctggggggtaaaggctttgtatgggtgcctgatgtaggagtgggcacttaatttgccattagtaaaaaatatataccattatttgaacatttaatgaacaatataaatttatgggtagtaaccctgaggaaaattacctataaatgtacaaaaacctgtagtatataatatcctaacacaaggcctgcagcatacaaaaatcactgtacttagaagttcagaatgttttgaaaggatctttaatttcttgagtctttagtcctgaatcatctaaacaaaatatagcattatcgtaaaatgctgaaaatttataaagaaaagttacctttgaagtactctatcccatatagtctagaa

SEQ ID NO: 49938 - DNA, 732 bp, Homo sapiens
attaaagagaccttgggcaaattacctaatctttcacccttggttttctcatatgatgacagtgcctttctgatggagccgttatgaaggtaaacattaggttccaacgcatgggaactacagttgtgttaaaatgagaatttcccaggagttcgtgtgtttcattgtgaggtgctattcagctctgtctatttccctcacatctgtcctttctctttctcatcccccactcacttagtaaacatgtctgcttggaccaatgattgggagtatggcgtgctgagccctggtaacgggaagtaagccagcattttcaacaagttgctaattataccacttttaaacacaataagagaagaaggaatgaaccccatgagctggggccacttggcaagtcccgatggtcttcttaggccagtcaggatgtttcttagactcacatcagccttgatgacgatctcctcccacatcgactgagtcaggggtcgctgtgtgctgagtaatgcagtcctttgctgggcgggaagtgggcagcactctgaagggacatgagagtggatgacggtgaagctgtgggaaactgcgggggagctgcacacgcctgatgcctgtgtcagagccacgcagtctctgagtcgtgttcccaagcacaactcacatctgtgaagtacatcagggaaaattaaataagtccaagtaggaaacaagttcagatatatttggaagatatta

SEQ ID NO: 49939 - DNA, 452 bp, Homo sapiens
agaaatggaaaatgtgactctcaaggattatacacaactaaaactgtgtgaaactgcaatgagtacccgggcaatagggaagtaggaatttctcaccaacccacgtgccaggatccagcctcaacacttgtgaggatccagcctcaacgctctgcacatctccagtgtggaacagcaccatgcgcctaatgagttcttctctgactgattgattgattgattactaaaacactcagcgctcctggcaaagcagttctcactctgttgaacaaattatctttatgcactgcagtctcttgagcttagatgaaggcaagctcactgtaatcttcagatcatttaggcaatgtcttgggaatcactggatatgacaaaatatccagggcatgtgggaatagggaagggggaagaaaagcaggacttggagggactatgctagtggatttcaactc

SEQ ID NO: 49940 - DNA, 1089 bp, Homo sapiens
ctaatcaaggttcttcactatttcagtgctttggattcctttggtaataaggacagattcattctcagaatgttattaaatgcataaaatacctatgattacaaagacaaccaattatatcaaaatacagttaccaaaatattttttaaatttttgaaatgtgctgctttattttaatgtatttaggaataaaatccagtggttaataactataattttgaagtaaagttgaatgtaattgatatattaagggatactaagaatgatataaaaattgggaatttttatttttgacagtcataggccctattaaactaatgaagtaagtttgttgcctccaatcagagtgaaagagaatgttaaatttcagttagaggttagtaaatataaaggtaatttctttactgtgcgatgtcacagactaaagtttatattgtatttgaatgtggctaggaaagtagataatatgcagcctatatcttggggcgccatttcctaaattagatttgcagcagcaggtacatcaagccattctttcttgattaccttcccatgtggtctacttgattggtccaaatgtaccaaatgaaatatacttcctatatgtagaaggaaaatttgggagaagttgtaaaatcgtgacagttttgacattcacgtgaaattggttaaaattaaaatataaggtacatcttttaaatgagtagactgaaaatgagccagtttgtcataaacttacccatcatatctacgttttaccttatccatatcttgtttcacttggttctatctcattctttttcactgaaattatacgtaggcttatttttccccatgcccaaaaagggaatattttaattctgaatttattccacaaaactttacatcactaaatgtgtgtttataggacgcatataaatttgtatgaaatttaaatatgattattttgattgcttacatataaagctgagtaaacatggcataaaattatatttcccttttggctaatgttctttcattaattggttctttgaggcagcggtagctgtgcaagtggcagtattgaaatattctcagtgattctgtcat

SEQ ID NO: 49941 - DNA, 368 bp, Homo sapiens
atggttacctaagaagccaatgaggctggacaaggagacactgccagacctggaggagaatgactgctacactgcccctttcagccagcaaaggatccatcagtgagtgttccatgttaaagccccatctcactaaggatgtgcagctgtggtagagcctcaccctgcacgcctttgattcctgggcatgaggaaggaacagcatagtgcccttctcccctaaaagtcttgtgagtgttcatatcccttttatttcagtcaggggaagataactgctgtaaccaacaatccctgcatctcagtggcttaagatgatacaatgcttgctcatgtgtgtgttgggtaaatgatcttctccacagaaaggc

SEQ ID NO: 49942 - DNA, 280 bp, Homo sapiens
ccagaatccaactggcctgtgcactgagaggattgcatactggggtggagccaaagtttattatacatctgcccaaactcacagaatgtacaagagtgaaccctgacatgaactatggactctgggtgattatgatgattcagtgtgggttcaccaattgttcaccactctggtggcagacaatgaaaacgggaggttgggcatgtgcaggagcaggaggtttatgggaaatctctgtgaagattattttcttcttcattttgctgtgagcctgaaattg

SEQ ID NO: 49943 - DNA, 277 bp, Homo sapiens
aattcaccttgttcgcagaattatcctgttcacagatgatatgatcttatatatagaaacccctaaatactccaacaaaaaacttctagaactgatacattcagtaaagttacaggatacaaaatcaacacgttaaaatcattttagcatctctatgcaccaataacaatcagagaatcaaataagtcaattccatttaccatagctacaaagatctaaatcgtagatctaagaaggtttaaattttgattccttgcttgcactcctagcaggtaaa

SEQ ID NO: 49944 - DNA, 158 bp, Homo sapiens
acaggctgtgctaagtgttaactagcgcacatccacagggcgatgggatatgaccatagcgaggtaaagttagcaagcaagggaagtcaagaaaacgacctgtgagcaacctgccattccagatggctggaaaagtgtgcaaagaggacagaacagca

SEQ ID NO: 49945 - DNA, 435 bp, Homo sapiens
aacattttaatctatctttggaatatttaagcaaatattaaaatatgtggttacctaacatggctatatattaaaatataaatgttatattaccctgtaacattttaaatgatttactaatctattatgtaaagtaatataagaagccagtttagtggtagaaatgttaattttattttaactttagtatttcaaaacaaagatgttatttttgaactcaaagtggtagaagcagagaggaggtgacaaactgagaaccttttgattttgttggggtggaacttggtctgctgttatagctgacattattactgtatctcaatgatttttgagattttggggaaaattgttttaatgtttcactcccaagcgctggaagatactccagaaatctttgccgttctgttcctataacatttgctcttccattttgaa

SEQ ID NO: 49946 - DNA, 399 bp, Homo sapiens
ggatcccagcggcggtcctgtagctgagcaggcctggggcttggttctatgtccctgtggctatgtttccagtgtcctctgggtgtttccaagagcggcaagaaacgaataaatctctggtgagttgtttatttgttcttcactttgttttacactgtattttctgagtttatgggtgtctgtgaattaaaaaggaaaagtggaaataagtaaaactcaggttgaaggaaatatacataaataagataaagctgacctgtagatatagacaggttataaaagcttgagttgctaagtgagtgcaaagtttcctctgatctttctgatgccgaaacaaaaaaggcagtcatgtttgttacgtgattggaatggaacccgaaaagagagcatgctgtgttc

SEQ ID NO: 49947 - DNA, 352 bp, Homo sapiens
  misc_feature (328)..(328): n is a, c, g, or t
ggatcccagcggcggtcctgtagctgagcaggcctggggcttggttctatgtccctgtggctatgtttccagtgtcctctgggtgtttccaagagcggcaagaaacgaataaatctctggtcctggtgtagagaagtccctcaacctattgtgcaagagttttgagaagcggccccgcagcgcctccaccccagagacccggaccaagttcacacaggacaatctgtgccacgcccagcgcgagcgccctggactcggccaacctgtgggtgcttgtggactgcatccttcgcgacacctccgaggacctgggacttcagtgtgacgncatgaacctggccttcgggcgccg

SEQ ID NO: 49948 - DNA, 1060 bp, Homo sapiens
gtggcacaatttcggctcactgaagcctccacctcctgggttcatgccattctccttcctcagcctcctgacacattttgttctttagacctgtttttgtatctatcagtagtgaacgaaggtgcctgtgttgccatcccctcaccagcactagattctttttttctcctgtcattgccaggttcttagacaattactgatatgccattttagtttttcactttggttattagcaagtttgaaagttacatgataaaaagtatcttttctcttttgaattgcttattctttagcctgttattctgtttgggagtttaacctatttctggttaatttataagagcaatttatttaaaataatatattattaaatatattataaaaagcaacaaaatatgtattataagaattaatgatatagaaatctgtgacacaaaataactctcctataatcccactttaaccactgttacaaatttggtgcatattcctgaaagatccttatatagtgaggaatttttaccattgcttatcaaatatgttgtaaatatattgcctaacttttaattttacccttaacattttttctattattttaatagttaatacatgtacctaatacaattcaaaatataaaagattatgcaatataaagtaaatttttaaaaatttaggttgactttatcattatagaaaaatctaggaaaaaacaaggaaggaaaaagaaatcattctcaactcaccattcagaaacagcattttgggccaggcatgggggctcgcacctgtaatctcagcactttgggaggccaaggtgagggagtcatttgattctaggagttcaagatcagctctggaaacatataccccatctctacaaaaaaaaaaaaaaaaaaaaaattagccaggtatagtagcatacacctgtggtactagctactcaggaggctggggtggggagatctcttgagcctgggaggccaaggcaatggtgacctgtggttggaccactgcaccttagtctggggaactgagtgagatcctgtctcgaagaaaaaag

SEQ ID NO: 49949 - DNA, 568 bp, Homo sapiens
ttcccgtctatgttaaaagctttataaatttttaaagaacacagaccccgtgacgcatgttgctgtcaaatcaggaaattgcttcaggaaggccttgttctgctgttcggcggctgtgtgtcactgacttggtttatttaatagttcttctctttaattacatctgtgtataattgccttgtacgttccagggagtgtgtttattgttcggattcctgatgactcatcggtgtttttggcatgctcacaggtcaggccttagttatgggaaaggcccagtggatggggaagcttccaagggaccgtgatgcctttgtggaagtggctaaggagagttgagagagctgggctaaggcgagttgctgcagcacagtgggacgaaggtggagcaaggaatggctgcatccttcccctggggatggatgtagtggggaagagaaccacccttgagacagatctggaagtgctttgctagtcagccatgggacgagtctcactctcgcccaggctggagtgcagcggtgtgatcttggctcactgtaacctccacctcctgggttcaaacaat

SEQ ID NO: 49950 - DNA, 449 bp, Homo sapiens
ttcccgtctatgttaaaagctttataaatttttaaagaacacagaccccgtgacgcatgttgctgtcaaatcaggaaattgcttcaggaaggccttgttctgctgttcggcggctgtgtgtcactgacttggtttatttaatagttcttctctttaattacatctgtgtataattgccttgtacgttccagggagtgtgtttattgttcggattcctgatgactcatcggtgtttttggcatgctcacaggtcaggccttagttatgggaaaggcccagtggatggggaagcttccaagggaccgtgatgcacctgtggtactagctactcaggaggctggggtggggagatctcttgagcctgggaggccaaggcaatggtgacctgtggttggaccactgcaccttagtctggggaactgagtgagatcctgtctcgaagaaaaaag

SEQ ID NO: 49951 - DNA, 239 bp, Homo sapiens
attctagtaataattttttatttggttttttttgtgaatcagtttttggtaataataatgttaagttctgataaaacagtggttctcaatcctggatgcatatcagaatcacatacatatggatctttaaaaaataggattcttgggccacatcctgagatattctcatttaattatcccgaggaggtggagtgcggtggctcaggcctataattccagcacttcaggaggctgagggg

SEQ ID NO: 49952 - DNA, 845 bp, Homo sapiens
atagaattgttttccaaagtgcccccgtctgccctatttccaaataacaaatttagcaaatatgaatgaaaccttaatttttgtgaatagtatgaaatcacagcataagtgttcacgtttttctttcttgtgtctaaaggatctctcttacaatggaagttgacaggaatattataaatattataaatgtctttgttgcataactttcaaatttctggtcgtgaatagttttcagcttttaggtctgttatttgagttttgtaggtgtactttgagcttgatcaggtacagtggaaatgttacatgttatgttttagttatgactacctggaagatggggaaagatacacctcttaaaattgatttaggaaagaaacgccaatttagtatctgggaaaggacacaacacatttttaaaaatgtgtagtgcttcccattaagcttaacgtaaaacttttaagcattgagaattgttaccataaatatagtttcttgagaataagttgctctcttttatgtttcagccagaaagtccatgtatatacagattacagcaggtccttgaataatgttgtttcaagataatgttgagaaaaaaaactgtctgtggagtttacacgttctccctatccctgcatgggttttctctgggtactcttgatttcctcccacatcccaaagctgtgcacgtgaggttcactggtgtgtggagctgtgtgtgtaagtgtgagtgctttctgcagtggatgtcctgtccaggactggttccggccttgcaccctaagctgctgagataggctccagccaccccaaccctgaactggaataagtggtaaaaaaaaaaa

SEQ ID NO: 49953 - DNA, 448 bp, Homo sapiens
ttctgaagttacagttataaatgtattctgatttcaatggtatgatgtcttgcaattttatttagaaagtataatttgactactctagccatattatttttagaaaagttgaggtcctttttcaaaatatgttttgaagatggaaattcaaaatattagggtcttaaaatagaatcacatatgaacctgtgtggtgaacattaacccattggtagtctcaacttgagactgcatttgaactacacttgtgagtgatttttcttagctttttgagatagccagggctttctgtataagtgctaacatactcctttggtgacctccattattcccagattatgcatctttcctacacttgcattttcagttggggatagaatagtgagtggagttacggtccagctctgacttaggactatgttacatctttctcatgcctgaattcacc

SEQ ID NO: 49954 - DNA, 317 bp, Homo sapiens
gaggaagaagccagttttttccaaaagagtataattagtatgatttcaactatgtatgatttatgatggcatgtatcagaactactgggtggtgactatgtgcgactttctgacgcgctgagagagggcgtcttccaagatgcaggcagcaaggtattactactttatctgggtaggagataaacatggatacatactgtaaacatggattatgtttacttcataaaaatttctcactctatatgtatgatttgtgtacttttccccatgtacattaaacttcaatcatatatttaaattttaaaaaatattacact

SEQ ID NO: 49955 - DNA, 378 bp, Homo sapiens
aatttaggtacatcatgactttgttgcttacaattcaaattcatatataatctagaaaaataatttgaatcctgagtttaacccacctgctttaaagagactgttgttcaaaaattgcttcttagttattgatactagatgtcttaggggctttgggccttagagggtctgcaaagctctgacactaggttctagattttatagataacttcatatattttctgggaaagaagggctgtgaccactaaagtagtttaccactgttttctagaaagacttaaggcaactgacctgttcatatgtcactcttctgctgccgctgctccctggcactcccacagtattaggtcctaagagactatcattgtggaggtggag

SEQ ID NO: 49956 - DNA, 446 bp, Homo sapiens
gcatgctcacttttatctgagacatcttctcttcctggaatgacctgggatcccactttaggcatgttggcagcaataagaaattcagcctgagcctgactttcacagactcatttggtcccagttttctgtgtccaggcaactcacccagtgttttctgccaccctggcaaactggctgccagcacatcacactacgtatgtttgtgggttcatatgtgtccacgtgcagaatctgcccatttcctggatcatcctgggccatctggggaagcctttttaattttttcttttgcctcctgcctttcaagcttctcttttgattcttgtggcttgtagtccaacaagagtagaaggaaagagcttcaggaagtgaggagtttattaaaattcctttgaagcatttcaattcagtaagaggaactatcttttctgttagctaagaca

SEQ ID NO: 49957 - DNA, 859 bp, Homo sapiens
ctgtctagacaccttttccttagaaaacatcctgaaacataagaataagcacaaaaatgaacatattacatcaaacgtacccactgagaagaatgataagtttaacagtttcccacgtgggaggcatattgacgattacaattttaagttagcagaacaccagctcacatggaaacagtctcctccgtgaattctttctttggctgacagacatgagatgttagctgtctaagaagaccttcacaccaacaccttcttagaagatattgtaagataacaatccttgagtggaacctgaattctttctaaacactgcatgtaggaaaacaagaggcagttcacacaatcacttaacacctcttcttaaaagtgaatccttgaaggagtggtgttcaaatatttaagtacattagatactttatacacgccacatccaaaatgctcagtattcctaatacatttcattttctcccaagttttaatggttgatgcacaatcacattaatttcctattaatttctaggaatatgtacacagtagccttaggagaaagaagataactattactttacatttttaactgttttgttttcatgtccatgagagaaaaattaaagtaagttaaaaaattaactcagacactctatttatttttaggaagacatacaccccccacagggagacttttacatgttgtaataatgttcacaaacagctactctttaagtgtaacactattctaagcctcttttcctccattttatttcatatacatttatgcatctgcatgcatatataaccacatgtatttatatttagtaggtatagtttattacacataaatctaaatatctatcat

SEQ ID NO: 49958 - DNA, 760 bp, Homo sapiens
attttttttgttgttgtttttatttctgcatacagattacaattttaagttagcagaacaccagctcacatggaaacagtctcctccgtgaattctttctttggctgacagacatgagatgttagctgtctaagaagaccttcacaccaacaccttcttagaagatattgtaagataacaatccttgagtggaacctgaattctttctaaacactgcatgtaggaaaacaagaggcagttcacacaatcacttaacacctcttcttaaaagtgaatccttgaaggagtggtgttcaaatatttaagtacattagatactttatacacgccacatccaaaatgctcagtattcctaatacatttcattttctcccaagttttaatggttgatgcacaatcacattaatttcctattaatttctaggaatatgtacacagtagccttaggagaaagaagataactattactttacatttttaactgttttgttttcatgtccatgagagaaaaattaaagtaagttaaaaaattaactcagacactctatttatttttaggaagacatacaccccccacagggagacttttacatgttgtaataatgttcacaaacagctactctttaagtgtaacactattctaagcctcttttcctccattttatttcatatacatttatgcatctgcatgcatatataaccacatgtatttatatttagtaggtatagtttattacacataaatctaaatatctatcat

SEQ ID NO: 49959 - DNA, 667 bp, Homo sapiens
ggatcatgggcattaagttagtgatgatgaatagtagatttaatgtagtaggatttgtaattattttccttgggtcaggaaatttattttggggaactaattctagcaggtaaactttgtttctccttcctttaagtatcttacccaaatccttgagcagtgcttctgtggaaaatgagctggttgctactgtgtagtagtgaggtctgccataaagactacttcttaaaatagtatcctagtatgtactttcatcacctcagttgtcttgggcctaagtacccatttattttccaaaggaatggacagtttttctagttggagccatctcctgagctccatctcctgagctgtttatcactttcttcccattgtctgtcagacaggtataggcaattgtccaagggcacatactttgttctggaaatctaacacacagcacagtgagatgacacatgcagactcacaagtgtggtcatatcatttcacaagaaagtgctaaacagctttggatgaggttcagactatggtatctgaattggagaaaagaaatgggagtaagtgtgtgtctcctgccactcttctttcttaataggtcagagacatttattcaaggtgtccagtaggcaggaacatagcagttgagatttgctttcgaggcatatgc

SEQ ID NO: 49960 - DNA, 454 bp, Homo sapiens
atagggcaaaatgagtcacgctgtgaacaaaacattctgtatcatttttgttcgcccacctctcccatgttcaaaggccttctgtggttccccattgccttcacattcaattccaagcttttgaatctgtctctcaagatccttctcaaacttatcctgcatcactccccagtgtgggctggcccactccaatgccatcccaaatacccacactcattctctcctctctcccttggctccagctgtcttctacctgggagaattctccctcttcctttctacaaaccaaaatctcactagttcaaaggcaaattcaagaccactgtgccctctgaaaactcctccggccccaccagccccactgatttctgcatttcagatgcactgcctaggattctgaggcctaaatctttcccgccagtcccaaactgccattgtaaattcctgttgactt

SEQ ID NO: 49961 - DNA, 315 bp, Homo sapiens
aagattttgtaagagtagttaatgtgtgttctgtatttctttacctccccttgtgtctgagcccctttgtcttgcctctaatactccctttaaattgtttaacagtgatctgtaacacgtcattgtcaaatgcagtagactcttttgggaccttattttagtctacctctctatgaatatgtgaaactctttattgtttccctccattggcttgcattctcagacttcccctcagtctgtactctttccttgggggaccttacctacactcaggtcatcagctaccgctctgtgaaaataagtcccatttttttt

SEQ ID NO: 49962 - DNA, 2001 bp, Homo sapiens
acaatcctttgcggtggttcaagatggcggcgcccagtggcactgtgagcgattcggaaagtagtaacagcagtagcgatgcggaggagctggagcggtgccgcgaggcggcaatgccggcttggggcttggagcaacgcccgcacgtggcagggaagccaagagccggtagggtactatgtttggggagactggctgaggggcgtgggatcttcccctggagcctgagaggatggatggtgctgcaaatagccagttgtcaacctcccaaccgagcctcaggcataaggtgaatgagcatgaacaagatggcaacgagcttcagaccacccctgaattccgagcccacgtagccaagaagctgggagccctgctggacagcttcattaccatctcagaagcagcaaaggagccagcaaaagctaaggtacagaaagtcgctttggaggatgatggtttccgccttttcttcacatctgtccctggaggccgtgagaaggaagagtctccccaaccccgccgaaagcgacagccctccagctccagcagtgaggacagtgacgaggagtggcggcggtgccgggaggcagctgtgtcggcgtccgacatcctacaggagtcagccatccacagccctggaacagtggagaaggaggcaaagaagaaaaggaagttgaaaaagaaagccaagaaggtggccagtgtcgactcggctgtcgctgccaccacccccaccagcatggccacagtccagaagcagaagtcaggtgagctcaacggggaccaggtgtcgcttgggaccaaaaagaagaaaaaggcaaagaaggccagcgagacctctccattcccaccagcaaagagtgctacagctatacctgcaaactgaacccagccatgggcacagggctcagccagctccaaggacaaggtgtcccccccaccctggggacaaggcatttccaagccccacctccctctccaagttcaaggactgggctggcaaacccagactgcccatgagaccctgatggtgatgaaggcttgctcgagagttgggccaaaaaagtggctgtagggtgagaagaccaatcaaggcctgcccctctgtgctcccacggagggctggcgggggcgctgtggttccagaacatttcatgacctcaggaaaaaaggaaccttccagttatttgagactagtggccaagtggtgaaacctccatctccctagaactgtctgaggtgggcaggggaagggagaccttccccaccacctccttagcctggtgtgagaaacagtttttagaaaatgagagaagggatccccaagaggccaaggcccagagaaacttttgttcttctctccttagcccacatagacttcacagaatcgtctgagaaaggagagctttttcacccctggctttctagaattttctttgtctgcatttgtgaatataccacacatgatggtgtctctgagccgaccagattatggaaactcaattgtcagaggacccaaaacaaaacttagagtgatttggatattgcctctctgtcaatgctgaaccttaagacattttaagtaaacatcctcctcctctctacacccccaggatttgtgcgttcaccccacccaagacttcaggaagtgtcatagcactcgtggactaggtttcatgggacaaaggcattctgcaagaagtagaagcttgtggccgggtgcagtggctcatgcctgtaatccaagcattttgagaggccaaggaggtggatcaattgaggccaggagtttgagaccagcctggccaacatggcgagaccccatctctactaaaaatacaaaaattagctgagcatgttgacacacgcccgtaatcccagctactcaggaggctgaggtgggagaatcgcttgaacccaggaggtgcaggttgcagtgagccgagattgcgccactgcactctagcctaagcaatggagcaagaccctatctcaaaaaaa

SEQ ID NO: 49963 - DNA, 1930 bp, Homo sapiens
acaatcctttgcggtggttcaagatggcggcgcccagtggcactgtgagcgattcggaaagtagtaacagcagtagcgatgcggaggagctggagcggtgccgcgaggcggcaatgccggcttggggcttggagcaacgcccgcacgtggcagggaagccaagagccggtgctgcaaatagccagttgtcaacctcccaaccgagcctcaggcataaggtgaatgagcatgaacaagatggcaacgagcttcagaccacccctgaattccgagcccacgtagccaagaagctgggagccctgctggacagcttcattaccatctcagaagcagcaaaggagccagcaaaagctaaggtacagaaagtcgctttggaggatgatggtttccgccttttcttcacatctgtccctggaggccgtgagaaggaagagtctccccaaccccgccgaaagcgacagccctccagctccagcagtgaggacagtgacgaggagtggcggcggtgccgggaggcagctgtgtcggcgtccgacatcctacaggagtcagccatccacagccctggaacagtggagaaggaggcaaagaagaaaaggaagttgaaaaagaaagccaagaaggtggccagtgtcgactcggctgtcgctgccaccacccccaccagcatggccacagtccagaagcagaagtcaggtgagctcaacggggaccaggtgtcgcttgggaccaaaaagaagaaaaaggcaaagaaggccagcgagacctctccattcccaccagcaaagagtgctacagctatacctgcaaactgaacccagccatgggcacagggctcagccagctccaaggacaaggtgtcccccccaccctggggacaaggcatttccaagccccacctccctctccaagttcaaggactgggctggcaaacccagactgcccatgagaccctgatggtgatgaaggcttgctcgagagttgggccaaaaaagtggctgtagggtgagaagaccaatcaaggcctgcccctctgtgctcccacggagggctggcgggggcgctgtggttccagaacatttcatgacctcaggaaaaaaggaaccttccagttatttgagactagtggccaagtggtgaaacctccatctccctagaactgtctgaggtgggcaggggaagggagaccttccccaccacctccttagcctggtgtgagaaacagtttttagaaaatgagagaagggatccccaagaggccaaggcccagagaaacttttgttcttctctccttagcccacatagacttcacagaatcgtctgagaaaggagagctttttcacccctggctttctagaattttctttgtctgcatttgtgaatataccacacatgatggtgtctctgagccgaccagattatggaaactcaattgtcagaggacccaaaacaaaacttagagtgatttggatattgcctctctgtcaatgctgaaccttaagacattttaagtaaacatcctcctcctctctacacccccaggatttgtgcgttcaccccacccaagacttcaggaagtgtcatagcactcgtggactaggtttcatgggacaaaggcattctgcaagaagtagaagcttgtggccgggtgcagtggctcatgcctgtaatccaagcattttgagaggccaaggaggtggatcaattgaggccaggagtttgagaccagcctggccaacatggcgagaccccatctctactaaaaatacaaaaattagctgagcatgttgacacacgcccgtaatcccagctactcaggaggctgaggtgggagaatcgcttgaacccaggaggtgcaggttgcagtgagccgagattgcgccactgcactctagcctaagcaatggagcaagaccctatctcaaaaaaa

SEQ ID NO: 49964 - DNA, 362 bp, Homo sapiens
gcgactactactactactacaactaaattggcggccggtacgacgccactgcattctagcctgagtggcagagtgagaacctgtctcaaacaaaaacaaaaattgttccttgatctcaccatcctctcacatggtactggttagtgcatcttatgctcacttagcaattgagagaatttgttctctagttctttgactgtacctatttaggtgtgtctttattggttttagaagttaattttggccaggcgcagtagctcacgcctataatcccagcactttgggaggctgaatcacaaggtcaagagttcaagaccatctcctggccaacgtggtgaaaccccgtctctactacaaataca

SEQ ID NO: 49965 - DNA, 223 bp, Homo sapiens
ctcctcactctgctcctacacaaacacattgccctgtgttcatccgtgtctatcacatactaccctgtttcccacaggacatccatccccttccccctcactcaccccgatttccttatattagagttctttgttgccagggctccctgaacatgctccacctccattaggaatctaggaatcggtgaccccatagcagtgggtctcacactggagtgtgcct

SEQ ID NO: 49966 - DNA, 350 bp, Homo sapiens
tgaaatgtaccctgtataattcatttatggtcattattggtcctataaagggatatctaacaagttaaacaatgaggttatttatctggaggagaggcacagaatgcttaaatcaagagagaaaaaagcccacagaatcacattatagctactctattttgttaaaaaatacaaataaaaaataaaaataaaaaaaggtggggggacagtctaatgagctagattttaggagtaccaagagaaggaaacagctgcttcaaccatcacctcgtaatcaggaaaattatgatttaaaatccttttgattcttttcagatatataatgattattctgaagccctcaaatacag

SEQ ID NO: 49967 - DNA, 973 bp, Homo sapiens
agacttataaactcacttttaaataatttatggatcaaagaagaaatcatactgaagacaggttgaaaattgatgaactaagcatcttactcaaaaaactggaaaaaagtaaaaggataaacccgatgaaagtagatgtatggaaatgataagtgtaaaagcataaaattgatgatgtcaaaaatgaaaatataatagaggatttttaaaagcctgctctttgaaaaaagctaattgaataggcaattctctggcaagattcatcaagagaaaaaagacataaataactaatatcagcaataaaaaggagacaacaatatagaagaagatgatagatgagctttatccctatatacttgaaaactttgatgaaatagccagtttactaaaaaaatacaccttagcaaaactggccaaggaagaaatagaaaacctgaaatagacctattactaggactaatatttagccaatatgtactggttcagctgaagtactgttaaaagattgaacttcttccataccaattcgtaaataggcactgccctgagttaccctctgacaccctctgactacccaggcccctcttctagagatacctcccacaaaaccttcccatgattcagcagcaaaagtcccccttacacaatatggcgattccaggaccctgttccagcacagccatctgcatctattctgactggcaagtgttcatgcggtgcttgttatttaaatattctgaatatcacctctgccacagccattaaagaaatggaaaaaatgagttaaaaactacctacagtactaataaaagagcaggtctgtcagttttacaggtgacttctaccaaatattgcaaataagagagaacattctaattttattaaactgatcagattattgaaaaagggaattcttacatcatgtataaaattagtatgaccttgatacccgaacttaacaaagataatatta

SEQ ID NO: 49968 - DNA, 375 bp, Homo sapiens
taaaattaatgattttctatttaaacacagagtcaagcaaagcaagtttctctgcaaggaaatgccctacttccatacattcaagatctgaataatagatatagaagctacagagtattttcatttccagagagataagacatataaaattctgactcacagctcttcttttggaaggattcatcaatgatatatatctgacattttgtactcattcttttttttaaattatactttaagttctgggatacatgtgcaggggtgggatctgctgagctagatcacttggctccctggcttcagccccctttccaggggagtgaacggttctgtcccactggtgttccaggcaccacttggatatgaaaaaaaaaa

SEQ ID NO: 49969 - DNA, 738 bp, Homo sapiens
gcaggccccgaacaagagtaggtcttgatgctctagcagatcacttcctccagccagtgtggtatagagaggaggctactgagggcctcactaatacacaggaggaggccaggacagaactattggtctcaattctttcatacagtggtgcaggtaagctggttcccttctgttcttaaagaactctgtgggctctggaaggagaccagagcaaatataagagccattaccaaacaatggagacaggatctcaggctagagtgcagtgtcatgatcacagctcactgcagcctcagcctcccaggctcaagcaatcctcccatctcagcctcctgagtagctgggactacaggtgtgtgccaccatgcctggctaatttttgtattttttgtagagatgaggactcactttgttgctcaggctggtcttgaactcctggactcaggcagtccttctgccacagcctcccaaagcactgggattacaggtgtaagccactgcgcctggccttccttccagaattcttatatgtatgttggatttactgaatctctctcactcattgcttttatcttctttatcatcagtcattcctttattctttttctctgagttctggaaaaatgttgtgagcttgttttataagcttccatttcctatggtatcactttgtatttctattgcattttaaaacacacattttgcatgtgtatgcatgcttatgtacacatgtatacg

SEQ ID NO: 49970 - DNA, 1429 bp, Homo sapiens
  misc_feature (1179)..(1179): n is a, c, g, or t
agcagggctccgggcaaggaggtctggatgctgagggcggtccctgaggggcgggcggggcccgaccggcgctctgtgtggccgaggccatgaagccgcagccgcccggctaggccccgggcggctctagcccagggcggcccgcggggcgctgggcctggctcccggctccggtttccgggccggcgggtggccgctcaccatgcccggcaagcaccagcatttccaggaacctgaggtcggctgctgcgggaaatacttcctgtttggcttcaacattgtcttctgggtgctgggagccctgttcctggctatcggcctctgggcctggggtgagaagggcgttctctcgaacatctcagcgctgacagatctgggaggccttgaccccgtgtggctgtttgtggtagttggaggcgtcatgtcggtgctgggctttgctggctgcattggggccctccgggagaacaccttcctgctcaagtttttctccgtgttcctcggtctcatcttcttcctggagctggcaacagggatcctggcctttgtcttcaaggactggattcgagaccagctcaacctcttcatcaacaacaacgtcaaggcctaccgggacgacattgacctccagaacctcattgactttgctcaggaatacgaggatgtcctcaacacccagtgtggctacgacgtccggctcaaactggagctggagcagcagggcttcatccacaccaaaggctgcgtgggccagtttgagaagtggctgcaggacaacctgattgtggtggcgggagtcttcatgggcatcgccctcctccagatctttggcatctgcctggcccagaacctcgtgagtgacatcaaggcagtgaaagccaactggagcaaatggaatgatgactttgaaaaccactggcttacgcccaccatttccgaggtcctgtccacggcggggcctcagcagaactctctgactggggcccctggcccggcccacccagccgacatgttttctttggcctgggtggtttataccctgagccaacctttaaaaattggtagatttcacataaaagtccagatccacagttctcttgaagaatgaccacctggtacgccggtcttcggtggcaacactaccttgggacactgctcccagtcacaagggcccagtgnccgtctctcactagtgcgcctgacccttgtacactaggagctggctcccacctctgcagggttatttcctgcacctcgaggccgctgcgggcaatctggagtgaaacacggggacctgaaggatggagaggctgggacccccgcttttgaaagagggtgcagcctgggaaagggcgggccttgcttggggactgcggttggaagtagagttcccaggaaaaggtctgaaggggttggattgggggtcaag

SEQ ID NO: 49971 - DNA, 2119 bp, Homo sapiens
  misc_feature (1869)..(1869): n is a, c, g, or t
agcagggctccgggcaaggaggtctggatgctgagggcggtccctgaggggcgggcggggcccgaccggcgctctgtgtggccgaggccatgaagccgcagccgcccggctaggccccgggcggctctagcccagggcggcccgcggggcgctgggcctggctcccggctccggtttccgggccggcgggtggccgctcaccatgcccggcaagcaccagcatttccaggaacctgaggtcggctgctgcgggaaatacttcctgtttggcttcaacattgtcttctgggtgctgggagccctgttcctggctatcggcctctgggcctggggtgagaagggcgttctctcgaacatctcagcgctgacagatctgggaggccttgaccccgtgtggctgtttgtggtagttggaggcgtcatgtcggtgctgggctttgctggctgcattggggccctccgggagaacaccttcctgctcaagtttttctccgtgttcctcggtctcatcttcttcctggagctggcaacagggatcctggcctttgtcttcaaggactggattcgagaccagctcaacctcttcatcaacaacaacgtcaaggcctaccgggacgacattgacctccagaacctcattgactttgctcaggaatactggtcttgctgcggagcccgaggccccaatgactggaacctcaatatctacttcaactgcactgacttgaaccccagccgggagcgctgcggggtgcccttctcctgctgcgtcagggaccctgcggaggatgtcctcaacacccagtgtggctacgacgtccggctcaaactggagctggagcagcagggcttcatccacaccaaaggctgcgtgggccagtttgagaagtggctgcaggacaacctgattgtggtggcgggagtcttcatgggcatcgccctcctccagatctttggcatctgcctggcccagaacctcgtgagtgacatcaaggcagtgaaagccaactggtgaggccgccagaggccatggccacatgcctggcctacacaggcctctggggggccccccaggaccctcctactatactcctgacgggcaaggctgcaggagatgttcctgctgggactgagccttgaggggttcgcctgaaccgctgtgctgtccacccacggaggaagttgctgtgcctccgcctgggcctcttgtcccgtatgcgtgtgtacacacacatgcaggcacacgtgtgcacagggagccaccgtctcggctacatttggggtggtggactctccaggggactaggaagggcgcagctcagagggtgcaggccaagtggggtgggaggtgctgtgtggagggtcccgccccgttccctggccccccagtgctgggacgcaccttttctgtgcgtagctgtatggggcgcgttgcctgagccactgcctcacacagcttcagagcactcttttctatgagctgtaactttgagcctgccaggaacccacctcagcctcagtgtcccagactctgaaatgggtccaagaattttctttctcttgcttgcctctcaggagcaaatggaatgatgactttgaaaaccactggcttacgcccaccatttccgaggtcctgtccacggcggggcctcagcagaactctctgactggggcccctggcccggcccacccagccgacatgttttctttggcctgggtggtttataccctgagccaacctttaaaaattggtagatttcacataaaagtccagatccacagttctcttgaagaatgaccacctggtacgccggtcttcggtggcaacactaccttgggacactgctcccagtcacaagggcccagtgnccgtctctcactagtgcgcctgacccttgtacactaggagctggctcccacctctgcagggttatttcctgcacctcgaggccgctgcgggcaatctggagtgaaacacggggacctgaaggatggagaggctgggacccccgcttttgaaagagggtgcagcctgggaaagggcgggccttgcttggggactgcggttggaagtagagttcccaggaaaaggtctgaaggggttggattgggggtcaag

SEQ ID NO: 49972 - DNA, 1075 bp, Homo sapiens
agcagggctccgggcaaggaggtctggatgctgagggcggtccctgaggggcgggcggggcccgaccggcgctctgtgtggccgaggccatgaagccgcagccgcccggctaggccccgggcggctctagcccagggcggcccgcggggcgctgggcctggctcccggctccggtttccgggccggcgggtggccgctcaccatgcccggcaagcaccagcatttccaggaacctgaggtcggctgctgcgggaaatacttcctgtttggcttcaacattgtcttctgggtgctgggagccctgttcctggctatcggcctctgggcctggggtgagaagggcgttctctcgaacatctcagcgctgacagatctgggaggccttgaccccgtgtggctgtttgtggtagttggaggcgtcatgtcggtgctgggctttgctggctgcattggggccctccgggagaacaccttcctgctcaagtttttctccgtgttcctcggtctcatcttcttcctggagctggcaacagggatcctggcctttgtcttcaaggactggattcgagaccagctcaacctcttcatcaacaacaacgtcaaggcctaccgggacgacattgacctccagaacctcattgactttgctcaggaatactggtcttgctgcggagcccgaggccccaatgactggaacctcaatatctacttcaactgcactgacttgaaccccagccgggagcgctgcggggtgcccttctcctgctgcgtcagggaccctgcggaggatgtcctcaacacccagtgtggctacgacgtccggctcaaactggagctggagcagcagggcttcatccacaccaaaggctgcgtgggccagtttgagaagtggctgcaggacaacctgattgtggtggcgggagtcttcatgggcatcgccctcctccagatctttggcatctgcctggcccagaacctcgtgagtgacatcaaggcagtgaaagccaactgagcaaatggaatgatgactattgataccactagcttacgcccgtcccgaagcaggcgcgagcta

SEQ ID NO: 49973 - DNA, 1504 bp, Homo sapiens
agcagggctccgggcaaggaggtctggatgctgagggcggtccctgaggggcgggcggggcccgaccggcgctctgtgtggccgaggccatgaagccgcagccgcccggctaggccccgggcggctctagcccagggcggcccgcggggcgctgggcctggctcccggctccggtttccgggccggcgggtggccgctcaccatgcccggcaagcaccagcatttccaggaacctgaggtcggctgctgcgggaaatacttcctgtttggcttcaacattgtcttctgggtgctgggagccctgttcctggctatcggcctctgggcctggggtgagaagggcgttctctcgaacatctcagcgctgacagatctgggaggccttgaccccgtgtggctgtttgtggtagttggaggcgtcatgtcggtgctgggctttgctggctgcattggggccctccgggagaacaccttcctgctcaagtttttctccgtgttcctcggtctcatcttcttcctggagctggcaacagggatcctggcctttgtcttcaaggactggattcgagaccagctcaacctcttcatcaacaacaacgtcaaggcctaccgggacgacattgacctccagaacctcattgactttgctcaggaatactggtcttgctgcggagcccgaggccccaatgactggaacctcaatatctacttcaactgcactgacttgaaccccagccgggagcgctgcggggtgcccttctcctgctgcgtcagggaccctgcggtgagtggggctgggggaggagagtaaagggactttccagtgcacagactctggagaaacctccccacatgggccccgctccgctctgccctgctctgggggcgtggatgctgggggacgtcattttacatgggtggcactgaggcctgttggggcgcggctgctttccctgttcagcaagacctgtcttttttatcgtagtgagatggaaacagcaggaccctggggcacagggatggggactggcctggaggcctccctgcaccctatacctctacataaacacagccgcagccattgtctgctcctggccagcttgaaggttggccaggctgtcactctcagttatggttgtatgtgacgggggttgcctgggtcattgccagccagcaccccactgggccaccgttgcagggtagcagggagtggggacctctgtccctttacgactttcttcagggcagaaacctctcctgatgatgtttcttcagtcatagtccatctgggatgccaaggaccaggtttctccccattcttataacacaccagcaggcaggattcctgaacggaggcaggtccaggttggcgattgcagccacgcattccagcgtctgggaaagaggcacgtggggccaggtgtggtggctcatgggaggatcatttgagtccaagagtttgagaccagctggggcggcacagtgagacctcgtgtctacaaaa

SEQ ID NO: 49974 - DNA, 1598 bp, Homo sapiens
  misc_feature (1348)..(1348): n is a, c, g, or t
cgaggatcttcaccacggcaggtgtactcttcaaggactggattcgagaccagctcaacctcttcatcaacaacaacgtcaaggcctaccgggacgacattgacctccagaacctcattgactttgctcaggaatactggtcttgctgcggagcccgaggccccaatgactggaacctcaatatctacttcaactgcactgacttgaaccccagccgggagcgctgcggggtgcccttctcctgctgcgtcagggaccctgcggaggatgtcctcaacacccagtgtggctacgacgtccggctcaaactggagctggagcagcagggcttcatccacaccaaaggctgcgtgggccagtttgagaagtggctgcaggacaacctgattgtggtggcgggagtcttcatgggcatcgccctcctccagatctttggcatctgcctggcccagaacctcgtgagtgacatcaaggcagtgaaagccaactggtgaggccgccagaggccatggccacatgcctggcctacacaggcctctggggggccccccaggaccctcctactatactcctgacgggcaaggctgcaggagatgttcctgctgggactgagccttgaggggttcgcctgaaccgctgtgctgtccacccacggaggaagttgctgtgcctccgcctgggcctcttgtcccgtatgcgtgtgtacacacacatgcaggcacacgtgtgcacagggagccaccgtctcggctacatttggggtggtggactctccaggggactaggaagggcgcagctcagagggtgcaggccaagtggggtgggaggtgctgtgtggagggtcccgccccgttccctggccccccagtgctgggacgcaccttttctgtgcgtagctgtatggggcgcgttgcctgagccactgcctcacacagcttcagagcactcttttctatgagctgtaactttgagcctgccaggaacccacctcagcctcagtgtcccagactctgaaatgggtccaagaattttctttctcttgcttgcctctcaggagcaaatggaatgatgactttgaaaaccactggcttacgcccaccatttccgaggtcctgtccacggcggggcctcagcagaactctctgactggggcccctggcccggcccacccagccgacatgttttctttggcctgggtggtttataccctgagccaacctttaaaaattggtagatttcacataaaagtccagatccacagttctcttgaagaatgaccacctggtacgccggtcttcggtggcaacactaccttgggacactgctcccagtcacaagggcccagtgnccgtctctcactagtgcgcctgacccttgtacactaggagctggctcccacctctgcagggttatttcctgcacctcgaggccgctgcgggcaatctggagtgaaacacggggacctgaaggatggagaggctgggacccccgcttttgaaagagggtgcagcctgggaaagggcgggccttgcttggggactgcggttggaagtagagttcccaggaaaaggtctgaaggggttggattgggggtcaag

SEQ ID NO: 49975 - DNA, 468 bp, Homo sapiens
ctggcaacagggatcctggcctttgtcttcaaggactggattcgagaccagctcaacctcttcatcaacaacaacgtcaaggcctaccgggacgacattgacctccagaacctcattgactttgctcaggaatacgtgagtccagtgtccagcctgggacacctgtaggaggcgccttcctggcagacgaatgagggagcaagttccctgtgatgggaccatctccttacccacctgggctagcgggccccaggagagagacccaggagtgtcctcgtccgaggagagccagcccctgctgatccttatgggtccccatttgcctagtgccatagggccacggccttgggaaacagagggcatgggctccacgctagcagctcccaggccagggcctacgacacacgggagaatggaggaaatgtgacataaaatatagatttctacttctgctaaaccttgggccca

SEQ ID NO: 49976 - DNA, 1555 bp, Homo sapiens
  misc_feature (1305)..(1305): n is a, c, g, or t
agcagggctccgggcaaggaggtctggatgctgagggcggtccctgaggggcgggcggggcccgaccggcgctctgtgtggccgaggccatgaagccgcagccgcccggctaggccccgggcggctctagcccagggcggcccgcggggcgctgggcctggctcccggctccggtttccgggccggcgggtggccgctcaccatgcccggcaagcaccagcatttccaggaacctgaggtcggctgctgcgggaaatacttcctgtttggcttcaacattgtcttctgggtgctgggagccctgttcctggctatcggcctctgggcctggggtgagaagggcgttctctcgaacatctcagcgctgacagatctgggaggccttgaccccgtgtggctgtttgtggtagttggaggcgtcatgtcggtgctgggctttgctggctgcattggggccctccgggagaacaccttcctgctcaagtttttctccgtgttcctcggtctcatcttcttcctggagctggcaacagggatcctggcctttgtcttcaaggactggattcgagaccagctcaacctcttcatcaacaacaacgtcaaggcctaccgggacgacattgacctccagaacctcattgactttgctcaggaatactggtcttgctgcggagcccgaggccccaatgactggaacctcaatatctacttcaactgcactgacttgaaccccagccgggagcgctgcggggtgcccttctcctgctgcgtcagggaccctgcggaggatgtcctcaacacccagtgtggctacgacgtccggctcaaactggagctggagcagcagggcttcatccacaccaaaggctgcgtgggccagtttgagaagtggctgcaggacaacctgattgtggtggcgggagtcttcatgggcatcgccctcctccagatctttggcatctgcctggcccagaacctcgtgagtgacatcaaggcagtgaaagccaactggagcaaatggaatgatgactttgaaaaccactggcttacgcccaccatttccgaggtcctgtccacggcggggcctcagcagaactctctgactggggcccctggcccggcccacccagccgacatgttttctttggcctgggtggtttataccctgagccaacctttaaaaattggtagatttcacataaaagtccagatccacagttctcttgaagaatgaccacctggtacgccggtcttcggtggcaacactaccttgggacactgctcccagtcacaagggcccagtgnccgtctctcactagtgcgcctgacccttgtacactaggagctggctcccacctctgcagggttatttcctgcacctcgaggccgctgcgggcaatctggagtgaaacacggggacctgaaggatggagaggctgggacccccgcttttgaaagagggtgcagcctgggaaagggcgggccttgcttggggactgcggttggaagtagagttcccaggaaaaggtctgaaggggttggattgggggtcaag

SEQ ID NO: 49977 - DNA, 1523 bp, Homo sapiens
  misc_feature (1273)..(1273): n is a, c, g, or t
agcagggctccgggcaaggaggtctggatgctgagggcggtccctgaggggcgggcggggcccgaccggcgctctgtgtggccgaggccatgaagccgcagccgcccggctaggccccgggcggctctagcccagggcggcccgcggggcgctgggcctggctcccggctccggtttccgggccggcgggtggccgctcaccatgcccggcaagcaccagcatttccaggaacctgaggtcggctgctgcgggaaatacttcctgtttggcttcaacattgtcttctgggtgctgggagccctgttcctggctatcggcctctgggcctggggtgagaagggcgttctctcgaacatctcagcgctgacagatctgggaggccttgaccccgtgtggctgtttgtggtagttggaggcgtcatgtcggtgctgggctttgctggctgcattggggccctccgggagaacaccttcctgctcaagtttttctccgtgttcctcggtctcatcttcttcctggagctggcaacagggatcctggcctttgtcttcaaggactggattcgagaccagctcaacctcttcatcaacaacaacgtcaaggcctaccgggacgacattgacctccagaacctcattgactttgctcaggaatactggtcttgctgcggagcccgaggccccaatgactggaacctcaatatctacttcaactgcactgacttgaaccccagccgggagcgctgcggggtgcccttctcctgctgcgtcagggaccctgcggaggatgtcctcaacacccagtgtggctacgacgtccggctcaaactggagctggagcagcagggcttcatccacaccaaaggctgcgtgggccagtttgagaagtggctgcaggacaacctgattgtggtggcgggagtcttcatgggcatcgccctcctccagatctttggcatctgcctggcccagaacctcgagcaaatggaatgatgactttgaaaaccactggcttacgcccaccatttccgaggtcctgtccacggcggggcctcagcagaactctctgactggggcccctggcccggcccacccagccgacatgttttctttggcctgggtggtttataccctgagccaacctttaaaaattggtagatttcacataaaagtccagatccacagttctcttgaagaatgaccacctggtacgccggtcttcggtggcaacactaccttgggacactgctcccagtcacaagggcccagtgnccgtctctcactagtgcgcctgacccttgtacactaggagctggctcccacctctgcagggttatttcctgcacctcgaggccgctgcgggcaatctggagtgaaacacggggacctgaaggatggagaggctgggacccccgcttttgaaagagggtgcagcctgggaaagggcgggccttgcttggggactgcggttggaagtagagttcccaggaaaaggtctgaaggggttggattgggggtcaag

SEQ ID NO: 49978 - DNA, 1396 bp, Homo sapiens
  misc_feature (1146)..(1146): n is a, c, g, or t
aggtagaggccggggttaatcggccgagggtgcccttctcctctgcgtcaggaaccctgcggaggatgtcctcaacacccagtgtggctacgacgtccggctcaaactggagctggagcagcagggcttcatccacaccaaaggctgcgtgggccagtttgagaagtggctgcaggacaacctgattgtggtggcgggagtcttcatgggcatcgccctcctccagatctttggcatctgcctggcccagaacctcgtgagtgacatcaaggcagtgaaagccaactggtgaggccgccagaggccatggccacatgcctggcctacacaggcctctggggggccccccaggaccctcctactatactcctgacgggcaaggctgcaggagatgttcctgctgggactgagccttgaggggttcgcctgaaccgctgtgctgtccacccacggaggaagttgctgtgcctccgcctgggcctcttgtcccgtatgcgtgtgtacacacacatgcaggcacacgtgtgcacagggagccaccgtctcggctacatttggggtggtggactctccaggggactaggaagggcgcagctcagagggtgcaggccaagtggggtgggaggtgctgtgtggagggtcccgccccgttccctggccccccagtgctgggacgcaccttttctgtgcgtagctgtatggggcgcgttgcctgagccactgcctcacacagcttcagagcactcttttctatgagctgtaactttgagcctgccaggaacccacctcagcctcagtgtcccagactctgaaatgggtccaagaattttctttctcttgcttgcctctcaggagcaaatggaatgatgactttgaaaaccactggcttacgcccaccatttccgaggtcctgtccacggcggggcctcagcagaactctctgactggggcccctggcccggcccacccagccgacatgttttctttggcctgggtggtttataccctgagccaacctttaaaaattggtagatttcacataaaagtccagatccacagttctcttgaagaatgaccacctggtacgccggtcttcggtggcaacactaccttgggacactgctcccagtcacaagggcccagtgnccgtctctcactagtgcgcctgacccttgtacactaggagctggctcccacctctgcagggttatttcctgcacctcgaggccgctgcgggcaatctggagtgaaacacggggacctgaaggatggagaggctgggacccccgcttttgaaagagggtgcagcctgggaaagggcgggccttgcttggggactgcggttggaagtagagttcccaggaaaaggtctgaaggggttggattgggggtcaag

SEQ ID NO: 49979 - DNA, 5307 bp, Homo sapiens
atgcgctctccagcgcgctctccaggagctttggctcggtgggtactgtcgcggaggcttgtcattctgacccggggattcctcacagcgtctggcagaaatgtcaaatgcaaaagaaagaaaacacgccaagaaaatgagaaaccagcctaccaatgtgactctgtcctctggctttgtggctgacagaggtgtaaagcaccacagtggaggtgaaaaacctttccaagctcaaaaacaagagcctcatcctggaacttcacgacagcggcaaaccagagtcaacccccattctctgcctgaccctgaagtgaatgagcagtcttcctccaaagggatgtttagaaaaaagggaggatggaaagcaggtcccgagggcacgtctcaggagatccccaagtatataactgcttctacttttgctcaagcacgagctgctgaaatcagtgctatgttaaaagctgtgacccagaagtcttcgaattcactggtttttcagactctgccacggcacatgcgacgaagagccatgagccacaacgtcaaacgccttcccagacggttacaggagattgcccagaaagaggcggagaaagccgtacatcagaaaaaagaacattcaaaaaataaatgccataaagctcgaagatgtcacatgaaccggacgctagaatttaaccgtagacaaaagaagaacatttggttagaaactcacatctggcacgccaagcggtttcatatggtcaagaagtggggctactgccttggggagaggccaacagtcaagagccacagagcctgctatcgagccatgacgaaccggtgcctcctgcaggatttatcctattactgttgtttggagttgaaaggcaaagaggaagaaatactaaaggcgctttctggaatgtgtaacatagacacagggctgacgtttgcagcagttcactgcttgtctggaaagcgccaagggagccttgtgctttatcgggtgaataaatatcccagagaaatgcttgggcctgttacgtttatctggaagtcccagaggaccccgggtgacccttctgagagcaggcagctgtggatctggctgcatccaacccttaaacaggatatcttagaggaaataaaagcagcgtgccagtgtgtggaacccatcaaatcagctgtctgcatcgctgacccacttccaacaccatcccaagaaaaaagccaaactgaattgcctgacgagaaaattggcaagaaaagaaaaaggaaagatgatggagaaaatgctaaaccaattaaaaaaattatcggtgatggaactagagatccatgtctaccatactcttggatctctccaaccacaggcattataatcagcgatttgacgatggagatgaacagattccggctgattgggccactttcccactccatcctaactgaagcaataaaagctgcttctgtccacactgtgggagaggacacagaggagacacctcaccgctggtggatagaaacctgtaagaaacctgacagcgtttcccttcattgcagacaagaagccattttcgagttgttgggaggaataacatcaccagcagaaattccggcaggtactattctgggactgacagttggggatcctcgaataaatttgccccaaaagaagtccaaagctttgcccaatccagaaaaatgccaagataatgagaaagttagacagctgcttctggagggtgtgcctgtggaatgtacgcatagctttatctggaaccaagatatctgtaagagtgtcacagagaataaaatctcggatcaggatttaaaccggatgaggagtgaattgctggtgcctgggtcacagcttattttaggtccccatgaatccaagatacctatacttttgattcagcagccaggaaaagtgactggtgaagatcgactaggctggggaagtggctgggatgtcctactcccaaagggctggggcatggctttctggattccatttatttatcgaggtgtgagagtcggagggttgaaagagtctgcagtgcattctcagtataagaggtcgcctaatgtcccaggcgattttccagactgccctgccgggatgctgtttgcggaagagcaagctaagaatcttcttgaaaagtacaaaagacgccctcctgcaaaacggcccaactacgttaagcttggcactctggcacctttctgctgtccctgggagcagttaactcaagactgggagtcaagagtccaggcttacgaagaaccttctgtagcttcatctccaaatggtaaggagagtgacctaagaagatctgaggtgccttgtgctcccatgcctaaaaaaactcatcagccatctgatgaagtgggcacatccatagagcaccccagggaggcagaggaggtaatggatgcagggtgtcaagaatcggcagggcctgagaggatcacagaccaggaggccagtgaaaaccatgttgctgccacagggagtcacctctgcgttctcaggagtagaaaattactgaagcaactgtcagcctggtgtgggcccagttctgaggatagtcggggaggccggcgagctcccggcagaggccagcaaggattgaccagagaggcttgcctgtccatcttgggccacttccccagggccctggtttgggtcagcctgtccctgctcagcaagggcagccccgagcctcacaccatgatctgtgtcccagccaaggaggacttcctccagctccatgaggactggcattactgtgggccccaggaatccaaacacagtgacccattcaggagcaagatcctgaaacagaaagagaagaagaaaagggagaagaggcagaagccaggacgtgcctcttctgatggcccggcgggggaagagcccgtggctgggcaggaagctctgactctagggctgtggtcaggccctctgccgcgtgtgacgttgcactgctccagaactctcctaggctttgtgactcagggagatttttccatggctgttggctgtggagaagccctggggtttgttagcttgacaggcttgctggatatgctgtccagccagcctgcagcgcagaggggcttagtgctactgaggcctcccgcctctctgcagtatcgatttgcgaggattgctattgaggtgtgaatgcgtgcttgtatcccagcagggcatagataatacgttattattgtctgccaagttctacatgtggagaatctgcttctgctttaaaatatcatgtgaaactccctggaaacaagaataaaaaattatgtattatgcagatgatgaaatgtttacatcattccagtaatgtcattgattttcatctttccctgtccttgctgtaatacttttaaattatttggccaaaagctttgtattatgatctcttggtctgtgtagttgtggctgaaaataatgagaagctctacgagttatcatcccctttttttgttagaaacaaagggcttgtcaggtctatttgaaaaacctcatagtcatgtgataagcaacaatagatgtttaatgatttcactgttatagcagaagacaagagaagacgcttggcctctgtacatgaaatatgggctcctgatggacctcattcaattctgtactgtgatttccatgccgaacaactcaagccttaaagagagaaatcatggacaactgatttctgcctgttttcaggcaggcacagtttatggcgtcagtgctaggctggaattagaaagtgggggtctatgacgtggacttcctgactctttgatctctttgttgttgaccaacacttgatcctactagttacttaatttttttaagtaaaaaattattattattttgtttctgcaaagattttctcaaagccatagaggagcatttctcagaatatgttctatgatatgtgtcacctaaaaaagtaagagattccaaggtcaggttgatatggaaactctaggttaaataaagttaagcatttctttatgaaagaacttctggaaacttccatgtgataatgtgcattgcggatctctaggaaggaaatgatagtgtatagtattttctaaatacttgtgattcctaaagttctcttacaaggagccctttgtaggaccagtgttcttagtagcgcgctttgggcagtgtggctgtgtagtgcatagctacctctgcaaggtgataactaagccggcaagctgcctttcaacactcatgcagtcacgttgtccacctgagattctcaacagggtataaaaggaaggtctcatcttgcctcacaggaagagtgggctcagtgtggcttttttccaactatggagaaactcagtgctcatctactttaagtttccacatatggcttgctcatagccttggtccttacctttcctgccataactttctagaagagcttaatgggattttttttctaaaaaatgtaaatatgcagttaggcattattttatgtaaatgcattgggtttttactgtagcatttggcactaaatggctttgggggtgatgaggtggggaaggatacagcaggtggtacagtagtcaggaagtacctgccaccaatgagatgtctgatgctttgcctcttaccatgcctctgaatgtctttggatccaacccagatgagactgaaaaaaaaaaaacagtgtaactaagtggcatctgtaaacagaataaatgaaaatgtcacctgaaaaaaaaaaaaaaaaaagaaacaaaacaaacaacacaacaaaacaaacacaaaaaaacaaacagcaaacccaaaaagagacaagaaagaaactacagcaacgaagaaacaaaaagatagaggcgaaaatgaacagagcacaaaagcacacaaggcacggagacgccagagagagcacgcaacaaagacaatcagacggcgagcgcgcggggagcgagacagaaatagcgcgagaaaggagaaggggcgcagaccacgccaacgtaagacgcataggcatcgaggacacaaaaacacgaggcagacgagaatagcgagctaggagacagggccgaggctggacaacaacctgagccgcaccgacgcccaccaaggaacatgcgctaccacgcgaacgactggacacacggtgagagtcggagacggaggcaatacaccacaacggactggaagagacgacaagaacagtaatatcaagcgaatgcgcacgtcgagccgaccacacgacagacacccggtcaggacgagttaccgaatggagtagaacattcgggagaggagatatgcgg

SEQ ID NO: 49980 - DNA, 5203 bp, Homo sapiens
tggaagctcgggtgaataaatatccagagtaaatgcttgggcctgttacgtttatctggaagtcccagaggaccaccgaggtgagccgttctgagcagcaggcagctgtggatctggctgcatccaacccttaaacagagcctcatcctggaacttcacgacagcggcaaaccagagtcaacccccattctctgcctgaccctgaagtgaatgagcagtcttcctccaaagggatgtttagaaaaaagggaggatggaaagcaggtcccgagggcacgtctcaggagatccccaagtatataactgcttctacttttgctcaagcacgagctgctgaaatcagtgctatgttaaaagctgtgacccagaagtcttcgaattcactggtttttcagactctgccacggcacatgcgacgaagagccatgagccacaacgtcaaacgccttcccagacggttacaggagattgcccagaaagaggcggagaaagccgtacatcagaaaaaagaacattcaaaaaataaatgccataaagctcgaagatgtcacatgaaccggacgctagaatttaaccgtagacaaaagaagaacatttggttagaaactcacatctggcacgccaagcggtttcatatggtcaagaagtggggctactgccttggggagaggccaacagtcaagagccacagagcctgctatcgagccatgacgaaccggtgcctcctgcaggatttatcctattactgttgtttggagttgaaaggcaaagaggaagaaatactaaaggcgctttctggaatgtgtaacatagacacagggctgacgtttgcagcagttcactgcttgtctggaaagcgccaagggagccttgtgctttatcgggtgaataaatatcccagagaaatgcttgggcctgttacgtttatctggaagtcccagaggaccccgggtgacccttctgagagcaggcagctgtggatctggctgcatccaacccttaaacaggatatcttagaggaaataaaagcagcgtgccagtgtgtggaacccatcaaatcagctgtctgcatcgctgacccacttccaacaccatcccaagaaaaaagccaaactgaattgcctgacgagaaaattggcaagaaaagaaaaaggaaagatgatggagaaaatgctaaaccaattaaaaaaattatcggtgatggaactagagatccatgtctaccatactcttggatctctccaaccacaggcattataatcagcgatttgacgatggagatgaacagattccggctgattgggccactttcccactccatcctaactgaagcaataaaagctgcttctgtccacactgtgggagaggacacagaggagacacctcaccgctggtggatagaaacctgtaagaaacctgacagcgtttcccttcattgcagacaagaagccattttcgagttgttgggaggaataacatcaccagcagaaattccggcaggtactattctgggactgacagttggggatcctcgaataaatttgccccaaaagaagtccaaagctttgcccaatccagaaaaatgccaagataatgagaaagttagacagctgcttctggagggtgtgcctgtggaatgtacgcatagctttatctggaaccaagatatctgtaagagtgtcacagagaataaaatctcggatcaggatttaaaccggatgaggagtgaattgctggtgcctgggtcacagcttattttaggtccccatgaatccaagatacctatacttttgattcagcagccaggaaaagtgactggtgaagatcgactaggctggggaagtggctgggatgtcctactcccaaagggctggggcatggctttctggattccatttatttatcgaggtgtgagagtcggagggttgaaagagtctgcagtgcattctcagtataagaggtcgcctaatgtcccaggcgattttccagactgccctgccgggatgctgtttgcggaagagcaagctaagaatcttcttgaaaagtacaaaagacgccctcctgcaaaacggcccaactacgttaagcttggcactctggcacctttctgctgtccctgggagcagttaactcaagactgggagtcaagagtccaggcttacgaagaaccttctgtagcttcatctccaaatggtaaggagagtgacctaagaagatctgaggtgccttgtgctcccatgcctaaaaaaactcatcagccatctgatgaagtgggcacatccatagagcaccccagggaggcagaggaggtaatggatgcagggtgtcaagaatcggcagggcctgagaggatcacagaccaggaggccagtgaaaaccatgttgctgccacagggagtcacctctgcgttctcaggagtagaaaattactgaagcaactgtcagcctggtgtgggcccagttctgaggatagtcggggaggccggcgagctcccggcagaggccagcaaggattgaccagagaggcttgcctgtccatcttgggccacttccccagggccctggtttgggtcagcctgtccctgctcagcaagggcagccccgagcctcacaccatgatctgtgtcccagccaaggaggacttcctccagctccatgaggactggcattactgtgggccccaggaatccaaacacagtgacccattcaggagcaagatcctgaaacagaaagagaagaagaaaagggagaagaggcagaagccaggacgtgcctcttctgatggcccggcgggggaagagcccgtggctgggcaggaagctctgactctagggctgtggtcaggccctctgccgcgtgtgacgttgcactgctccagaactctcctaggctttgtgactcagggagatttttccatggctgttggctgtggagaagccctggggtttgttagcttgacaggcttgctggatatgctgtccagccagcctgcagcgcagaggggcttagtgctactgaggcctcccgcctctctgcagtatcgatttgcgaggattgctattgaggtgtgaatgcgtgcttgtatcccagcagggcatagataatacgttattattgtctgccaagttctacatgtggagaatctgcttctgctttaaaatatcatgtgaaactccctggaaacaagaataaaaaattatgtattatgcagatgatgaaatgtttacatcattccagtaatgtcattgattttcatctttccctgtccttgctgtaatacttttaaattatttggccaaaagctttgtattatgatctcttggtctgtgtagttgtggctgaaaataatgagaagctctacgagttatcatcccctttttttgttagaaacaaagggcttgtcaggtctatttgaaaaacctcatagtcatgtgataagcaacaatagatgtttaatgatttcactgttatagcagaagacaagagaagacgcttggcctctgtacatgaaatatgggctcctgatggacctcattcaattctgtactgtgatttccatgccgaacaactcaagccttaaagagagaaatcatggacaactgatttctgcctgttttcaggcaggcacagtttatggcgtcagtgctaggctggaattagaaagtgggggtctatgacgtggacttcctgactctttgatctctttgttgttgaccaacacttgatcctactagttacttaatttttttaagtaaaaaattattattattttgtttctgcaaagattttctcaaagccatagaggagcatttctcagaatatgttctatgatatgtgtcacctaaaaaagtaagagattccaaggtcaggttgatatggaaactctaggttaaataaagttaagcatttctttatgaaagaacttctggaaacttccatgtgataatgtgcattgcggatctctaggaaggaaatgatagtgtatagtattttctaaatacttgtgattcctaaagttctcttacaaggagccctttgtaggaccagtgttcttagtagcgcgctttgggcagtgtggctgtgtagtgcatagctacctctgcaaggtgataactaagccggcaagctgcctttcaacactcatgcagtcacgttgtccacctgagattctcaacagggtataaaaggaaggtctcatcttgcctcacaggaagagtgggctcagtgtggcttttttccaactatggagaaactcagtgctcatctactttaagtttccacatatggcttgctcatagccttggtccttacctttcctgccataactttctagaagagcttaatgggattttttttctaaaaaatgtaaatatgcagttaggcattattttatgtaaatgcattgggtttttactgtagcatttggcactaaatggctttgggggtgatgaggtggggaaggatacagcaggtggtacagtagtcaggaagtacctgccaccaatgagatgtctgatgctttgcctcttaccatgcctctgaatgtctttggatccaacccagatgagactgaaaaaaaaaaaacagtgtaactaagtggcatctgtaaacagaataaatgaaaatgtcacctgaaaaaaaaaaaaaaaaaagaaacaaaacaaacaacacaacaaaacaaacacaaaaaaacaaacagcaaacccaaaaagagacaagaaagaaactacagcaacgaagaaacaaaaagatagaggcgaaaatgaacagagcacaaaagcacacaaggcacggagacgccagagagagcacgcaacaaagacaatcagacggcgagcgcgcggggagcgagacagaaatagcgcgagaaaggagaaggggcgcagaccacgccaacgtaagacgcataggcatcgaggacacaaaaacacgaggcagacgagaatagcgagctaggagacagggccgaggctggacaacaacctgagccgcaccgacgcccaccaaggaacatgcgctaccacgcgaacgactggacacacggtgagagtcggagacggaggcaatacaccacaacggactggaagagacgacaagaacagtaatatcaagcgaatgcgcacgtcgagccgaccacacgacagacacccggtcaggacgagttaccgaatggagtagaacattcgggagaggagatatgcgg

SEQ ID NO: 49981 - DNA, 4017 bp, Homo sapiens
atgcgctctccagcgcgctctccaggagctttggctcggtgggtactgtcgcggaggcttgtcattctgacccggggattcctcacagcgtctggcagaaatgtcaaatgcaaaagaaagaaaacacgccaagaaaatgagaaaccagcctaccaatgtgactctgtcctctggctttgtggctgacagaggtgtaaagcaccacagtggaggtgaaaaacctttccaagctcaaaaacaagagcctcatcctggaacttcacgacagcggcaaaccagagtcaacccccattctctgcctgaccctgaagtgaatgagcagtcttcctccaaagggatgtttagaaaaaagggaggatggaaagcaggtcccgagggcacgtctcaggagatccccaagtatataactgcttctacttttgctcaagcacgagctgctgaaatcagtgctatgttaaaagctgtgacccagaagtcttcgaattcactggtttttcagactctgccacggcacatgcgacgaagagccatgagccacaacgtcaaacgccttcccagacggttacaggagattgcccagaaagaggcggagaaagccgtacatcagaaaaaagaacattcaaaaaataaatgccataaagctcgaagatgtcacatgaaccggacgctagaatttaaccgtagacaaaagaagaacatttggttagaaactcacatctggcacgccaagcggtttcatatggtcaagaagtggggctactgccttggggagaggccaacagtcaagagccacagagcctgctatcgagccatgacgaaccggtgcctcctgcaggatttatcctattactgttgtttggagttgaaaggcaaagaggaagaaatactaaaggcgctttctggaatgtgtaacatagacacagggctgacgtttgcagcagttcactgcttgtctggaaagcgccaagggagccttgtgctttatcgggtgaataaatatcccagagaaatgcttgggcctgttacgtttatctggaagtcccagaggaccccgggtgacccttctgagagcaggcagctgtggatctggctgcatccaacccttaaacaggatatcttagaggaaataaaagcagcgtgccagtgtgtggaacccatcaaatcagctgtctgcatcgctgacccacttccaacaccatcccaagaaaaaagccaaactgaattgcctgacgagaaaattggcaagaaaagaaaaaggaaagatgatggagaaaatgctaaaccaattaaaaaaattatcggtgatggaactagagatccatgtctaccatactcttggatctctccaaccacaggcattataatcagcgatttgacgatggagatgaacagattccggctgattgggccactttcccactccatcctaactgaagcaataaaagctgcttctgtccacactgtgggagaggacacagaggagacacctcaccgctggtggatagaaacctgtaagaaacctgacagcgtttcccttcattgcagacaagaagccattttcgagttgttgggaggaataacatcaccagcagaaattccggcaggtactattctgggactgacagttggggatcctcgaataaatttgccccaaaagaagtccaaagctttgcccaatccagaaaaatgccaagataatgagaaagttagacagctgcttctggagggtgtgcctgtggaatgtacgcatagctttatctggaaccaagatatctgtaagagtgtcacagagaataaaatctcggatcaggatttaaaccggatgaggagtgaattgctggtgcctgggtcacagcttattttaggtccccatgaatccaagatacctatacttttgattcagcagccaggaaaagtgactggtgaagatcgactaggctggggaagtggctgggatgtcctactcccaaagggctggggcatggctttctggattccatttatttatcgaggtgtgagagtcggagggttgaaagagtctgcagtgcattctcagtataagaggtcgcctaatgtcccaggcgattttccagactgccctgccgggatgctgtttgcggaagagcaagctaagaatcttcttgaaaagtacaaaagacgccctcctgcaaaacggcccaactacgttaagcttggcactctggcacctttctgctgtccctgggagcagttaactcaagactgggagtcaagagtccaggcttacgaagaaccttctgtagcttcatctccaaatggtaaggagagtgacctaagaagatctgaggtgccttgtgctcccatgcctaaaaaaactcatcagccatctgatgaagtgggcacatccatagagcaccccagggaggcagaggaggtaatggatgcagggtgtcaagaatcggcagggcctgagaggatcacagaccaggaggccagtgaaaaccatgttgctgccacagggagtcacctctgcgttctcaggagtagaaaattactgaagcaactgtcagcctggtgtgggcccagttctgaggatagtcggggaggccggcgagctcccggcagaggccagcaaggattgaccagagaggcttgcctgtccatcttgggccacttccccagggccctggtttgggtcagcctgtccctgctcagcaagggcagccccgagcctcacaccatgatctgtgtcccagccaaggaggacttcctccagctccatgaggactggcattactgtgggccccaggaatccaaacacagtgacccattcaggagcaagatcctgaaacagaaagagaagaagaaaagggagaagaggcagaagccaggacgtgcctcttctgatggcccggcgggggaagagcccgtggctgggcaggaagctctgactctagggctgtggtcaggccctctgccgcgtgtgacgttgcactgctccagaactctcctaggctttgtgactcagggagatttttccatggctgttggctgtggagaagccctggggtttgttagcttgacaggcttgctggatatgctgtccagccagcctgcagcgcagaggggcttagtgctactgaggcctcccgcctctctgcagtatcgatttgcgaggattgctattgaggtgtgaatgcgtgcttgtatcccagcagggcatagataatacgttattattgtctgccaagttctacatgtggagaatctgcttctgctttaaaatatcatgtgaaactccctggaaacaagaataaaaaattatgtattatgcagatgatgaaatgtttacatcattccagtaatgtcattgattttcatctttccctgtccttgctgtaatacttttaaattatttggccaaaagctttgtattatgatctcttggtctgtgtagttgtggctgaaaataatgagaagctctacgagttatcatcccctttttttgttagaaacaaagggcttgtcaggtctatttgaaaaacctcatagtcatgtgataagcaacaatagatgtttaatgatttcactgttatagcagaagacaagagaagacgcttggcctctgtacatgaaatatgggctcctgatggacctcattcaattctgtactgtgatttccatgccgaacaactcaagccttaaagagagaaatcatggacaactgatttctgcctgttttcaggcaggcacagtttatggcgtcagtgctaggctggaattagaaagtgggggtctatgacgtggacttcctgactctttgatctctttgttgttgaccaacacttgatcctactagttacttaatttttttaagtaaaaaattattattattttgtttctgcaaagattttctcaaagccatagaggagcatttctcagaatatgttctatgatatgtgtcacctaaaaaagtaagagattccaaggtcaggttgatatggaaactctaggttaaataaagttaagcatttcttt

SEQ ID NO: 49982 - DNA, 2730 bp, Homo sapiens
atgcgctctccagcgcgctctccaggagctttggctcggtgggtactgtcgcggaggcttgtcattctgacccggggattcctcacagcgtctggcagaaatgtcaaatgcaaaagaaagaaaacacgccaagaaaatgagaaaccagcctaccaatgtgactctgtcctctggctttgtggctgacagaggtgtaaagcaccacagtggaggtgaaaaacctttccaagctcaaaaacaagagcctcatcctggaacttcacgacagcggcaaaccagagtcaacccccattctctgcctgaccctgaagtgaatgagcagtcttcctccaaagggatgtttagaaaaaagggaggatggaaagcaggtcccgagggcacgtctcaggagatccccaagtatataactgcttctacttttgctcaagcacgagctgctgaaatcagtgctatgttaaaagctgtgacccagaagtcttcgaattcactggtttttcagactctgccacggcacatgcgacgaagagccatgagccacaacgtcaaacgccttcccagacggttacaggagattgcccagaaagaggcggagaaagccgtacatcagaaaaaagaacattcaaaaaataaatgccataaagctcgaagatgtcacatgaaccggacgctagaatttaaccgtagacaaaagaagaacatttggttagaaactcacatctggcacgccaagcggtttcatatggtcaagaagtggggctactgccttggggagaggccaacagtcaagagccacagagcctgctatcgagccatgacgaaccggtgcctcctgcaggatttatcctattactgttgtttggagttgaaaggcaaagaggaagaaatactaaaggcgctttctggaatgtgtaacatagacacagggctgacgtttgcagcagttcactgcttgtctggaaagcgccaagggagccttgtgctttatcgggtgaataaatatcccagagaaatgcttgggcctgttacgtttatctggaagtcccagaggaccccgggtgacccttctgagagcaggcagctgtggatctggctgcatccaacccttaaacaggatatcttagaggaaataaaagcagcgtgccagtgtgtggaacccatcaaatcagctgtctgcatcgctgacccacttccaacaccatcccaagaaaaaagccaaactgaattgcctgacgagaaaattggcaagaaaagaaaaaggaaagatgatggagaaaatgctaaaccaattaaaaaaattatcggtgatggaactagagatccatgtctaccatactcttggatctctccaaccacaggcattataatcagcgatttgacgatggagatgaacagattccggctgattgggccactttcccactccatcctaactgaagcaataaaagctgcttctgtccacactgtgggagaggacacagaggagacacctcaccgctggtggatagaaacctgtaagaaacctgacagcgtttcccttcattgcagacaagaagccattttcgagttgttgggaggaataacatcaccagcagaaattccggcaggtactattctgggactgacagttggggatcctcgaataaatttgccccaaaagaagtccaaagctttgcccaatccagaaaaatgccaagataatgagaaagttagacagctgcttctggagggtgtgcctgtggaatgtacgcatagctttatctggaaccaagatatctgtaagagtgtcacagagaataaaatctcggatcaggatttaaaccggatgaggagtgaattgctggtgcctgggtcacagcttattttaggtccccatgaatccaagatacctatacttttgattcagcagccaggaaaagtgactggtgaagatcgactaggctggggaagtggctgggatgtcctactcccaaagggctggggcatggctttctggattccatttatttatcgaggtgtgagagtcggagggttgaaagagtctgcagtgcattctcagtataagaggtcgcctaatgtcccaggcgattttccagactgccctgccgggatgctgtttgcggaagagcaagctaagaatcttcttgaaaagtacaaaagacgccctcctgcaaaacggcccaactacgttaagcttggcactctggcacctttctgctgtccctgggagcagttaactcaagactgggagtcaagagtccaggcttacgaagaaccttctgtagcttcatctccaaatggtaaggagagtgacctaagaagatctgaggtgccttgtgctcccatgcctaaaaaaactcatcagccatctgatgaagtgggcacatccatagagcaccccagggaggcagaggaggtaatggatgcagggtgtcaagaatcggcagggcctgagaggatcacagaccaggaggccagtgaaaaccatgttgctgccacagggagtcacctctgcgttctcaggagtagaaaattactgaagcaactgtcagcctggtgtgggcccagttctgaggattgctattgaggtgtgaatgcgtgcttgtatcccagcagggcatagataatacgttattattgtctgccaagttctacatgtggagaatctgcttctgctttaaaatatcatgtgaaactccctggaaacaagaataaaaaattatgtattatgca

SEQ ID NO: 49983 - DNA, 749 bp, Homo sapiens
atgcgctctccagcgcgctctccaggagctttggctcggtgggtactgtcgcggaggcttgtcattctgacccggggattcctcacagcgtctggcaggttggtcgtgaggggctggtgccttccagggtgcgagtgtcgggggaactgtatgcggcggcccccctcccggcgcccgtctcccctcttcatcgtttctctctcagactccgctgacctctttccttgctgcctgtgcccggggcccctctccctggtgtcgcatctccttcggcccctgcgctggagccccctacgtcagtcatttcccttcattgccccgccgggtggaggccgtcctgggaatgggcttgcatcccctcttctgcaaccccaaatgactaatatgggtcattctggcgaccacgctgagatctgggcgttggtcctcccgtgttccctttcctgctcctcctgtgttcccttctctagggtgctcctcgggctttacaaggtcactgtctgaacagagccctagtgattgggatatcatttcagaaagaaagatggtgatctggaatggcccagatcccttgtaagtattctgctgtgtcagaaggggtggtacttggctaaatatttcttatcctgttaatatttgcattgtaagtacgcttcgtttcttcatttatgcgggcactcatagatatatgagtccctactttgtgtaaggcactctgctagatgctaggaggaatgcaacagttaaaa

SEQ ID NO: 49984 - DNA, 5782 bp, Homo sapiens
atgcgctctccagcgcgctctccaggagctttggctcggtgggtactgtcgcggaggcttgtcattctgacccggggattcctcacagcgtctggcaggttggtcgtgaggggctggtgccttccagggtgcgagtgtcgggggaactgtatgcggcggcccccctcccggcgcccgtctcccctcttcatcgtttctctctcagactccgctgacctctttccttgctgcctgtgcccggggcccctctccctggtgtcgcatctccttcggcccctgcgctggagccccctacgtcagtcatttcccttcattgccccgccgggtggaggccgtcctgggaatgggcttgcatcccctcttctgcaaccccaaatgactaatatgggtcattctggcgaccacgctgagatctgggcgttggtcctcccgtgttccctttcctgctcctcctgtgttcccttctctagggtgctcctcgggctttacaaggtcactgtctgaacagagccctagtgattgggatatcatttcagaaagaaagatggtgatctggaatggcccagatcccttaaatgtcaaatgcaaaagaaagaaaacacgccaagaaaatgagaaaccagcctaccaatgtgactctgtcctctggctttgtggctgacagaggtgtaaagcaccacagtggaggtgaaaaacctttccaagctcaaaaacaagagcctcatcctggaacttcacgacagcggcaaaccagagtcaacccccattctctgcctgaccctgaagtgaatgagcagtcttcctccaaagggatgtttagaaaaaagggaggatggaaagcaggtcccgagggcacgtctcaggagatccccaagtatataactgcttctacttttgctcaagcacgagctgctgaaatcagtgctatgttaaaagctgtgacccagaagtcttcgaattcactggtttttcagactctgccacggcacatgcgacgaagagccatgagccacaacgtcaaacgccttcccagacggttacaggagattgcccagaaagaggcggagaaagccgtacatcagaaaaaagaacattcaaaaaataaatgccataaagctcgaagatgtcacatgaaccggacgctagaatttaaccgtagacaaaagaagaacatttggttagaaactcacatctggcacgccaagcggtttcatatggtcaagaagtggggctactgccttggggagaggccaacagtcaagagccacagagcctgctatcgagccatgacgaaccggtgcctcctgcaggatttatcctattactgttgtttggagttgaaaggcaaagaggaagaaatactaaaggcgctttctggaatgtgtaacatagacacagggctgacgtttgcagcagttcactgcttgtctggaaagcgccaagggagccttgtgctttatcgggtgaataaatatcccagagaaatgcttgggcctgttacgtttatctggaagtcccagaggaccccgggtgacccttctgagagcaggcagctgtggatctggctgcatccaacccttaaacaggatatcttagaggaaataaaagcagcgtgccagtgtgtggaacccatcaaatcagctgtctgcatcgctgacccacttccaacaccatcccaagaaaaaagccaaactgaattgcctgacgagaaaattggcaagaaaagaaaaaggaaagatgatggagaaaatgctaaaccaattaaaaaaattatcggtgatggaactagagatccatgtctaccatactcttggatctctccaaccacaggcattataatcagcgatttgacgatggagatgaacagattccggctgattgggccactttcccactccatcctaactgaagcaataaaagctgcttctgtccacactgtgggagaggacacagaggagacacctcaccgctggtggatagaaacctgtaagaaacctgacagcgtttcccttcattgcagacaagaagccattttcgagttgttgggaggaataacatcaccagcagaaattccggcaggtactattctgggactgacagttggggatcctcgaataaatttgccccaaaagaagtccaaagctttgcccaatccagaaaaatgccaagataatgagaaagttagacagctgcttctggagggtgtgcctgtggaatgtacgcatagctttatctggaaccaagatatctgtaagagtgtcacagagaataaaatctcggatcaggatttaaaccggatgaggagtgaattgctggtgcctgggtcacagcttattttaggtccccatgaatccaagatacctatacttttgattcagcagccaggaaaagtgactggtgaagatcgactaggctggggaagtggctgggatgtcctactcccaaagggctggggcatggctttctggattccatttatttatcgaggtgtgagagtcggagggttgaaagagtctgcagtgcattctcagtataagaggtcgcctaatgtcccaggcgattttccagactgccctgccgggatgctgtttgcggaagagcaagctaagaatcttcttgaaaagtacaaaagacgccctcctgcaaaacggcccaactacgttaagcttggcactctggcacctttctgctgtccctgggagcagttaactcaagactgggagtcaagagtccaggcttacgaagaaccttctgtagcttcatctccaaatggtaaggagagtgacctaagaagatctgaggtgccttgtgctcccatgcctaaaaaaactcatcagccatctgatgaagtgggcacatccatagagcaccccagggaggcagaggaggtaatggatgcagggtgtcaagaatcggcagggcctgagaggatcacagaccaggaggccagtgaaaaccatgttgctgccacagggagtcacctctgcgttctcaggagtagaaaattactgaagcaactgtcagcctggtgtgggcccagttctgaggatagtcggggaggccggcgagctcccggcagaggccagcaaggattgaccagagaggcttgcctgtccatcttgggccacttccccagggccctggtttgggtcagcctgtccctgctcagcaagggcagccccgagcctcacaccatgatctgtgtcccagccaaggaggacttcctccagctccatgaggactggcattactgtgggccccaggaatccaaacacagtgacccattcaggagcaagatcctgaaacagaaagagaagaagaaaagggagaagaggcagaagccaggacgtgcctcttctgatggcccggcgggggaagagcccgtggctgggcaggaagctctgactctagggctgtggtcaggccctctgccgcgtgtgacgttgcactgctccagaactctcctaggctttgtgactcagggagatttttccatggctgttggctgtggagaagccctggggtttgttagcttgacaggcttgctggatatgctgtccagccagcctgcagcgcagaggggcttagtgctactgaggcctcccgcctctctgcagtatcgatttgcgaggattgctattgaggtgtgaatgcgtgcttgtatcccagcagggcatagataatacgttattattgtctgccaagttctacatgtggagaatctgcttctgctttaaaatatcatgtgaaactccctggaaacaagaataaaaaattatgtattatgcagatgatgaaatgtttacatcattccagtaatgtcattgattttcatctttccctgtccttgctgtaatacttttaaattatttggccaaaagctttgtattatgatctcttggtctgtgtagttgtggctgaaaataatgagaagctctacgagttatcatcccctttttttgttagaaacaaagggcttgtcaggtctatttgaaaaacctcatagtcatgtgataagcaacaatagatgtttaatgatttcactgttatagcagaagacaagagaagacgcttggcctctgtacatgaaatatgggctcctgatggacctcattcaattctgtactgtgatttccatgccgaacaactcaagccttaaagagagaaatcatggacaactgatttctgcctgttttcaggcaggcacagtttatggcgtcagtgctaggctggaattagaaagtgggggtctatgacgtggacttcctgactctttgatctctttgttgttgaccaacacttgatcctactagttacttaatttttttaagtaaaaaattattattattttgtttctgcaaagattttctcaaagccatagaggagcatttctcagaatatgttctatgatatgtgtcacctaaaaaagtaagagattccaaggtcaggttgatatggaaactctaggttaaataaagttaagcatttctttatgaaagaacttctggaaacttccatgtgataatgtgcattgcggatctctaggaaggaaatgatagtgtatagtattttctaaatacttgtgattcctaaagttctcttacaaggagccctttgtaggaccagtgttcttagtagcgcgctttgggcagtgtggctgtgtagtgcatagctacctctgcaaggtgataactaagccggcaagctgcctttcaacactcatgcagtcacgttgtccacctgagattctcaacagggtataaaaggaaggtctcatcttgcctcacaggaagagtgggctcagtgtggcttttttccaactatggagaaactcagtgctcatctactttaagtttccacatatggcttgctcatagccttggtccttacctttcctgccataactttctagaagagcttaatgggattttttttctaaaaaatgtaaatatgcagttaggcattattttatgtaaatgcattgggtttttactgtagcatttggcactaaatggctttgggggtgatgaggtggggaaggatacagcaggtggtacagtagtcaggaagtacctgccaccaatgagatgtctgatgctttgcctcttaccatgcctctgaatgtctttggatccaacccagatgagactgaaaaaaaaaaaacagtgtaactaagtggcatctgtaaacagaataaatgaaaatgtcacctgaaaaaaaaaaaaaaaaaagaaacaaaacaaacaacacaacaaaacaaacacaaaaaaacaaacagcaaacccaaaaagagacaagaaagaaactacagcaacgaagaaacaaaaagatagaggcgaaaatgaacagagcacaaaagcacacaaggcacggagacgccagagagagcacgcaacaaagacaatcagacggcgagcgcgcggggagcgagacagaaatagcgcgagaaaggagaaggggcgcagaccacgccaacgtaagacgcataggcatcgaggacacaaaaacacgaggcagacgagaatagcgagctaggagacagggccgaggctggacaacaacctgagccgcaccgacgcccaccaaggaacatgcgctaccacgcgaacgactggacacacggtgagagtcggagacggaggcaatacaccacaacggactggaagagacgacaagaacagtaatatcaagcgaatgcgcacgtcgagccgaccacacgacagacacccggtcaggacgagttaccgaatggagtagaacattcgggagaggagatatgcgg

SEQ ID NO: 49985 - DNA, 3789 bp, Homo sapiens
atgcgctctccagcgcgctctccaggagctttggctcggtgggtactgtcgcggaggcttgtcattctgacccggggattcctcacagcgtctggcaggttggtcgtgaggggctggtgccttccagggtgcgagtgtcgggggaactgtatgcggcggcccccctcccggcgcccgtctcccctcttcatcgtttctctctcagactccgctgacctctttccttgctgcctgtgcccggggcccctctccctggtgtcgcatctccttcggcccctgcgctggagccccctacgtcagtcatttcccttcattgccccgccgggtggaggccgtcctgggaatgggcttgcatcccctcttctgcaaccccaaatgactaatatgggtcattctggcgaccacgctgagatctgggcgttggtcctcccgtgttccctttcctgctcctcctgtgttcccttctctagggtgctcctcgggctttacaaggtcactgtctgaacagagccctagtgattgggatatcatttcagaaagaaagatggtgatctggaatggcccagatcccttaaatgtcaaatgcaaaagaaagaaaacacgccaagaaaatgagaaaccagcctaccaatgtgactctgtcctctggctttgtggctgacagaggtgtaaagcaccacagtggaggtgaaaaacctttccaagctcaaaaacaagagcctcatcctggaacttcacgacagcggcaaaccagagtcaacccccattctctgcctgaccctgaagtgaatgagcagtcttcctccaaagggatgtttagaaaaaagggaggatggaaagcaggtcccgagggcacgtctcaggagatccccaagtatataactgcttctacttttgctcaagcacgagctgctgaaatcagtgctatgttaaaagctgtgacccagaagtcttcgaattcactggtttttcagactctgccacggcacatgcgacgaagagccatgagccacaacgtcaaacgccttcccagacggttacaggagattgcccagaaagaggcggagaaagccgtacatcagaaaaaagaacattcaaaaaataaatgccataaagctcgaagatgtcacatgaaccggacgctagaatttaaccgtagacaaaagaagaacatttggttagaaactcacatctggcacgccaagcggtttcatatggtcaagaagtggggctactgccttggggagaggccaacagtcaagagccacagagcctgctatcgagccatgacgaaccggtgcctcctgcaggatttatcctattactgttgtttggagttgaaaggcaaagaggaagaaatactaaaggcgctttctggaatgtgtaacatagacacagggctgacgtttgcagcagttcactgcttgtctggaaagcgccaagggagccttgtgctttatcgggtgaataaatatcccagagaaatgcttgggcctgttacgtttatctggaagtcccagaggaccccgggtgacccttctgagagcaggcagctgtggatctggctgcatccaacccttaaacaggatatcttagaggaaataaaagcagcgtgccagtgtgtggaacccatcaaatcagctgtctgcatcgctgacccacttccaacaccatcccaagaaaaaagccaaactgaattgcctgacgagaaaattggcaagaaaagaaaaaggaaagatgatggagaaaatgctaaaccaattaaaaaaattatcggtgatggaactagagatccatgtctaccatactcttggatctctccaaccacaggcattataatcagcgatttgacgatggagatgaacagattccggctgattgggccactttcccactccatcctaactgaagcaataaaagctgcttctgtccacactgtgggagaggacacagaggagacacctcaccgctggtggatagaaacctgtaagaaacctgacagcgtttcccttcattgcagacaagaagccattttcgagttgttgggaggaataacatcaccagcagaaattccggcaggtactattctgggactgacagttggggatcctcgaataaatttgccccaaaagaagtccaaagctttgcccaatccagaaaaatgccaagataatgagaaagttagacagctgcttctggagggtgtgcctgtggaatgtacgcatagctttatctggaaccaagatatctgtaagagtgtcacagagaataaaatctcggatcaggatttaaaccggatgaggagtgaattgctggtgcctgggtcacagcttattttaggtccccatgaatccaagatacctatacttttgattcagcagccaggaaaagtgactggtgaagatcgactaggctggggaagtggctgggatgtcctactcccaaagggctggggcatggctttctggattccatttatttatcgaggtgtgagagtcggagggttgaaagagtctgcagtgcattctcagtataagaggtcgcctaatgtcccaggcgattttccagactgccctgccgggatgctgtttgcggaagagcaagctaagaatcttcttgaaaagtacaaaagacgccctcctgcaaaacggcccaactacgttaagcttggcactctggcacctttctgctgtccctgggagcagttaactcaagactgggagtcaagagtccaggcttacgaagaaccttctgtagcttcatctccaaatggtaaggagagtgacctaagaagatctgaggtgccttgtgctcccatgcctaaaaaaactcatcagccatctgatgaagtgggcacatccatagagcaccccagggaggcagaggaggtaatggatgcagggtgtcaagaatcggcagggcctgagaggatcacagaccaggaggccagtgaaaaccatgttgctgccacagggagtcacctctgcgttctcaggagtagaaaattactgaagcaactgtcagcctggtgtgggcccagttctgaggatagtcggggaggccggcgagctcccggcagaggccagcaaggattgaccagagaggcttgcctgtccatcttgggccacttccccagggccctggtttgggtcagcctgtccctgctcagcaagggcagccccgagcctcacaccatgatctgtgtcccagccaaggaggacttcctccagctccatgaggactggcattactgtgggccccaggaatccaaacacagtgacccattcaggagcaagatcctgaaacagaaagagaagaagaaaagggagaagaggcagaagccaggacgtgcctcttctgatggcccggcgggggaagagcccgtggctgggcaggaagctctgactctagggctgtggtcaggccctctgccgcgtgtgacgttgcactgctccagaactctcctaggctttgtgactcagggagatttttccatggctgttggctgtggagaagccctggggtttgttagcttgacaggcttgctggatatgctgtccagccagcctgcagcgcagaggggcttagtgctactgaggcctcccgcctctctgcagtatcgatttgcgaggattgctattgaggtgtgaatgcgtgcttgtatcccagcagggcatagataatacgttattattgtctgccaagttctacatgtggagaatctgcttctgctttaaaatatcatgtgaaactccctggaaacaagaataaaaaattatgtattatgca

SEQ ID NO: 49986 - DNA, 486 bp, Homo sapiens
tctgttttcctgaggttcagcaaagctaaataatttgacttaggtcacaagatgataccggcttgactctacccattacactgcatcttccatggcagagagatcatcaactgctgactttgcttcattcattttccacagttgtttattgagcacctttctctgctccaggctctgggatatcacacccaaaatccataaagatctcattgccctacagcaagagattaaaacaagtaatgtaaatatggtgtaataagtgtaaagaatactggaaggagtacagagggttatctgaatcaaagcaaggatgatgtggggcagggaaggcttctcataagatgtgaggcctagcaggggaactgctgggacaaaagtgtggaggcttgagtggtaagacattgaggggcagagagagagaggagggccttctaggtagagggagttacccagaagttgaagttatgggccagcagttctgaatgg

SEQ ID NO: 49987 - DNA, 352 bp, Homo sapiens
aaaaagattagttgggaatttcagaaatgatgcaaatgaggaattattgacatctgtttgcaacaacatggcagagcatttatgcagagaaacattcccagtgcaggaaacacaaagatagatcaagtagctgtgtcaaagcatgactgagcgcatggtaaagtatgaaaaacactgggagaagaaaaaaaaaacacaagaaagtatgattccagaagtataaacaagttcagattgcctgatgaaatgtgaagatcttagattcttagttttaatgggccaggaaggcagagcataggagacaaagtccagggcttgagcacagtgagatgtgacaataggaattattgca

SEQ ID NO: 49988 - DNA, 364 bp, Homo sapiens
caggaaacggctctggccacttctcctggacactcgggggccaccgctctgtcctcttcagaatgcgtggccctgaacctcccagcgcggggcagggttggttcattgccttcactcagcaaatgactgtaacagggggccgggtgcggtggctcacgcctgcaatcccagcactttgggaggctgaagcgggaggatcgcttgagcccaggagttcaagaccagcctgggtaatatagcaagaccctatctctacccaaaaaaaaaatatacacacacacacacacacacacacacacacacacacactagccccaggagttcaagaccagcctgggtaatatagcaagaccctatctctacc

SEQ ID NO: 49989 - DNA, 1729 bp, Homo sapiens
  misc_feature (228)..(228): n is a, c, g, or t
ctgagctctgagcgcctgcggtctcctgtgtgctgctctctgtggggtcctgtagacccagagaggctcagctgcactcgcccggctgggagagctgggtgtggggaacatggccgggcctccgaggctcctgctgctgcccctgcttctggcgctggctcgcggcctgcctggggccctggctgcccaaggtaagagcttcccaggctctccatggccacagctccngagctctccctgccccatgagctcagagcccccagtctgagccacagcacagcccccaggaagcgggtggggtgctgagcggcctccagtgtctgaggactcatttaagagaaggaaaaagggtggacccggtggggagtggccggggctgtccaggcagggccgctgctttgggaggaagaagcccacagtctcggaacacgaggacagcacctcccccaacaccacagccggtgcccagatctgctccatgccccgtaaggcaccgtgtctttggcgacatgtcagccctgggctgtctcagggccccaccatccccaccactgtcccctgcagggaggacattctctgtccttctggccagactgatggtgacagcccaggtcctccccagaggtgcagcagtctccccactgcacgactgtccccgtgggagcctccgtcaacatcacctgctccaccagcgggggcctgcgtgggatctacctgaggcagctcgggccacagccccaagacatcatttactacgaggacggggtggtgcccactacggacagacggttccggggccgcatcgacttctcagggtcccaggacaacctgactatcaccatgcaccgcctgcagctgtcggacactggcacctacacctgccaggccatcacggaggtcaatgtctacggctccggcaccctggtcctggtgacagaggaacagtcccaaggatggcacagatgctcggacgccccaccaagggcctctgccctccctgccccaccgacaggctccgccctccctgacccgcagacagcctctgccctccctgacccgccagcagcctctgccctccctgcggccctggcggtgatctccttcctcctcgggctgggcctgggggtggcgtgtgtgctggcgaggacacagataaagaaactgtgctcgtggcgggataagaattcggcggcatgtgtggtgtacgaggacatgtcgcacagccgctgcaacacgctgtcctcccccaaccagtaccagtgacccagtgggcccctgcacgtcccgcctgtggtccccccagcaccttccctgccccaccatgccccccaccctgccacacccctcaccctgctgtcctcccacggctgcagcagagtttgaagggcccagccgtgcccagctccaagcagacacacaggcagtggccaggccccacggtgcttctcagtggacaatgatgcctcctccgggaagccttccctgcccagcccacgccgccaccgggaggaagcctgactgtcctttggctgcatctcccgaccatggccaaggagggcttttctgtgggatgggcctgggcacgcggccctctcctgtcagtgccggcccacccaccagcaggcccccaacccccaggcagcccggcagaggacgggaggagaccagtcccccacccagccgtaccagaaataaaggcttctgtgcttccttttctgacttctgcatt

SEQ ID NO: 49990 - DNA, 595 bp, Homo sapiens
ctgagctctgagcgcctgcggtctcctgtgtgctgctctctgtggggtcctgtagacccagagaggctcagctgcactcgcccggctgggagagctgggtgtggggaacatggccgggcctccgaggctcctgctgctgcccctgcttctggcgctggctcgcggcctgcctggggccctggctgcccaagaggtgcagcagtctccccactgcacgactgtccccgtgggagcctccgtcaacatcacctgctccaccagcgggggcctgcgtgggatctacctgaggcagctcgggccacagccccaagacatcatttactacgaggacggggtggtgcccactacggacagacggttccggggccgcatcgacttctcagggtcccaggacaacctgactatcaccatgcaccgcctgcagctgtcggacactggcacctacacctgccaggccatcacggaggtcaatgtctacggctccggcaccctggtcctggtgacaggtagggaatgtgcccatcccagacccccctcccaaccccagctgctggccaggctctgctcccccagcccttgtcgtgggaccctccct

SEQ ID NO: 49991 - DNA, 1021 bp, Homo sapiens
ctgagctctgagcgcctgcggtctcctgtgtgctgctctctgtggggtcctgtagacccagagaggctcagctgcactcgcccggctgggagagctgggtgtggggaacatggccgggcctccgaggctcctgctgctgcccctgcttctggcgctggctcgcggcctgcctggggccctggctgcccaagaggtgcagcagtctccccactgcacgactgtccccgtgggagcctccgtcaacatcacctgctccaccagcgggggcctgcgtgggatctacctgaggcagctcgggccacagccccaagacatcatttactacgaggacggggtggtgcccactacggacagacggttccggggccgcatcgacttctcagggtcccaggacaacctgactatcaccatgcaccgcctgcagctgtcggacactggcacctacacctgccaggccatcacggaggtcaatgtctacggctccggcaccctggtcctggtgacagaggaacagtcccaaggatggcacagatgctcggacgccccaccaagggcctctgccctccctgccccaccgacaggctccgccctccctgacccgcagacagcctctgccctccctgacccgccagcagcctctgccctccctgcggccctggcggtgatctccttcctcctcgggctgggcctgggggtggcgtgtgtgctggcgaggacacagataaagaaactgtgctcgtggcgggataagaattcggcggcatgtgtggtgtacgaggacatgtcgcacagccgctgcaacacgctgtcctcccccaaccagtaccagtgacccagtgggcccctgcacgtcccgcctgtggtccccccagcaccttccctgccccaccatggtcttttatgctgcccaaaccgataccttgctggaattacctactgtgggaaaaaaaatttttgttattgccccattccattttccccactcttcgaaaatatgactactatttgtgtttgtgcgcaa

SEQ ID NO: 49992 - DNA, 1271 bp, Homo sapiens
ctgagctctgagcgcctgcggtctcctgtgtgctgctctctgtggggtcctgtagacccagagaggctcagctgcactcgcccggctgggagagctgggtgtggggaacatggccgggcctccgaggctcctgctgctgcccctgcttctggcgctggctcgcggcctgcctggggccctggctgcccaagaggtgcagcagtctccccactgcacgactgtccccgtgggagcctccgtcaacatcacctgctccaccagcgggggcctgcgtgggatctacctgaggcagctcgggccacagccccaagacatcatttactacgaggacggggtggtgcccactacggacagacggttccggggccgcatcgacttctcagggtcccaggacaacctgactatcaccatgcaccgcctgcagctgtcggacactggcacctacacctgccaggccatcacggaggtcaatgtctacggctccggcaccctggtcctggtgacagaggaacagtcccaaggatggcacagatgctcggacgccccaccaagggcctctgccctccctgccccaccgacagcctctgccctccctgacccgccagcagcctctgccctccctgcggccctggcggtgatctccttcctcctcgggctgggcctgggggtggcgtgtgtgctggcgaggacacagataaagaaactgtgctcgtggcgggataagaattcggcggcatgtgtggtgtacgaggacatgtcgcacagccgctgcaacacgctgtcctcccccaaccagtaccagtgacccagtgggcccctgcacgtcccgcctgtggtccccccagcaccttccctgccccaccatgccccccaccctgccacacccctcaccctgctgtcctcccacggctgcagcagagtttgaagggcccagccgtgcccagctccaagcagacacacaggcagtggccaggccccacggtgcttctcagtggacaatgatgcctcctccgggaagccttccctgcccagcccacgccgccaccgggaggaagcctgactgtcctttggctgcatctcccgaccatggccaaggagggcttttctgtgggatgggcctgggcacgcggccctctcctgtcagtgccggcccacccaccagcaggcccccaacccccaggcagcccggcagaggacgggaggagaccagtcccccacccagccgtaccagaaataaaggcttctgtgcttccttttctgacttctgcatt

SEQ ID NO: 49993 - DNA, 833 bp, Homo sapiens
tgggggtccgcttggcttgggcttggtgggggggtccaagccacttccactctccttcttcagaggcaccccagggtccgacccagccctgcctggggaaggctctgctgggaagccctggggctcaggagacctgggggccagcccagaggagccccgtgggggtctcgtgttaaaattagaaagctgaccggagtggggtggggtccaggacacacgctggccactggttggagacggcggttctgtctttcagataaagaaactgtgctcgtggcgggataagaattcggcggcatgtgtggtgtacgaggacatgtcgcacagccgctgcaacacgctgtcctcccccaaccagtaccagtgacccagtgggcccctgcacgtcccgcctgtggtccccccagcaccttccctgccccaccatgccccccaccctgccacacccctcaccctgctgtcctcccacggctgcagcagagtttgaagggcccagccgtgcccagctccaagcagacacacaggcagtggccaggccccacggtgcttctcagtggacaatgatgcctcctccgggaagccttccctgcccagcccacgccgccaccgggaggaagcctgactgtcctttggctgcatctcccgaccatggccaaggagggcttttctgtgggatgggcctgggcacgcggccctctcctgtcagtgccggcccacccaccagcaggcccccaacccccaggcagcccggcagaggacgggaggagaccagtcccccacccagccgtaccagaaataaaggcttctgtgcttccttttctgacttctgcatt

SEQ ID NO: 49994 - DNA, 1298 bp, Homo sapiens
ctgagctctgagcgcctgcggtctcctgtgtgctgctctctgtggggtcctgtagacccagagaggctcagctgcactcgcccggctgggagagctgggtgtggggaacatggccgggcctccgaggctcctgctgctgcccctgcttctggcgctggctcgcggcctgcctggggccctggctgcccaagaggtgcagcagtctccccactgcacgactgtccccgtgggagcctccgtcaacatcacctgctccaccagcgggggcctgcgtgggatctacctgaggcagctcgggccacagccccaagacatcatttactacgaggacggggtggtgcccactacggacagacggttccggggccgcatcgacttctcagggtcccaggacaacctgactatcaccatgcaccgcctgcagctgtcggacactggcacctacacctgccaggccatcacggaggtcaatgtctacggctccggcaccctggtcctggtgacagaggaacagtcccaaggatggcacagatgctcggacgccccaccaagggcctctgccctccctgccccaccgacaggctccgccctccctgacccgcagacagcctctgccctccctgacccgccagcagcctctgccctccctgcggccctggcggtgatctccttcctcctcgggctgggcctgggggtggcgtgtgtgctggcgaggacacagataaagaaactgtgctcgtggcgggataagaattcggcggcatgtgtggtgtacgaggacatgtcgcacagccgctgcaacacgctgtcctcccccaaccagtaccagtgacccagtgggcccctgcacgtcccgcctgtggtccccccagcaccttccctgccccaccatgccccccaccctgccacacccctcaccctgctgtcctcccacggctgcagcagagtttgaagggcccagccgtgcccagctccaagcagacacacaggcagtggccaggccccacggtgcttctcagtggacaatgatgcctcctccgggaagccttccctgcccagcccacgccgccaccgggaggaagcctgactgtcctttggctgcatctcccgaccatggccaaggagggcttttctgtgggatgggcctgggcacgcggccctctcctgtcagtgccggcccacccaccagcaggcccccaacccccaggcagcccggcagaggacgggaggagaccagtcccccacccagccgtaccagaaataaaggcttctgtgcttccttttctgacttctgcatt

SEQ ID NO: 49995 - DNA, 914 bp, Homo sapiens
ctgagctctgagcgcctgcggtctcctgtgtgctgctctctgtggggtcctgtagacccagagaggctcagctgcactcgcccggctgggagagctgggtgtggggaacatggccgggcctccgaggctcctgctgctgcccctgcttctggcgctggctcgcggcctgcctggggccctggctgcccaagaggtgcagcagtctccccactgcacgactgtccccgtgggagcctccgtcaacatcacctgctccaccagcgggggcctgcgtgggatctacctgaggcagctcgggccacagccccaagacatcatttactacgaggacggggtggtgcccactacggacagacggttccggggccgcatcgacttctcagggtcccaggacaacctgactatcaccatgcaccgcctgcagctgtcggacactggcacctacacctgccaggccatcacggaggtcaatgtctacggctccggcaccctggtcctggtgacagaggaacagtcccaaggatggcacagatgctcggacgccccaccaagggcctctgccctccctgccccaccgacaggctccgccctccctgacccgcagacagcctctgccctccctgacccgccagcagcctctgccctccctgcggccctggcggtgatctccttcctcctcgggctgggcctgggggtggcgtgtgtgctggcgaggacacagatcacgaactgtgctcgtggcggatacgatcggccgctgtgtgtgtcacggctgtcccggcgtggcaccgctgtctccccaccgtccgtgacctgccctccgcccctgcttccccccccccccccctcccccccccccccccccccccccccccccccccccccccccccccccgcccccccccccccccccc

SEQ ID NO: 49996 - DNA, 915 bp, Homo sapiens
ctgagctctgagcgcctgcggtctcctgtgtgctgctctctgtggggtcctgtagacccagagaggctcagctgcactcgcccggctgggagagctgggtgtggggaacatggccgggcctccgaggctcctgctgctgcccctgcttctggcgctggctcgcggcctgcctggggccctggctgcccaagactgatggtgacagcccaggtcctccccagaggtgcagcagtctccccactgcacgactgtccccgtgggagcctccgtcaacatcacctgctccaccagcgggggcctgcgtgggatctacctgaggcagctcgggccacagccccaagacatcatttactacgaggacggggtggtgcccactacggacagacggttccggggccgcatcgacttctcagggtcccaggacaacctgactatcaccatgcaccgcctgcagctgtcggacactggcacctacacctgccaggccatcacggaggtcaatgtctacggctccggcaccctggtcctggtgacagaggaacagtcccaaggatggcacagatgctcggacgccccaccaagggcctctgccctccctgccccaccgacaggctccgccctccctgacccgcagacagcctctgccctccctgacccgccagcagcctctgccctccctgcggccctggcggtgatctccttcctcctcgggctgggcctgggggtggcgtgtgtgctggcgaggacacaggtcagtgtgagccccagctgccacctgcaccccaaagattgttccctctcctgagagcagcgtggggcgccaaagccccagaggaaaaccctggtacccgccgcctcctctgcaggctctggaactctcagggtggaagtggcctcggcggggagggaggggga

SEQ ID NO: 49997 - DNA, 434 bp, Homo sapiens
ctgtcctctgtcccacacttacatcatctagctgcctcagagaaggccactaaattgctgttattgatgacaaaagctacattcagtcttagtacaggtagcgtgttcagatagtaagcttcatcagctgccatgctgtcagagaaccacatgagacagctcagcattcaccgtgagctgaacttcattcaggcttcttcaagccagcttagccaggaggcgaatgtgagatgagtttctcatgtactgagagtttttgtgtgttaaaaattatagcatgatgcaaacaaaaaatgcattgacttattttcatgactggatgtcgttgtgctttgagggtaatgggcaggcattgctttctcttattgctgttggattaaaaggtgccggctacagtattgacttgataatctcaccaggtattcgtgcagagc

SEQ ID NO: 49998 - DNA, 604 bp, Homo sapiens
ccttatttgcattccacaccccttttcttagagtcagatttcctaattaattctcaacaaattgtactaaaattgaaatttctcactcaggaatatttaaatgcactcacgaccttttcaattttcacaatctaaaagaaattgatgtgctagacattttaaataagccaattaggctttaatgtcacgtatcactaatgcaattatatggaagatttgcttcattgtgcctaatgagaacaaacacctttacagtatcaacacagatatttaagaactaggctaacccaaatgtcttaggcagctacaaatttttttctcagaaaactacagtcacacgttgcttactgacaggaatatgttctgagaaatttgttaggcgattctgttgttgtgtaaacattctagtgtattcacgaacctaaactgtatagcctattgctccctaggctacaaacctgaggagcatgttattgaagtgaataacagtaggcaactgtaacacaatgggaagtgtttgttcatctaaacaaaaggcatggcaaaaatatggtataaaagataaaaaccgccaggcacagtggctcacacctgtaatcccagc

SEQ ID NO: 49999 - DNA, 347 bp, Homo sapiens
taataatctgttttctcttttgaaaatgtttcagtgtggataagttatcacaccacataatcaaaagcctaattgcagaggtgctgtgaaatggtcgatgtgccttattttctgctagagatgtcacagactagctttagttctagaaagtgaaacaggtaagtttgaggggctttgatcctcggaacctaagcatatgtcaagaagtcataaaggcaacctagaaaggctttgatgtcaatctgctatgtatgtttatagatgatctgtgttgcagtttgtttctgcagtttgttgcagtttgtagtctgtgtcacagctctgaatttattttcttctcagcactg

SEQ ID NO: 50000 - DNA, 581 bp, Homo sapiens
ctctacaaaaaatacaaaaattagccgggcatggtggcatgtgtctgtagtctcagctacttggaaggctgaggtgagaggatcgcttgtgcctgggaggcagaggttgcagtgagccgagatggcactactgtactccagctgggtgacagagtgagaccctgtctcaaaaaaaaaggtccattgactaaataagaagttagtcttaaaactagattatttagttaaaggagcaaatataatttggggaaggagaggaggagtaaaagcaaaagtatttaatctgtcttggaaaaaaaaaagaaaaaattacattggtcctttttgtatgtgtatttggaactaaagtcgtaatacttcattactggttctaaaataaaccaggtagccagcacagaattttggctgtgggatctttatgaaacagcaaaagtaaactagattattcaatgagtataggaaaatttagtaacgggctagttccgttaagatttgcacagttaagatagagttaatacaggtaggcacacagacttctaaaaggacatagctgttcctgtatacaccagtgagaagaaacc

SEQ ID NO: 50001 - DNA, 993 bp, Homo sapiens
  misc_feature (950)..(950): n is a, c, g, or t
  misc_feature (953)..(953): n is a, c, g, or t
tcctcttgacattagtattcagtagatcttgagtgggccattttaaaactgactttaaaagatgcaccccaggtaattttgatgcaggtcatcaacaaaccacaattggaataacattgccctacaggataaagtccaaagtttttggtatggcttaggattttgccgcttcctcctctctagcctcattttccatgagtctgtaccacccatcctatgcttcagaaatgctaagtcactttgagttctaacatgttgttctcacgtctttatacccttgtatatgttggttcctctgcctaaaacacccttctcctttctcttacatattcactcttcaggtctccactgaagcatcaccactttcctatcttctcaaactgagttaaactacgctcacttaacatacctcttttatagcacttaacagagtgtttcatcattgttggtttccttttctgttccctactagattatatgttccttgaggacagaggttgtcatgttcatctctgttcctccagtgtctggcatggtgaatgttccaatgaaatcaaagcttctcttgtgtctttggaacattgagcactctagacccatggaaatggctctgatagcactctgctgtcctgtatctgagcatgttcatgtggttttaagtttagagggctgacccaagatggtgcccagcctataagaaaatgtctgggggcacctcatttgatgtgtatggttagtggaaattaagctgtattggggaattggagaataaggttcatcaacatcagcatttagagaatggagagtggttttagagtgtgaattctttaagaaatgttgtaggacctaagttttttttggaaagtctctgagtaagtttcttaagttttttttttctttgagatggagttcactcgtcactcaggctggagagcagtgagccaagatantcngcccctgcactccagcctgggcgacagtgagactccatct

SEQ ID NO: 50002 - DNA, 364 bp, Homo sapiens
atctgcccgcctcggcctcccaaagtgctgggattataggcatgagccactgtgcctggtcttagtgaatcttttctggtagtttatgaattgatgtaataccagatggtctgttataaccaaagttgaaacacccgataaatgtcatgagagagatagctttattgtttagggagcatatggacatgaaactaactcctgtgtgttgttaaaaaagctttgctaccttttctaaacaaattttacagaaaaaaatcttacaggccaggtgtgattgttcgtgcctgtaatcctagcactttgggaggctgaggcaggcaagcccaggagtttgagaccaggagatagcaagacctgtctctac

SEQ ID NO: 50003 - DNA, 898 bp, Homo sapiens
tcatctgataaaggttttgtgctgcttcaactcatggaggaaactggaagggaaaggggcttgtgcagagagagaggggaccgaggaggctgacttgctttataacaacccactgtcatggtaactaatccagtcctgttagagtgagaactcactcccgtgagatggcattaatcaatttataagagatctggccccatgacccaaacaactcccattaggccccactttccaatactgtcatgctggcagttaaacttcaacatgaagactatactttcagagatcacttctgtagtttattattagaaagtttctctgaatgtgtagaacactggaaaaaatgatctaagactactgtgaatatgtctgtgcacacaaactagaaagtctagaggaaatggataaattcctagaaacacacaatcccacaaatttgaatcaggaagaaacagaaatcctgaatggaccaagtaataagtagtgagattgaatcagtaataaaaaatctcccaatgacaacaacaacaacaacgaatgcccaggaccagatggattcacagctgaattttaccagacatggaaagaagaactgatgccaattctactgaaactattctaaaagatggagaaagagggaatcctccctaattctttctatgaacccggtatcaccctaataccaaagccaggaaaagacacaacaaacaaggaaaactgcagaccaatattcctaatgaacataggtgcaaaaatcctcaacaaaattctagcaaaccagattcagcagtatatcaacaagataattcagcatcaagtgggtttcataccaggaatgcaaggatgatttgacatatgcaaatcaacaaatgtgattcaccacataaatataattaaa

SEQ ID NO: 50004 - DNA, 463 bp, Homo sapiens
caatgggctgcaaattgctctccaccccttctgattcctgagctgggtgtggcagcagattgttttttctcataaagaaataaaataaaataatgcattacctcttttagttatggacttctgccagaaattcagtgcacccaaccctcgcagttatgttacatttactcacttgatttagactcgaaggaaatgtttcctccttaagcaggtagcaggctgcgtgtggatttcttaatgaaacagttgttgtcatctttatgttttaaaaggaagccccaggtctctaaggaaattttcacatcagcaaaccaacttataagaatgttcattcatgtttgccaaccattgtgggaaaggagatgggatgacactcccagaccaccttccatctgcctaggtttgaataataggtgactatatttggaaaattacatgtatgtagtaaaaaacaaaaaaaata

SEQ ID NO: 50005 - DNA, 434 bp, Homo sapiens
taacctacacacatcctccattaaaaaccatctctagattacttataagagcgaatacaatgcctacacatcgcttcattatgattcaacatagtacttggcttgctgcaaattcaagttttgctttttggaactttgtagaatttttttcttaatatttttgaaattatgcagaaaacagaggtttcttctccacaacacccttctggtttccggtgagcctaactgtggctgaagatataaatgttcacactgcaagcaaactctgagcaccatccaccatcccaaagagctctccacatcgcctctcctcaaaaccaagcagctgccaggtccctgtgtggagatcctaggagaggagcttggagcctctgtatagctcaacctgaaaactaaaatgcgggattaaaactacaaactgacttgattctttt

SEQ ID NO: 50006 - DNA, 321 bp, Homo sapiens
ggggagaggtggggtggcctctttttcttcttttttaatgtataaagaaaaaagggcaaatagaacaaaaggaggaaagaaattagcaaaggagcattattgaaaatgatcaatcaaaagttacagacacgctataaagtctgagtattttaagataaagcaaaaaataaattaacatgattaacttctttgaacatcttgcctttagcctacacccttaaaattttaagatatcccataaaaagaaaccagttagaaacaacattttaaaggtagaagtagagcaattatgattaataatgaaaaatgcatatgcctatc

SEQ ID NO: 50007 - DNA, 374 bp, Homo sapiens
gttaaattcaccaggaagataaaagaattctaaatttgcatgtacctagtaatattgtcttaaaatacataaagcaaaaatcaacaactctataagactaaatagctaaacgaaaaatagtgggaaattttaacatacttttcaacagaaactgataaaatagttagacaaataattagtaaggatatagaagatttgaacaacttaatctatggacatatatggtcacagtgacatgatgaagctggcttgtatcctctcatgagaaacaatttttaaaatttcaagacttttgtgaaccagctgatatcgcgctagtagcttgacattgaccactatgggaatatttatataatagtatgataggcaaatgc

SEQ ID NO: 50008 - DNA, 1116 bp, Homo sapiens
aaggtacattagaattcagtgttttgaaataagatctatcttatttaataatttattcttagagtaaaagattttgtttgaactcattcttcttcactgactgtgacccctctagtcactgggaccacaagattttttgttttcaacagatgtcttttgttttaaaataataggcatggcaatataaatacataatgaaaaaagttttttaacagcattttttaaaataattgaaaccataatttaatgatttatatcagttacattcattatatagatttcttagttctggttagataattttaagtgaattcagttacagttccatgaatgtggataggaatttcctcatctacctaaatagaaggatgagggagttttagaaagctatatttttacttttgatggatatatacaaaagaatgggatcctcatgtgtttggtttttctaatccatgcgtcttgaacactttttccttctgcttgttcttagtgggcttggtcatgagagcacagttgtttttaagagtaataagacaaaaaataaaggaacaagactaacacaggattatacttttccctagcagagaataacactgagctaaacagattattagtactgaattgtccatttcacagctgggaaatcccagcaaatgaagcgtttaatgagaaatagaaacataatgcactttatttatatcaccagttccttagttcttaaacaaaaattaaaaagagggctgcatcttatgtggaattgagggctagtggcaaatagttttctcttaaatgttgttaatataaaccctgattaacgttttccatgtcataacccatgtgtccaaaatatattctaggccgggcgtggtggctcacgcctgtaatcccagcattttgggaggctgaggcaggtagatcacttgaggccaggagttcgagaccagcctgggcaacatggcaaaacccggtttctactaaaaatacaaaagttagccgggtgtggtggcacgtgcctgtagtcccagctgagggaggaggatctcttgagctcaggaagtagaggctgcagtaagccaagatcctgccactgtactccagccagggtgagaccct

SEQ ID NO: 50009 - DNA, 363 bp, Homo sapiens
aattgagggttgaagacttggtagggactagtgcagcatgggatagtggtattcactgcagagaagtgtctgccagcaggaggctggcaagacactgtcaaatttcatgagggagcaccaatgctgttaggagttgggtcctttgctgataggacctgcagggcatctaccttcatgtctacaaaaaagttactagtgaccaggcacaaggggacagtaaccttaccagcctcattgctaagaagtggttagcacatgtcttccccccgctcttcctggcctcttccaccaccagtcaagctggtgcaggagttggcagggacagcacatcttggaggcactatggaggttcaggggagcttt

SEQ ID NO: 50010 - DNA, 3757 bp, Homo sapiens
  misc_feature (830)..(830): n is a, c, g, or t
  misc_feature (3746)..(3746): n is a, c, g, or t
agattagtagatttctgcatacttccagcttctttcccccaggagatgcagccttttcatccaataatttttaaagtcttttccaagggcatttaatttccctgacttaaaaagagagtcagatggttacaatgacctttctgttatgacagaaatagtgaaagggacagtagtaaaagcacaagctatattattttcctcttctgaactctcaacgctttctctttcctgtgtcacttatcacttttgccttgtattctaagaattgctatacttctctccctgttagcttacagagttcttaagagcagaactgtcttgctcattttgtttcttcttctaactctatctcagggccttgtagacaggaggtacctggttgtagcctttttaaaggtcgtgtcatgagaggactctctcacattgggacatgttgtctctggttttagaaattaggagaaaagaaagtatcaaacaactgacctctaagttttacctggtctgttggcttcataattttaaccatatacccaaagcgttctcttatatccttcacttacgggtgatatttcttttgcatagtgggccacattgaaaagtgagagatctataaaggctgagtcctgtaggttggcagcttagctgtccagtatttaggaaatgagactgcaggattcacggacatccttgttatcttccataaggaaattatgaagggagaaattgccagaaggtcccagaagaatttttttcattcagtgtgggagatctttggtctatttgtttttctatttagaagtttaaactgtttatggacagtacttattaancccgttgaagatacgaaacttgatggaattatactgaaaagttaaaacatgttttctgcccttaaaaaatggacttttgatagagattaaactgctggaatttacatatctacaaagaatattctaaatacataatatatttatatatatggtacctgagaggaggaagaaatggattcatttggatgggatctggggttcatagcaggccagtttgggaaaagtatttttggaagaagttactcttgaggtaagagttcagaggaatattgtatggagagtggctgctgaaggaaaagacacagctagatctttcactgagttacacaatctaaggggctttcctgaagtgtgatggtttgagggaatcctttaaaagctctttggcttttgttaatcttatgcttgaagcctgagcaattctgatgctatggattgctctcttagaatcttttactccagagaaccccttctaatttgatatgggtaaagctaacaatgaagataaattttgagatgggataatactgcttggtttaaagaaggaatagttgatggcaactgcattctgttttctgcagcccccagcagctaggggaagagcatagcgaaattgctgagtttagtgagtacataggaaatgcaagtcttaagcagagtatccccccctaaatttggggtaacctctcatactgagatataaagaagaatcaatataaaatggataagattagctatctactgagtaatctatccaacagtttataaatacattgctcatgaaactagattacaaatctcaagggcctgggccagtagctcaatgaaggaaattatagcctctgaaatattttgtccagattagagccacggaattttgaagtgactttatcagtctaaggctatatcaagccactctcttttacttatgtggaaattggggtccataaggataaaataactctacatagacaaacaattgtggaatttggcaccagagcccaggactctgaccttccggtccagtattcttccatcatgtcagattgccttgccacgtgttacacctgttggaagttttctgggcagtaggcaagattgagaccaatttgtgagcagtatagagacctaacttaaaatataggaaaatggttcaaagctagagcgtctgccccaagtactgcctcttttcttattccacattcctttcttgccacttttagtcttgtacacctctagactcttacaagcaattaaagaaaaacttttatgtaattaattaatgatgtgtgaggaaatgtactaacagaggaacagagttgtatagaatccaaaaaaagaaaaaccaaggagtaactatttattaatttatctagcacaatgccaaaacagtgatacagtagaacaagatgaatatctagcttgcacaatgtatgtaaactaccccctgaagctatttgccgatttttgcccttttcctgtgtttaacaagtagcactctcaatatttattcagcttcccaggaaaaagcagccgaagatattttggtaactggactagacttcaccttgtaaactaataaattggcattttaatttcgaaattagtctcttataatttttagttaacatcagccagtcttctaaactctgaacatccctaaatgaactaataaaaactgagttagagactctggacctttggtgacccccgcaatgtatagagtccccaggaggtgctacctgaacagccatgcagggtctttcaattcatgtatctatttccctcccccaacatgtcttatcaaaaacactgaatgctgggggctcctctaacaccatcttagaatgtcaagctgcagtttgtttgttttttttctttttgagacagagtctcgctctgttgcccaagctggagtgcagtggtgtgatcattgcttactgcagacttgatgttccaggctcaagtgatcctcccacctcagcctcccgagtagctgggacaataggcatgtaccaccatgcctagctgatgtttttgttatttttagtagatcctgggtctcactgtttttcccaggctggtcttgaactcctggcctcaagcgatcctcctgcctcagcctcccaaaatgctgggattacacacctgaggcactgcaaccagcctcacactggatttaaaagcacatcacagactattatttggagagtgcttatttgatgctgtgtcttttgttcagtaccgtaagtggactcaaccatacaacccatttcatccaacctaacatgtacagaaaaatcttcccttcaattctggggctttgcacagctggagaagcctttggacagtaaatgggagatgtggaagttctagcttggaaaggatctctccaagcgctcgtaactcataactttcttttctttaacttatcagccagagaaggagggaaatattgatgccctattaccgctctgttttcttacagccgtttttggaaattttgtgtcagaggacttcccagagttttgttcctctgatcttgagagccctaatacctctgggtctgaggactggttctagctgtacttaccttgtcagaaccacctgggaggaccagcagtattacagcccctctctcctgaaactgcttctgaggtctcaaagcctgaatcaaatgaccattgtactagccttgtattggggctcagaatgtcagttttcagcttgtcctcatatataaatataggtctctctagatataaaaagtgagaaagtctgtaagttgcattttttttctataccccctttcataggacacgctaatgagatgcatatcattaaaagcctgatgttttgtgggacggagccttttaaactggatgtgcctggcttagttatggcaaatatttaccnaaaaaaaaaaa

SEQ ID NO: 50011 - DNA, 295 bp, Homo sapiens
caaaacaaaacaaaaacaaacaaaaaaccaaataatatattctactttaaagagcattttactttctttcgatataggagaatatcgataattatgtattatatacagctggaaattaaaagatcaggaacaaatctaatatttgacatcattggacttatttgtgtattttgaattaaggtcatttgtggtcaaaattagttaaaaggattgtttatttagtcatgttcatgtcatagatttctacaaagagattatatagtattttatagcttgaaatgtttctcaaatatat

SEQ ID NO: 50012 - DNA, 885 bp, Homo sapiens
ttaaataacccacttttttggtgatgcaagaacaacaggcatcttttaaggacatggcagtcctgcattttaaccactgccctcactccatttcctaagcttcactacaagaacatctgccctataatctctaattcacaaaaatctttctctatttgtttttttgactcaaccaggagcttgaagctaagatgatgctcctcttagcactgtttagacttatttaccaattcagctttaaatcttatattgcctgaatgatgaaagtataggagagaaaagagaaggaagccatttctgcctgttctgggacttagaaattcttagataaaaggggctgaataactacaaggaactgagtccctggaaagaatgctgatatagaatctcacaattcaagctaatctggactttatggggcagggaggaaggtaatccattccaaataccaaatttatacctgaagtatgatgcaaggactggaaggaaagatcagaaaaaaaggtgtatggtgtgttaaccaggattgtctcaggttgcctgtattttctcatagtcatacacagcatgtagagcttttataataacaaacaaaactttagaaggataaaaggggatgaggagtgaagaaaattgggctcaagggtctgaaatccctaaattctgtaggctaaactagaacccattctttgtgcagcctgctctgttacagatatccagggtccccatttctggatttgttgataaaataacctttctgttgccaagaggaaacttgactgaatattcctgagaaaagttcctcattaatgtgactacaaattacaacgtttccacaacctgatggcctttggcaagattgtgaaactacacccctaggcaggg

SEQ ID NO: 50013 - DNA, 722 bp, Homo sapiens
tggatccagtgtatgctgcttgggtgatgggtgcgccaaaatctcagaaaccaccactaaagaacttattcatgtaaccaaggaccacctgttaccccaaaagctattgaaattttttaaaaaagaaaattggaatagtatactttcatttcctctctcccagccagatacttctgggatttgtaggattatagttttctttacatttaggaaagttttgggccattctttttttatttttctgtctctctttttccctctttggggacttattcctccttgaagttttctcataggttcactgatgtctcaaatttatgaatcttctctttgggtgatgtctaatctgtgttcacttcccatccattttagctttcattcctgacattgtaatttgaatctctacaagtgtagtttgctttaaagaaaaatcttccggccgggcgcggtggctcaagcctgtaatcccagcactttgggaggccgaggtgggcggatcacgaggtcaggagatcgagaccatcctggctaacacggtgaaacaccatctctactaaaaatacaaaaaaaaattagccgggcgcggtggcaggcgcctgtagtcccagctattcgggagcctgaggcaggagaatggcgtgaacccgggaggcggagcttgcagtgagccgagatcaagccactgcactccagcctgggcgacacagcgagactccgtctca

SEQ ID NO: 50014 - DNA, 1295 bp, Homo sapiens
ctcagcctagagcggctgctgttcagctttggcccctgaagggagaacacatctgaggatgaagaatggttgaggcatttgttcctctggttttctctctgctccagtgcagtaggttggccttgcccttcttctgaagcccccgtttccatcgggtggctggtttcatgcagctgtggctcctcacagattccctctctcagttgccataactgctaccctccttgctcctacaggcactggggcagaagtggttcctccattattagcagcccagggttctttcaacctgcctacatctggaaaatacctccttatcaaactcttcatcaccagtgtcagttcatggtcagtttctttcctgagccctgacccacacccagggaaaggccaaccttccgtggccaagatgaagcctcttccactgtcagctgggcacttctaggggctgtgagcgctgaagaatggagagattcaggccatgtgtgtggctctacctcctgagaaacaggcgttatcaggcctgggctttgctcacagcacctgccggctcctgggaagaagccacatctgcctcgaactgccctgactgcctttgttacgatacctacccgtggcttgcttgtgccaactctgaaaacacagggctgcctgagggagctctcgtgttagcaagcagcagctcgtgggtaaggaaagccccttcatttattaacattaaagtgattgcaaactcgtaggtgagatacttatgcattgggctctgtctggataattcacctgtattaactcagccgatcctcttaactccataaggaaggaatccttattgtccccatcttaaagacctccgaaacgaaaccagagatactgaatgatttgcctgggatgactccgctaccacttggcacagccacggtgcaaacccagttgggctggcactgaacacccagactgtagatccctcctgcctgactcaagagcctctgtctatatggaagcaatcaacttaaggtgctggcagctgataaagacttgatctctaacttctctcagatatctacatctaacttagtttgggacaagggatagcttgctggggtcagcaaactatggcttgtgggccaaattgggtctattgcctgatttttacaaataatttattgaagtgaaattcatataacattaaccatcctaaagccagcaattcagtggcacttagtacattcccagtgtacccctctatctagttccaggcacttccaacactccaaataaaactctcttatggactc

SEQ ID NO: 50015 - DNA, 1302 bp, Homo sapiens
ctcagcctagagcggctgctgttcagctttggcccctgaagggagaacacatctgaggatgaagaatggttgaggcatttgttcctctggttttctctctgctccagtgcagtaggttggccttgcccttcttctgaagcccccgtttccatcgggtggctggtttcatgcagctgtggctcctcacagattccctctctcagttgccataactgctaccctccttgctcctacaggcactggggcagaagtggttcctccattattagcagcccagggttctttcaacctgcctacatctggaaaatacctccttatcaaactcttcatcaccagtgtcagttcatggtcagtttctttcctgagccctgacccacacccagggaaaggccaaccttccgtggccaagatgaagcctcttccactgtcagctgggcacttctaggggctgtgagcgctgaagaatggagagattcaggccatgtgtgtggctctacctcctgagaaacaggcgttatcaggcctgggctttgctcacagcacctgccggctcctgggaagaagccacatctgcctcgaactgccctgactgcctttgttacgatacctacccgtggcttgcttgtgccaactctgaaaacacagggctgcctgagggagctctcgtgttagcaagcagcagctcgtgggtaaggaaagccccttcatttattaacattaaagtgattgcaaactcgtaggtgagatacttatgcattgggctctgtctggataattcacctgtattaactcagccgatcctcttaactccataaggaaggaatccttattgtccccatcttaaagacctccgaaacgaaaccagagatactgaatgatttgcctgggatgactccgctaccacttggcacagccacggtgcaaacccagttgggctggcactgaacacccagactgtagatccctcctgcctgactcaagagcctctgtctatatggaagcaatcaacttaaggtgctggcagctgataaagacttgatctctaacttctctcagatatctacatctaacttagtttgggacaagggatagcttgctggggtcagcaaactatggcttgtgggcctcctcggcctcatcgtccttctttctccttttccttctttctctctccctctcatgccaccatgtaagatgtgacttgcttccccttcgccttccgccatgattgtaaggttcctgaggcctcagcagtcaggcagacctgtgagacaattacacctcttttctgtattcattaaa

SEQ ID NO: 50016 - DNA, 815 bp, Homo sapiens
ataatgctgcaatgagcatggaagtacagatacctttaggagttgatgtatttcctttgggtatatacccataaaagagattgctgggtatatttttaagttgattggcatttaataagataataaatagcatgctgctgctttgaatcttccatatttgtctgtagagcccctgttttctaatgcagtttatgtaaagtttttctactttttcttgggcagtatctattttaattacttttaaatgacttggatgtattaatgttttctcttttaacaaaaatcacaattataccccaaattatttttgcataaaaagtatatgcttttaaaaataaatgatatgacaaaaatatcagctataaaactatcaccatgagaatactgcctgtcctagtcccttaaggatatttattagggaggaaaaaaataacagaggtcgtttgcttttcagtgaccaggttcttcatacacatggatgtctcacagatcagctaaggcctgtgtttgaacaccttggtcacccctgcaaggagccatgctccagcatttgccatccacagaacggtgctaatagagtctatttctggagaatggaggagagattaacttcttgttcatgataaatcaagggtatctgatttgcctgttacatgcccagttttctttggaagcaagccctagaagctatttttctgatctaatcctaattctcacattagtgcttatgaaagaggaaaacaacatttactcacgataaagactgagttctagccattataaatcttatcaattgccttgtgaaggttaggggg

SEQ ID NO: 50017 - DNA, 6838 bp, Homo sapiens
agagcgtcgtcctgagaggagtgaaggcggcaaaatggcggaccgcttctcccgcttcaacgaagaccgagactttcagggtaatcactttgatcagtatgaggaaggacacttggaaattgaacaagcgtcacttgacaagcctatagaatcggataatattggacaccgcttactccagaaacatgggtggaagctgggccagggattgggaaaatctcttcaggggagaacagatcccattccaatcgttgtcaagtatgatgtcatgggcatgggtcgcatggaaatggagcttgattatgctgaagatgctaccgaacggcgccgtgtcctagaagtagaaaaagaagacacagaagagctgagacaaaagtacaaggattatgttgacaaagagaaggcaattgccaaagccttggaagacctcagagccaacttttattgtgaactgtgtgataagcaatatcagaaacatcaggaatttgataaccatatcaactcctatgatcatgcacacaagcagagattaaaagatctgaagcagagagagtttgctcgaaatgtctcttcaagatcccgcaaggatgagaaaaaacaggaaaaagcccttcggcggctccatgagttggcagagcaaagaaaacaagctgaatgtgcacctggaagtggtcccatgttcaaaccaaccacagtggctgtagatgaagaaggtggagaagatgataaagatgaatcagctacaaatagtggcacaggtgccactgcttcttgtggcctgggatctgaattctccacagataaaggaggccctttcactgcagtacaaatcactaataccactggactggcccaggctcctgggttagcctcccaaggcatcagctttggcattaagaataatctggggaccccattgcaaaaattgggagtgtcattttcttttgccaaaaaggctcctgtcaaactcgaatcaatagcatcagttttcaaggaccatgcggaggaagggacctctgaagatggaacaaaacccgatgagaagagttctgaccaaggactgcagaaggtaggagactctgatgggagcagtaatcttgatggtaaaaaagaggatgaagaccctcaggatggagggtcccttgcctcaacattatccaaattaaaaaggatgaaacgagaagaaggagctggggctacagagcctgagtattaccactacatccccccagcacactgcaaagtaaaacctaattttccctttctactttttatgagagccagtgaacaaatggatggtgataatactacacacccaaagaatgccccagagagtaaaaaaggcagttctcccaagcctaaaagctgcatcaaggcggcagcaagccaaggagcagaaaagacagttagtgaagtctctgagcagccgaaggaaaccagcatgaccgagccctcagaaccaggaagcaaagctgaggcaaagaaggccttaggaggggatgtaagtgatcagagtttagaaagtcatagtcagaaggtttcagagacccaaatgtgtgagtccaactcttctaaagaaacctctctggccaccccagcagggaaagaaagccaagaaggacccaaacatcctactggtcccttcttcccagttttgagcaaagatgaaagcactgccctccagtggccatcagaactattaattttcaccaaggcagaaccctccatttcatacagttgtaaccctttatattttgactttaaactttcaaggaacaaagatgccagaactaaaggaacagaaaaaccaaaggatataggaagctcctcaaaggaccatctccaaggcctagatcctggtgagccaaataaaagcaaggaagtgggcggagagaaaatagtacgttcctcaggaggcagaatggacgcacctgcttcagggtctgcctgtagcggcctgaacaagcaggagcctgggggtagccatgggtctgagacagaagacacagggagaagccttcccagcaagaaagaacgatctgggaagtcccaccggcacaaaaagaaaaagaagcacaaaaaatccagcaaacacaaacgtaaacacaaggctgacacagaagagaaaagctctaaggcagagtcaggggagaaatctaagaagcgcaagaaacgaaaacgaaagaagaataagtcatcagccccagcagattctgaacgaggacccaaaccagaaccccctgggagtggcagtcccgcaccaccaagaagaaggcggagagctcaagatgactcccagcggagatccctcccagctgaagaggggagcagtggcaaaaaggatgaaggtgggggtggtagcagctcccaagaccatggtgggaggaaacacaaaggtgaacttccaccttcatcctgccagcgaagagcaggcaccaaacggagcagccggtctagccatcggagccaacccagtagtggagatgaggatagtgatgatgcttcctcacaccggctgcaccagaagtctccatcccagtacagtgaggaagaagaagaggaagattcaggcagtgagcattcccgcagccgctcaaggtctggccggcgccattcctcgcatcgttcctcccggcgttcttactcaagtagctcagatgcctcttcagaccagagctgctatagtagacagcgcagttactctgatgacagctacagtgactacagtgacagatcacgaaggcactccaagcgctcccatgactcagatgactcagactatgccagctccaaacaccgatcaaaacggcacaaatattcatcttctgatgatgactatagcctcagttgcagccagtcccgaagccgatctcggagtcataccagagagcgctcaagatcccggggccgcagccgcagcagcagttgtagtcgtagtcgaagcaagcggagaagccgtagcaccacagcccacagctggcaacggagccggagctatagccgggaccgcagccgcagcaccaggagcccttcccagagatcaggctccaggaagagatcatggggtcacgagagccctgaggagaggcattctgggcgtcgggacttcattcgttctaagatctaccgctcccagtccccccactatttccgatcaggccggggagaaggtcctgggaagaaagatgatggcagaggagatgacagtaaagcaacaggtccaccttcccagaacagcaacattggcacaggaagagggtcagaaggtgactgcagtcctgaagacaagaactctgtcactgccaaactgctactggagaagatccagtcaaggaaagtggagaggaaacctagtgtgagtgaggaggtgcaggccacccctaataaagctgggcccaagctcaaggaccccccacaaggttactttgggcccaagctccccccatctcttggcaataagcctgtccttccactgatagggaagctcccagctacgcgaaagcccaataagaagtgtgaagagtctggcttggaaaggggggaagagcaagaacagtcagagacagaagaggggcccccagggagtagtgatgccctatttgggcatcagttcccttcagaggaaacaactggccccttattagacccacccccagaagagtcaaagtctggagaagctactgctgatcaccctgtggctccactaggcaccccagcacattctgactgctaccctggggacccaaccatctcccataactacctccccgaccccagtgatggggacaccctggagtccctggatagcagcagtcagccaggccctgtggagtccagcttgctgcctatagcaccagaccttgagcatttccccagttatgcacctcccagtggggatcctagtattgagtcaacagatggggctgaggatgcttcactggcccccctggaaagccagcccatcaccttcacccctgaggagatggagaagtacagcaagctccagcaggctgctcagcaacacatccagcagcagcttctggccaagcaagtaaaggcctttccagcctcagctgccctggccccagccacaccagccctgcaacccatccacattcagcagccagctacagcctctgccacctccatcacaactgttcagcatgccatcctacaacatcatgctgccgcagctgctgccgccatcggcattcaccctcacccccatccccaaccacttgcccaggtgcatcatattccccagccccatctgacccccatttctttgtcccacctcactcactcaatcatccctggccaccctgccacctttctcgctagccatcccatccacatcattcccgcctcagccatccatcctgggcccttcacctttcaccctgtcccacatgctgccctctaccccaccctacttgctccacggcctgctgcagcagctgccactgcacttcaccttcacccactacttcaccccatcttctcaggtcaggacctgcaacatccccccagccatggcacgtgagttgggggatgggatcctaggtagggccaggggaggagacccataaatgttcccttgggggtgttgagccattaataccagcaagtagaagctgggatgggcagtgtctgacagccaaagaattgagttttggcttgcaggggtgggtttagatttgaagtttgctttcagtttactatcagggatttctttttcctgtcctcctctcaatttgtccctccctcttctgtgtttctaagctagggaacaccagtaagtgctacccacccctctgcagcaacatctccaaactgtcaagtttagataatcccctcctccctctgcttttttcctctgctcttcccttctgtaaattttaaaacattttcctcccctctggccagtgggttgtcaccagagcacttgctgtgggcccatctggtcttgccttctcagcgccacagggaaggccaagctgttctagtggtggaagtgccaccattttggggtagtatctttgaccatctttggtgacgttacgttatcccaggtgaggtggaaagcgtctcacctggaacctgatataactcaggctgcaattccatccagttcccacatcaacggagccacacatttggcactgttatcttggtatccctcatcccagaagaggcatctccatatcccagaaaagaagatcctatcatgaataaaagctgtatggcccagagaggagctcatgtgtctaaagtgaagggtatattttcttctgttgtgttgatgtttccttcttaatttataggatttttttaatgtaaaaaattgcactgaactctataaacgtaaatgctgctttttgtagctcatataaaaaaggttccatatttgtagtatactgcaataatattttttacatccagctctttaagtgatcctcgttctggtggctttgtgtaaatatgtttgccctagttgaattaagaaactctaaaggttataaaatgaaaacaaaaaataaaatatttgttttctgctagatgcaaaactgactaagcatgtatattttaccaaacttatgtattttttgaagttatgaactataaaatgttaaaacattttttgctgggacaaaatgttaagtaatttgcagtatgtagtgcccccagtattgggatttttgagctaatgggcagcagtcagctgggggcttctgagggatgctcatctttaacagtctccctcatgtacttttgctgttttacacagagaaacaggtagaccccacagaggagaaggaggggattcaacagctttattgtctggaagcagtgagatttggtgattgtctggggggattcctgggtttccctgggtaccttgttccaggcagtcagtccatttgccttcctagtacttagccccctctgacaattttttttttaatgtgccttttgggttggtagaaacggaagtagaagtaggctggaggatgagttgggacagtcttccttttgttgggaggtgagcacatttacagatattttgcttcatagtttccatgccctctgcccagctcagtttagacagtaaacgttccttgtttcttttctcccatgacactgacaagaggaattaccacctcagcctcttttgcccctcttcttgcctttcacccaggctctcagccctaattaacacactgacccaaaggtgcttgtgttgcaggtcccatctcctttgatgaggttaacaattcccactttggcattttcctaactattcgtgtggctagaattggttggttggtcacttgacaagaaaaaccatacttacctgggccaaggctctgttcctgccttcgcaaattctcaaaagagtaaagtttatgaaaagaaagtggcaggcaaacacaactcttgactgccctcccaccctcctacctgttcagtactcatctgattcagaagcatcacttcttggataactagcactggaaaaatgaaatcatctgtgtaagtgaagggactcatttttctttgctttcagcccatgtaaataaataatacagtattaacattttcgtgctgcttcccattagcttgtagattgagccatactctggctgcctctttgccttcctaggggcattttctttaacttccagaatagtgattttaaaagtaaaaataaaaataaaccttacttacaagcataacagattgtatttaactttatcacatatgatagagatatatatgctgtaaaatgagggaaaggaactttctaataaaccaatgatttgtggaaaaaaaaaaa

SEQ ID NO: 50018 - DNA, 6784 bp, Homo sapiens
agagcgtcgtcctgagaggagtgaaggcggcaaaatggcggaccgcttctcccgcttcaacgaagaccgagactttcagggtaatcactttgatcagtatgaggaaggacacttggaaattgaacaagcgtcacttgacaagcctatagaatcggataatattggacaccgcttactccagaaacatgggtggaagctgggccagggattgggaaaatctcttcaggggagaacagatcccattccaatcgttgtcaagtatgatgtcatgggcatgggtcgcatggaaatggagcttgattatgctgaagatgctaccgaacggcgccgtgtcctagaagtagaaaaagaagacacagaagagctgagacaaaagtacaaggattatgttgacaaagagaaggcaattgccaaagccttggaagacctcagagccaacttttattgtgaactgtgtgataagcaatatcagaaacatcaggaatttgataaccatatcaactcctatgatcatgcacacaagcagagattaaaagatctgaagcagagagagtttgctcgaaatgtctcttcaagatcccgcaaggatgagaaaaaacaggaaaaagcccttcggcggctccatgagttggcagagcaaagaaaacaagctgaatgtgcacctggaagtggtcccatgttcaaaccaaccacagtggctgtagatgaagaaggtggagaagatgataaagatgaatcagctacaaatagtggcacaggtgccactgcttcttgtggcctgggatctgaattctccacagataaaggaggccctttcactgcagtacaaatcactaataccactggactggcccaggctcctgggttagcctcccaaggcatcagctttggcattaagaataatctggggaccccattgcaaaaattgggagtgtcattttcttttgccaaaaaggctcctgtcaaactcgaatcaatagcatcagttttcaaggaccatgcggaggaagggacctctgaagatggaacaaaacccgatgagaagagttctgaccaaggactgcagaaggtaggagactctgatgggagcagtaatcttgatggtaaaaaagaggatgaagaccctcaggatggagggtcccttgcctcaacattatccaaattatacatccccccagcacactgcaaagtaaaacctaattttccctttctactttttatgagagccagtgaacaaatggatggtgataatactacacacccaaagaatgccccagagagtaaaaaaggcagttctcccaagcctaaaagctgcatcaaggcggcagcaagccaaggagcagaaaagacagttagtgaagtctctgagcagccgaaggaaaccagcatgaccgagccctcagaaccaggaagcaaagctgaggcaaagaaggccttaggaggggatgtaagtgatcagagtttagaaagtcatagtcagaaggtttcagagacccaaatgtgtgagtccaactcttctaaagaaacctctctggccaccccagcagggaaagaaagccaagaaggacccaaacatcctactggtcccttcttcccagttttgagcaaagatgaaagcactgccctccagtggccatcagaactattaattttcaccaaggcagaaccctccatttcatacagttgtaaccctttatattttgactttaaactttcaaggaacaaagatgccagaactaaaggaacagaaaaaccaaaggatataggaagctcctcaaaggaccatctccaaggcctagatcctggtgagccaaataaaagcaaggaagtgggcggagagaaaatagtacgttcctcaggaggcagaatggacgcacctgcttcagggtctgcctgtagcggcctgaacaagcaggagcctgggggtagccatgggtctgagacagaagacacagggagaagccttcccagcaagaaagaacgatctgggaagtcccaccggcacaaaaagaaaaagaagcacaaaaaatccagcaaacacaaacgtaaacacaaggctgacacagaagagaaaagctctaaggcagagtcaggggagaaatctaagaagcgcaagaaacgaaaacgaaagaagaataagtcatcagccccagcagattctgaacgaggacccaaaccagaaccccctgggagtggcagtcccgcaccaccaagaagaaggcggagagctcaagatgactcccagcggagatccctcccagctgaagaggggagcagtggcaaaaaggatgaaggtgggggtggtagcagctcccaagaccatggtgggaggaaacacaaaggtgaacttccaccttcatcctgccagcgaagagcaggcaccaaacggagcagccggtctagccatcggagccaacccagtagtggagatgaggatagtgatgatgcttcctcacaccggctgcaccagaagtctccatcccagtacagtgaggaagaagaagaggaagattcaggcagtgagcattcccgcagccgctcaaggtctggccggcgccattcctcgcatcgttcctcccggcgttcttactcaagtagctcagatgcctcttcagaccagagctgctatagtagacagcgcagttactctgatgacagctacagtgactacagtgacagatcacgaaggcactccaagcgctcccatgactcagatgactcagactatgccagctccaaacaccgatcaaaacggcacaaatattcatcttctgatgatgactatagcctcagttgcagccagtcccgaagccgatctcggagtcataccagagagcgctcaagatcccggggccgcagccgcagcagcagttgtagtcgtagtcgaagcaagcggagaagccgtagcaccacagcccacagctggcaacggagccggagctatagccgggaccgcagccgcagcaccaggagcccttcccagagatcaggctccaggaagagatcatggggtcacgagagccctgaggagaggcattctgggcgtcgggacttcattcgttctaagatctaccgctcccagtccccccactatttccgatcaggccggggagaaggtcctgggaagaaagatgatggcagaggagatgacagtaaagcaacaggtccaccttcccagaacagcaacattggcacaggaagagggtcagaaggtgactgcagtcctgaagacaagaactctgtcactgccaaactgctactggagaagatccagtcaaggaaagtggagaggaaacctagtgtgagtgaggaggtgcaggccacccctaataaagctgggcccaagctcaaggaccccccacaaggttactttgggcccaagctccccccatctcttggcaataagcctgtccttccactgatagggaagctcccagctacgcgaaagcccaataagaagtgtgaagagtctggcttggaaaggggggaagagcaagaacagtcagagacagaagaggggcccccagggagtagtgatgccctatttgggcatcagttcccttcagaggaaacaactggccccttattagacccacccccagaagagtcaaagtctggagaagctactgctgatcaccctgtggctccactaggcaccccagcacattctgactgctaccctggggacccaaccatctcccataactacctccccgaccccagtgatggggacaccctggagtccctggatagcagcagtcagccaggccctgtggagtccagcttgctgcctatagcaccagaccttgagcatttccccagttatgcacctcccagtggggatcctagtattgagtcaacagatggggctgaggatgcttcactggcccccctggaaagccagcccatcaccttcacccctgaggagatggagaagtacagcaagctccagcaggctgctcagcaacacatccagcagcagcttctggccaagcaagtaaaggcctttccagcctcagctgccctggccccagccacaccagccctgcaacccatccacattcagcagccagctacagcctctgccacctccatcacaactgttcagcatgccatcctacaacatcatgctgccgcagctgctgccgccatcggcattcaccctcacccccatccccaaccacttgcccaggtgcatcatattccccagccccatctgacccccatttctttgtcccacctcactcactcaatcatccctggccaccctgccacctttctcgctagccatcccatccacatcattcccgcctcagccatccatcctgggcccttcacctttcaccctgtcccacatgctgccctctaccccaccctacttgctccacggcctgctgcagcagctgccactgcacttcaccttcacccactacttcaccccatcttctcaggtcaggacctgcaacatccccccagccatggcacgtgagttgggggatgggatcctaggtagggccaggggaggagacccataaatgttcccttgggggtgttgagccattaataccagcaagtagaagctgggatgggcagtgtctgacagccaaagaattgagttttggcttgcaggggtgggtttagatttgaagtttgctttcagtttactatcagggatttctttttcctgtcctcctctcaatttgtccctccctcttctgtgtttctaagctagggaacaccagtaagtgctacccacccctctgcagcaacatctccaaactgtcaagtttagataatcccctcctccctctgcttttttcctctgctcttcccttctgtaaattttaaaacattttcctcccctctggccagtgggttgtcaccagagcacttgctgtgggcccatctggtcttgccttctcagcgccacagggaaggccaagctgttctagtggtggaagtgccaccattttggggtagtatctttgaccatctttggtgacgttacgttatcccaggtgaggtggaaagcgtctcacctggaacctgatataactcaggctgcaattccatccagttcccacatcaacggagccacacatttggcactgttatcttggtatccctcatcccagaagaggcatctccatatcccagaaaagaagatcctatcatgaataaaagctgtatggcccagagaggagctcatgtgtctaaagtgaagggtatattttcttctgttgtgttgatgtttccttcttaatttataggatttttttaatgtaaaaaattgcactgaactctataaacgtaaatgctgctttttgtagctcatataaaaaaggttccatatttgtagtatactgcaataatattttttacatccagctctttaagtgatcctcgttctggtggctttgtgtaaatatgtttgccctagttgaattaagaaactctaaaggttataaaatgaaaacaaaaaataaaatatttgttttctgctagatgcaaaactgactaagcatgtatattttaccaaacttatgtattttttgaagttatgaactataaaatgttaaaacattttttgctgggacaaaatgttaagtaatttgcagtatgtagtgcccccagtattgggatttttgagctaatgggcagcagtcagctgggggcttctgagggatgctcatctttaacagtctccctcatgtacttttgctgttttacacagagaaacaggtagaccccacagaggagaaggaggggattcaacagctttattgtctggaagcagtgagatttggtgattgtctggggggattcctgggtttccctgggtaccttgttccaggcagtcagtccatttgccttcctagtacttagccccctctgacaattttttttttaatgtgccttttgggttggtagaaacggaagtagaagtaggctggaggatgagttgggacagtcttccttttgttgggaggtgagcacatttacagatattttgcttcatagtttccatgccctctgcccagctcagtttagacagtaaacgttccttgtttcttttctcccatgacactgacaagaggaattaccacctcagcctcttttgcccctcttcttgcctttcacccaggctctcagccctaattaacacactgacccaaaggtgcttgtgttgcaggtcccatctcctttgatgaggttaacaattcccactttggcattttcctaactattcgtgtggctagaattggttggttggtcacttgacaagaaaaaccatacttacctgggccaaggctctgttcctgccttcgcaaattctcaaaagagtaaagtttatgaaaagaaagtggcaggcaaacacaactcttgactgccctcccaccctcctacctgttcagtactcatctgattcagaagcatcacttcttggataactagcactggaaaaatgaaatcatctgtgtaagtgaagggactcatttttctttgctttcagcccatgtaaataaataatacagtattaacattttcgtgctgcttcccattagcttgtagattgagccatactctggctgcctctttgccttcctaggggcattttctttaacttccagaatagtgattttaaaagtaaaaataaaaataaaccttacttacaagcataacagattgtatttaactttatcacatatgatagagatatatatgctgtaaaatgagggaaaggaactttctaataaaccaatgatttgtggaaaaaaaaaaa

SEQ ID NO: 50019 - DNA, 6787 bp, Homo sapiens
agagcgtcgtcctgagaggagtgaaggcggcaaaatggcggaccgcttctcccgcttcaacgaagaccgagactttcagggtaatcactttgatcagtatgaggaaggacacttggaaattgaacaagcgtcacttgacaagcctatagaatcggataatattggacaccgcttactccagaaacatgggtggaagctgggccagggattgggaaaatctcttcaggggagaacagatcccattccaatcgttgtcaagtatgatgtcatgggcatgggtcgcatggaaatggagcttgattatgctgaagatgctaccgaacggcgccgtgtcctagaagtagaaaaagaagacacagaagagctgagacaaaagtacaaggattatgttgacaaagagaaggcaattgccaaagccttggaagacctcagagccaacttttattgtgaactgtgtgataagcaatatcagaaacatcaggaatttgataaccatatcaactcctatgatcatgcacacaagcagagattaaaagatctgaagcagagagagtttgctcgaaatgtctcttcaagatcccgcaaggatgagaaaaaacaggaaaaagcccttcggcggctccatgagttggcagagcaaagaaaacaagctgaatgtgcacctggaagtggtcccatgttcaaaccaaccacagtggctgtagatgaagaaggtggagaagatgataaagatgaatcagctacaaatagtggcacaggtgccactgcttcttgtggcctgggatctgaattctccacagataaaggaggccctttcactgcagtacaaatcactaataccactggactggcccaggctcctgggttagcctcccaaggcatcagctttggcattaagaataatctggggaccccattgcaaaaattgggagtgtcattttcttttgccaaaaaggctcctgtcaaactcgaatcaatagcatcagttttcaaggaccatgcggaggaagggacctctgaagatggaacaaaacccgatgagaagagttctgaccaaggactgcagaaggtaggagactctgatgggagcagtaatcttgatggtaaaaaagaggatgaagaccctcaggatggagggtcccttgcctcaacattatccaaattaaaaaggatgaaacgagaagaaggagctggggctacagagcctgagtattaccactacatccccccagcacactgcaaagtaaaacctaattttccctttctactttttatgagagccagtgaacaaatggatggtgataatactacacacccaaagaatgccccagagagtaaaaaaggcagttctcccaagcctaaaagctgcatcaaggcggcagcaagccaaggagcagaaaagacagttagtgaagtctctgagcagccgaaggaaaccagcatgaccgagccctcagaaccaggaagcaaagctgaggcaaagaaggccttaggaggggatgtaagtgatcagagtttagaaagtcatagtcagaaggtttcagagacccaaatgtgtgagtccaactcttctaaagaaacctctctggccaccccagcagggaaagaaagccaagaaggacccaaacatcctactggtcccttcttcccagttttgagcaaagatgaaagcactgccctccagtggccatcagaactattaattttcaccaaggcagaaccctccatttcatacagttgtaaccctttatattttgactttaaactttcaaggaacaaagatgccagaactaaaggaacagaaaaaccaaaggatataggaagctcctcaaaggaccatctccaaggcctagatcctggtgagccaaataaaagcaaggaagtgggcggagagaaaatagtacgttcctcaggaggcagaatggacgcacctgcttcagggtctgcctgtagcggcctgaacaagcaggagcctgggggtagccatgggtctgagacagaagacacagggagaagccttcccagcaagaaagaacgatctgggaagtcccaccggcacaaaaagaaaaagaagcacaaaaaatccagcaaacacaaacgtaaacacaaggctgacacagaagagaaaagctctaaggcagagtcaggggagaaatctaagaagcgcaagaaacgaaaacgaaagaagaataagtcatcagccccagcagattctgaacgaggacccaaaccagaaccccctgggagtggcagtcccgcaccaccaagaagaaggcggagagctcaagatgactcccagcggagatccctcccagctgaagaggggagcagtggcaaaaaggatgaaggtgggggtggtagcagctcccaagaccatggtgggaggaaacacaaaggtgaacttccaccttcatcctgccagcgaagagcaggcaccaaacggagcagccggtctagccatcggagccaacccagtagtggagatgaggatagtgatgatgcttcctcacaccggctgcaccagaagtctccatcccagtacagtgaggaagaagaagaggaagattcaggcagtgagcattcccgcagccgctcaaggtctggccggcgccattcctcgcatcgttcctcccggcgttcttactcaagtagctcagatgcctcttcagaccagagctgctatagtagacagcgcagttactctgatgacagctacagtgactacagtgacagatcacgaaggcactccaagcgctcccatgactcagatgactcagactatgccagctccaaacaccgatcaaaacggcacaaatattcatcttctgatgatgactatagcctcagttgcagccagtcccgaagccgatctcggagtcataccagagagcgctcaagatcccggggccgcagccgcagcagcagttgtagtcgtagtcgaagcaagcggagaagccgtagcaccacagcccacagctggcaacggagccggagctatagccgggaccgcagccgcagcaccaggagcccttcccagagatcaggctccaggaagagatcatggggtcacgagagccctgaggagaggcattctgggcgtcgggacttcattcgttctaagatctaccgctcccagtccccccactatttccgatcaggccggggagaaggtcctgggaagaaagatgatggcagaggagatgacagtaaagcaacaggtccaccttcccagaacagcaacattggcacaggaagagggtcagaaggtgactgcagtcctgaagacaagaactctgtcactgccaaactgctactggagaagatccagtcaaggaaagtggagaggaaacctagtgtgagtgaggaggtgcaggccacccctaataaagctgggcccaagctcaaggaccccccacaaggttactttgggcccaagctccccccatctcttggcaataagcctgtccttccactgatagggaagctcccagctacgcgaaagcccaataagaagtgtgaagagtctggcttggaaaggggggaagagcaagaacagtcagagacagaagaggggcccccagggagtagtgatgccctatttgggcatcagttcccttcagaggaaacaactggccccttattagacccacccccagaagagtcaaagtctggagaagctactgctgatcaccctgtggctccactaggcaccccagcacattctgactgctaccctggggacccaaccatctcccataactacctccccgaccccagtgatggggacaccctggagtccctggatagcagcagtcagccaggccctgtggagtccagcttgctgcctatagcaccagaccttgagcatttccccagttatgcttcactggcccccctggaaagccagcccatcaccttcacccctgaggagatggagaagtacagcaagctccagcaggctgctcagcaacacatccagcagcagcttctggccaagcaagtaaaggcctttccagcctcagctgccctggccccagccacaccagccctgcaacccatccacattcagcagccagctacagcctctgccacctccatcacaactgttcagcatgccatcctacaacatcatgctgccgcagctgctgccgccatcggcattcaccctcacccccatccccaaccacttgcccaggtgcatcatattccccagccccatctgacccccatttctttgtcccacctcactcactcaatcatccctggccaccctgccacctttctcgctagccatcccatccacatcattcccgcctcagccatccatcctgggcccttcacctttcaccctgtcccacatgctgccctctaccccaccctacttgctccacggcctgctgcagcagctgccactgcacttcaccttcacccactacttcaccccatcttctcaggtcaggacctgcaacatccccccagccatggcacgtgagttgggggatgggatcctaggtagggccaggggaggagacccataaatgttcccttgggggtgttgagccattaataccagcaagtagaagctgggatgggcagtgtctgacagccaaagaattgagttttggcttgcaggggtgggtttagatttgaagtttgctttcagtttactatcagggatttctttttcctgtcctcctctcaatttgtccctccctcttctgtgtttctaagctagggaacaccagtaagtgctacccacccctctgcagcaacatctccaaactgtcaagtttagataatcccctcctccctctgcttttttcctctgctcttcccttctgtaaattttaaaacattttcctcccctctggccagtgggttgtcaccagagcacttgctgtgggcccatctggtcttgccttctcagcgccacagggaaggccaagctgttctagtggtggaagtgccaccattttggggtagtatctttgaccatctttggtgacgttacgttatcccaggtgaggtggaaagcgtctcacctggaacctgatataactcaggctgcaattccatccagttcccacatcaacggagccacacatttggcactgttatcttggtatccctcatcccagaagaggcatctccatatcccagaaaagaagatcctatcatgaataaaagctgtatggcccagagaggagctcatgtgtctaaagtgaagggtatattttcttctgttgtgttgatgtttccttcttaatttataggatttttttaatgtaaaaaattgcactgaactctataaacgtaaatgctgctttttgtagctcatataaaaaaggttccatatttgtagtatactgcaataatattttttacatccagctctttaagtgatcctcgttctggtggctttgtgtaaatatgtttgccctagttgaattaagaaactctaaaggttataaaatgaaaacaaaaaataaaatatttgttttctgctagatgcaaaactgactaagcatgtatattttaccaaacttatgtattttttgaagttatgaactataaaatgttaaaacattttttgctgggacaaaatgttaagtaatttgcagtatgtagtgcccccagtattgggatttttgagctaatgggcagcagtcagctgggggcttctgagggatgctcatctttaacagtctccctcatgtacttttgctgttttacacagagaaacaggtagaccccacagaggagaaggaggggattcaacagctttattgtctggaagcagtgagatttggtgattgtctggggggattcctgggtttccctgggtaccttgttccaggcagtcagtccatttgccttcctagtacttagccccctctgacaattttttttttaatgtgccttttgggttggtagaaacggaagtagaagtaggctggaggatgagttgggacagtcttccttttgttgggaggtgagcacatttacagatattttgcttcatagtttccatgccctctgcccagctcagtttagacagtaaacgttccttgtttcttttctcccatgacactgacaagaggaattaccacctcagcctcttttgcccctcttcttgcctttcacccaggctctcagccctaattaacacactgacccaaaggtgcttgtgttgcaggtcccatctcctttgatgaggttaacaattcccactttggcattttcctaactattcgtgtggctagaattggttggttggtcacttgacaagaaaaaccatacttacctgggccaaggctctgttcctgccttcgcaaattctcaaaagagtaaagtttatgaaaagaaagtggcaggcaaacacaactcttgactgccctcccaccctcctacctgttcagtactcatctgattcagaagcatcacttcttggataactagcactggaaaaatgaaatcatctgtgtaagtgaagggactcatttttctttgctttcagcccatgtaaataaataatacagtattaacattttcgtgctgcttcccattagcttgtagattgagccatactctggctgcctctttgccttcctaggggcattttctttaacttccagaatagtgattttaaaagtaaaaataaaaataaaccttacttacaagcataacagattgtatttaactttatcacatatgatagagatatatatgctgtaaaatgagggaaaggaactttctaataaaccaatgatttgtggaaaaaaaaaaa

SEQ ID NO: 50020 - DNA, 2390 bp, Homo sapiens
ttgtaacttaaattataccactgactttcctggtctcccaggaaatatgcagacagtatatcattggacttcttggcctccagatctgtaagaaataaattccttttctttataaattagccattttcagaatacttgaaactggctaatttataaagaaaaggaatttatttcttacagatctggaggcagagaagtccaaggtcatggggtggaattgagttttggcttgcaggggtgggtttagatttgaagtttgctttcagtttactatcagggatttctttttcctgtcctcctctcaatttgtccctccctcttctgtgtttctaagctagggaacaccagtaagtgctacccacccctctgcagcaacatctccaaactgtcaagtttagataatcccctcctccctctgcttttttcctctgctcttcccttctgtaaattttaaaacattttcctcccctctggccagtgggttgtcaccagagcacttgctgtgggcccatctggtcttgccttctcagcgccacagggaaggccaagctgttctagtggtggaagtgccaccattttggggtagtatctttgaccatctttggtgacgttacgttatcccaggtgaggtggaaagcgtctcacctggaacctgatataactcaggctgcaattccatccagttcccacatcaacggagccacacatttggcactgttatcttggtatccctcatcccagaagaggcatctccatatcccagaaaagaagatcctatcatgaataaaagctgtatggcccagagaggagctcatgtgtctaaagtgaagggtatattttcttctgttgtgttgatgtttccttcttaatttataggatttttttaatgtaaaaaattgcactgaactctataaacgtaaatgctgctttttgtagctcatataaaaaaggttccatatttgtagtatactgcaataatattttttacatccagctctttaagtgatcctcgttctggtggctttgtgtaaatatgtttgccctagttgaattaagaaactctaaaggttataaaatgaaaacaaaaaataaaatatttgttttctgctagatgcaaaactgactaagcatgtatattttaccaaacttatgtattttttgaagttatgaactataaaatgttaaaacattttttgctgggacaaaatgttaagtaatttgcagtatgtagtgcccccagtattgggatttttgagctaatgggcagcagtcagctgggggcttctgagggatgctcatctttaacagtctccctcatgtacttttgctgttttacacagagaaacaggtagaccccacagaggagaaggaggggattcaacagctttattgtctggaagcagtgagatttggtgattgtctggggggattcctgggtttccctgggtaccttgttccaggcagtcagtccatttgccttcctagtacttagccccctctgacaattttttttttaatgtgccttttgggttggtagaaacggaagtagaagtaggctggaggatgagttgggacagtcttccttttgttgggaggtgagcacatttacagatattttgcttcatagtttccatgccctctgcccagctcagtttagacagtaaacgttccttgtttcttttctcccatgacactgacaagaggaattaccacctcagcctcttttgcccctcttcttgcctttcacccaggctctcagccctaattaacacactgacccaaaggtgcttgtgttgcaggtcccatctcctttgatgaggttaacaattcccactttggcattttcctaactattcgtgtggctagaattggttggttggtcacttgacaagaaaaaccatacttacctgggccaaggctctgttcctgccttcgcaaattctcaaaagagtaaagtttatgaaaagaaagtggcaggcaaacacaactcttgactgccctcccaccctcctacctgttcagtactcatctgattcagaagcatcacttcttggataactagcactggaaaaatgaaatcatctgtgtaagtgaagggactcatttttctttgctttcagcccatgtaaataaataatacagtattaacattttcgtgctgcttcccattagcttgtagattgagccatactctggctgcctctttgccttcctaggggcattttctttaacttccagaatagtgattttaaaagtaaaaataaaaataaaccttacttacaagcataacagattgtatttaactttatcacatatgatagagatatatatgctgtaaaatgagggaaaggaactttctaataaaccaatgatttgtggaaaaaaaaaaa

SEQ ID NO: 50021 - DNA, 916 bp, Homo sapiens
ctccctgacgcttacgagcgcctcatcctggacgtcttctgcgggagccagattcacttcgtgcgcagcgacgagctccgtgaggcctggcgtattttcacccccccttgtccagtctgaggtgagcacatttacagatattttgcttcatagtttccatgccctctgcccagctcagtttagacagtaaacgttccttgtttcttttctcccatgacactgacaagaggaattaccacctcagcctcttttgcccctcttcttgcctttcacccaggctctcagccctaattaacacactgacccaaaggtgcttgtgttgcaggtcccatctcctttgatgaggttaacaattcccactttggcattttcctaactattcgtgtggctagaattggttggttggtcacttgacaagaaaaaccatacttacctgggccaaggctctgttcctgccttcgcaaattctcaaaagagtaaagtttatgaaaagaaagtggcaggcaaacacaactcttgactgccctcccaccctcctacctgttcagtactcatctgattcagaagcatcacttcttggataactagcactggaaaaatgaaatcatctgtgtaagtgaagggactcatttttctttgctttcagcccatgtaaataaataatacagtattaacattttcgtgctgcttcccattagcttgtagattgagccatactctggctgcctctttgccttcctaggggcattttctttaacttccagaatagtgattttaaaagtaaaaataaaaataaaccttacttacaagcataacagattgtatttaactttatcacatatgatagagatatatatgctgtaaaatgagggaaaggaactttctaataaaccaatgatttgtggaaaaaaaaaaa

SEQ ID NO: 50022 - DNA, 793 bp, Homo sapiens
accaggaaacagctataccgggcaaagttatatgcggacaagacgcatattaacgaggagacagtaaacgttccttgtttcttttctcccatgacactgacaagaggaattaccacctcagcctcttttgcccctcttcttgcctttcacccaggctctcagccctaattaacacactgacccaaaggtgcttgtgttgcaggtcccatctcctttgatgaggttaacaattcccactttggcattttcctaactattcgtgtggctagaattggttggttggtcacttgacaagaaaaaccatacttacctgggccaaggctctgttcctgccttcgcaaattctcaaaagagtaaagtttatgaaaagaaagtggcaggcaaacacaactcttgactgccctcccaccctcctacctgttcagtactcatctgattcagaagcatcacttcttggataactagcactggaaaaatgaaatcatctgtgtaagtgaagggactcatttttctttgctttcagcccatgtaaataaataatacagtattaacattttcgtgctgcttcccattagcttgtagattgagccatactctggctgcctctttgccttcctaggggcattttctttaacttccagaatagtgattttaaaagtaaaaataaaaataaaccttacttacaagcataacagattgtatttaactttatcacatatgatagagatatatatgctgtaaaatgagggaaaggaactttctaataaaccaatgatttgtggaaaaaaaaaaa

SEQ ID NO: 50023 - DNA, 1055 bp, Homo sapiens
agagcgtcgtcctgagaggagtgaaggcggcaaaatggcggaccgcttctcccgcttcaacgaagaccgagactttcagggtaatcactttgatcagtatgaggaaggacacttggaaattgaacaagcgtcacttgacaagcctatagaatcggataatattggacaccgcttactccagaaacatgggtggaagctgggccagggattgggaaaatctcttcaggggagaacagatcccattccaatcgttgtcaagtatgatgtcatgggcatgggtcgcatggaaatggagcttgattatgctgaagatgctaccgaacggcgccgtgtcctagaagtagaaaaagaagacacagaagagctgagacaaaagtacaaggattatgttgacaaagagaaggcaattgccaaagccttggaagacctcagagccaacttttattgtgaactgtgtgataagcaatatcagaaacatcaggaatttgataaccatatcaactcctatgatcatgcacacaagcagagattaaaagatctgaagcagagagagtttgctcgaaatgtctcttcaagatcccgcaaggatgagaaaaaacaggaaaaagcccttcggcggctccatgagttggcagagcaaagaaaacaagctgaatggtgaggatattttttatcagagggttgtacagataattataatccttaaaattttaaattatagatttcagattataatttaagatttaaattaagatttaagaattaaaaaccttgtgccaggcgcagtggctcacccctataatcccagcactttgagagaccgaggcgggcggatcacgaggtcaggagattgagaccagcctgaccaacatggagaaaccccgtctatactaaaaatacaaaattagccgggcgtggtggcacatgcctataatcccagctactagggaggctgaggcaggagaatcgcttgaacctgggaggcggaggttgtggtgagccaagattgcgccattacactccatcctgggcaacaagagtgaaactccgtctca

SEQ ID NO: 50024 - DNA, 168 bp, Homo sapiens
tcctatgatcatgcacacaagcaggtgagttgtagttacttgctaacagaagaaggtacctatctattgttacaacaattggattttatgagtataccccccaaaacttggtgtctatgatttcttgtgtctgccaatctttatctgcagtcatccaacacactttgt

SEQ ID NO: 50025 - DNA, 4932 bp, Homo sapiens
  misc_feature (4926)..(4926): n is a, c, g, or t
agagcgtcgtcctgagaggagtgaaggcggcaaaatggcggaccgcttctcccgcttcaacgaagaccgagactttcagggtaatcactttgatcagtatgaggaaggacacttggaaattgaacaagcgtcacttgacaagcctatagaatcggataatattggacaccgcttactccagaaacatgggtggaagctgggccagggattgggaaaatctcttcaggggagaacagatcccattccaatcgttgtcaagtatgatgtcatgggcatgggtcgcatggaaatggagcttgattatgctgaagatgctaccgaacggcgccgtgtcctagaagtagaaaaagaagacacagaagagctgagacaaaagtacaaggattatgttgacaaagagaaggcaattgccaaagccttggaagacctcagagccaacttttattgtgaactgtgtgataagcaatatcagaaacatcaggaatttgataaccatatcaactcctatgatcatgcacacaagcagagattaaaagatctgaagcagagagagtttgctcgaaatgtctcttcaagatcccgcaaggatgagaaaaaacaggaaaaagcccttcggcggctccatgagttggcagagcaaagaaaacaagctgaatgtgcacctggaagtggtcccatgttcaaaccaaccacagtggctgtagatgaagaaggtggagaagatgataaagatgaatcagctacaaatagtggcacaggtgccactgcttcttgtggcctgggatctgaattctccacagataaaggaggccctttcactgcagtacaaatcactaataccactggactggcccaggctcctgggttagcctcccaaggcatcagctttggcattaagaataatctggggaccccattgcaaaaattgggagtgtcattttcttttgccaaaaaggctcctgtcaaactcgaatcaatagcatcagttttcaaggaccatgcggaggaagggacctctgaagatggaacaaaacccgatgagaagagttctgaccaaggactgcagaaggtaggagactctgatgggagcagtaatcttgatggtaaaaaagaggatgaagaccctcaggatggagggtcccttgcctcaacattatccaaattaaaaaggatgaaacgagaagaaggagctggggctacagagcctgagtattaccactacatccccccagcacactgcaaagtaaaacctaattttccctttctactttttatgagagccagtgaacaaatggatggtgataatactacacacccaaagaatgccccagagagtaaaaaaggcagttctcccaagcctaaaagctgcatcaaggcggcagcaagccaaggagcagaaaagacagttagtgaagtctctgagcagccgaaggaaaccagcatgaccgagccctcagaaccaggaagcaaagctgaggcaaagaaggccttaggaggggatgtaagtgatcagagtttagaaagtcatagtcagaaggtttcagagacccaaatgtgtgagtccaactcttctaaagaaacctctctggccaccccagcagggaaagaaagccaagaaggacccaaacatcctactggtcccttcttcccagttttgagcaaagatgaaagcactgccctccagtggccatcagaactattaattttcaccaaggcagaaccctccatttcatacagttgtaaccctttatattttgactttaaactttcaaggaacaaagatgccagaactaaaggaacagaaaaaccaaaggatataggaagctcctcaaaggaccatctccaaggcctagatcctggtgagccaaataaaagcaaggaagtgggcggagagaaaatagtacgttcctcaggaggcagaatggacgcacctgcttcagggtctgcctgtagcggcctgaacaagcaggagcctgggggtagccatgggtctgagacagaagacacagggagaagccttcccagcaagaaagaacgatctgggaagtcccaccggcacaaaaagaaaaagaagcacaaaaaatccagcaaacacaaacgtaaacacaaggctgacacagaagagaaaagctctaaggcagagtcaggggagaaatctaagaagcgcaagaaacgaaaacgaaagaagaataagtcatcagccccagcagattctgaacgaggacccaaaccagaaccccctgggagtggcagtcccgcaccaccaagaagaaggcggagagctcaagatgactcccagcggagatccctcccagctgaagaggggagcagtggcaaaaaggatgaaggtgggggtggtagcagctcccaagaccatggtgggaggaaacacaaaggtgaacttccaccttcatcctgccagcgaagagcaggcaccaaacggagcagccggtctagccatcggagccaacccagtagtggagatgaggatagtgatgatgcttcctcacaccggctgcaccagaagtctccatcccagtacagtgaggaagaagaagaggaagattcaggcagtgagcattcccgcagccgctcaaggtctggccggcgccattcctcgcatcgttcctcccggcgttcttactcaagtagctcagatgcctcttcagaccagagctgctatagtagacagcgcagttactctgatgacagctacagtgactacagtgacagatcacgaaggcactccaagcgctcccatgactcagatgactcagactatgccagctccaaacaccgatcaaaacggcacaaatattcatcttctgatgatgactatagcctcagttgcagccagtcccgaagccgatctcggagtcataccagagagcgctcaagatcccggggccgcagccgcagcagcagttgtagtcgtagtcgaagcaagcggagaagccgtagcaccacagcccacagctggcaacggagccggagctatagccgggaccgcagccgcagcaccaggagcccttcccagagatcaggctccaggaagagatcatggggtcacgagagccctgaggagaggcattctgggcgtcgggacttcattcgttctaagatctaccgctcccagtccccccactatttccgatcaggccggggagaaggtcctgggaagaaagatgatggcagaggagatgacagtaaagcaacaggtccaccttcccagaacagcaacattggcacaggaagagggtcagaaggtgactgcagtcctgaagacaagaactctgtcactgccaaactgctactggagaagatccagtcaaggaaagtggagaggaaacctagtgtgagtgaggaggtgcaggccacccctaataaagctgggcccaagctcaaggaccccccacaaggttactttgggcccaagctccccccatctcttggcaataagcctgtccttccactgatagggaagctcccagctacgcgaaagcccaataagaagtgtgaagagtctggcttggaaaggggggaagagcaagaacagtcagagacagaagaggggcccccagggagtagtgatgccctatttgggcatcagttcccttcagaggaaacaactggccccttattagacccacccccagaagagtcaaagtctggagaagctactgctgatcaccctgtggctccactaggcaccccagcacattctgactgctaccctggggacccaaccatctcccataactacctccccgaccccagtgatggggacaccctggagtccctggatagcagcagtcagccaggccctgtggagtccagcttgctgcctatagcaccagaccttgagcatttccccagttatgcacctcccagtggggatcctagtattgagtcaacagatggggctgaggatgcttcactggcccccctggaaagccagcccatcaccttcacccctgaggagatggagaagtacagcaagctccagcaggctgctcagcaacacatccagcagcagcttctggccaagcaagtaaaggcctttccagcctcagctgccctggccccagccacaccagccctgcaacccatccacattcagcagccagctacagcctctgccacctccatcacaactgttcagcatgccatcctacaacatcatgctgccgcagctgctgccgccatcggcattcaccctcacccccatccccaaccacttgcccaggtgcatcatattccccagccccatctgacccccatttctttgtcccacctcactcactcaatcatccctggccaccctgccacctttctcgctagccatcccatccacatcattcccgcctcagccatccatcctgggcccttcacctttcaccctgtcccacatgctgccctctaccccaccctacttgctccacggcctgctgcagcagctgccactgcacttcaccttcacccactacttcaccccatcttctcaggtcaggacctgcaacatccccccagccatggcacgtgagttgggggatgggatcctaggtagggccaggggaggagacccataaatgttcccttgggggtgttgagccattaataccagcaagtagaagctgggatgggcagtgtctgacagccaaagaattgagttttggcttgcaggggtgggtttagatttgaagtttgctttcagtttactatcagggatttctttttcctgtcctcctctcaatttgtccctccctcttctgtgtttctaagctagggaacaccagtaagtgctacccacccctctgcagcaacatctccaaactgtcaagtttagataatcccctcctccctctgcttttttcctctgctttgtcccagttttcttactccataagttgtgcataatggcgtganaagggt

SEQ ID NO: 50026 - DNA, 862 bp, Homo sapiens
tatactgcactaaattacattttggaaattttagctaatcttttcaaattaaaggcaccaacattaatgacagatcttctctaatatgaaaagcatcaaaacattccctttcaagcactttgaatggatgaaaattgccatataattttcccacctacctaaccattccatgtaagttaactgagcagtctaacaatgttgtacagaaggttgacagactatgtgcaccaagaatatttaagttgtgcagttagcaagaactagccatttcaaatatactcaaatgttttgtaaataaaaattttgactcctataattttgttcaaactgatgtcttttaaaataattagattttatttgaattttaaaagtaatctgttgtaaattagatgttactttgttgactctgtgattcaatgtacactcagccatattcctgtggggaaatatcaatcttactgactttcatggcatgagccagagattcatagtttcctttaggactataagtatgaagacaaaacacaccaaaataaaatgctagtgaagaaattagaaacctattgtataaaatgtatttttaaaatcttaagatatatgtgatttacactgcctgttaatctagtctctttgtgattaaaaaaaaacataatatttgttaagactcagacaccaaatatttgtgatgtttgtatagcaccatcgttatatgtgatttcaaagggtaagcatctctgtcgtaatcatgtaagcccacagaagaataaattcctgaggttatgtacaaccaactctcagaattcagacttcctgcagctgccatatcaccaataaatgagaattgtgaaaaacaatttttaaa

SEQ ID NO: 50027 - DNA, 5465 bp, Homo sapiens
gtggggggtggtggtgaagccactaggctttttctcattgcaggctacaactgtagaaatgacatttacaaccaaagtgctgtctgcacccacattaagccctctggacaatggccaagaaccccccactcatgggccagagcctacaccgagcagagaccaggcagcaggtaaggaatggaacagcaaacctcccaaggtaccaggaaaggggactccatgggccaacaaggtctgaagatgactgaggccaaggtcaactgccttggtattgagtgggtggggtctggcttaaacgaagttccctcctcattgtactttcttctctctcccctagaaggccctaacctgaccccagaagccagtccagatcctcttcctgagcctcccctggcctcagttgaggtcccagacaaaccctcaggaagccctggccaacccccttctccagccccatctccagtccctgaacctgatgcccaagctgaagacgtagctcctccgcccaccatggctgaggaggaagaggggaccactggggagctccgctctgcagagccagctccagctgactctcgccaccctctgacctatcggaaaaccaccaactttgccctggacaagtttctcgaccctgcccggccctataagtgcactgtgtgtaaggagtccttcacccagaagaatattctgttggttcattataattctgtctcccaccttcacaagatgaagaaggctgccattgacccctctgcccctgcacggggagaggccggtgccccacccaccaccactgctgccacagacaagccctttaagtgcacagtctgcagagtctcctacaaccagagctccaccctggagatccacatgcggtcagttctgcatcagactcgctctcggggaaccaagactgattccaagattgaagggccagaacgcagccaagaagagcccaaggaaggcgagacagagggggaggtgggcactgagaagaagggccctgacaccagtggcttcatatctggattgcctttcctgtcccctcccccacctcccttggacctgcaccgattcccagcccctctcttcaccccaccagtcctgccccccttccctctggtgcccgaatcactgcttaagctccagcagcagcagctgctcctgcccttctacctccacgatctcaaggtggggcccaagctgacactagctgggcctgcacctgtgctgtccctgccagctgccacccctcctcctccaccccaacctcccaaggctgagctggctgagcgggagtgggagcggccccccatggccaaagagggtaatgaggcagggccttcctcaccccccgacccattgcccaacgaggctgcccgcactgcagccaaagcccttctagaaaactttggctttgagctggtgatccagtacaatgaagggaagcaagctgtgccccctccccctaccccacccccacctgaggccctcgggggtggggacaagctggcctgtggggcctgtgggaaactcttctccaatatgcttatcctcaagacacacgaggaacatgtccaccgccgctttctgccctttgaagccctgagccgttatgctgctcagtttcgaaagagctatgacagcctatacccgccccttgcagagcctcccaaacctcctgatgggtctctggattcacctgttccccatctgggcccacccttcctggtcccagagcctgaggcaggggggacccgtgcccctgaagagcgaagtcgagcagggggacactggcccatagaagaggaagaaagctccagagggaatcttcctcccctggtgcctgccggccgccggttctccagaaccaagttcacagagttccagacccaagccctgcagtctttctttgagactagcgcctaccccaaagacggagaggtggagcgactcgcaagtctgttgggtctggctagccgtgtggtggtggtgtggttccagaatgcccgccagaaagcacgcaaaaatgcctgtgagggtgggtccatgccaaccggaggaggcactgggggagcctccggctgcaggcgttgccacgccactttctcctgtgtttttgagttggtgcgccacctcaagaagtgctatgatgaccagacccttgaagaggaggaggaagaggcagagagaggggaagaggaggaagaggtggaagaagaagaagtagaggaggaacagggccttgaacctccagcagggcctgagggcccattaccagagcctccagatggggaggagctgagccaagcagaggcaacaaaggcaggaggcaaagagcctgaagagaaggctactccatcaccttccccagcccatacctgtgaccagtgtgccatttctttctccagccaggacctcctgaccagtcaccgccgactacatttcctgccatctctgcagcccagtgctcccccccaactcctagatctgcccttgctggtgtttggggagagaaaccccctggtggcagccacctcaccaatgccaggtccacctctcaaacggaagcatgaggacggcagcttgtctcccacaggcagtgaagcagggggaggaggggagggcgagccccccagggacaagcgcctgcgcaccaccatcttgcctgagcagctagagatcctgtaccgttggtacatgcaggattccaacccaacacgcaagatgctcgactgcatctccgaggaggtggggctcaaaaagcgagtggtacaggtctggttccagaataccagggcccgggagaggaaaggccagtttcgaagcacccctgggggggtgcctagtccagcagtgaaaccgcctgccacagccacccctgcatccttgcccaagttcaacctcttattaggcaaggtagatgatggcactgggagggaagccccaaagagggaagcacctgcttttccctaccccactgccacgcttgcttctgggccccagcctttcctaccacctgggaaagaggccaccaccccaacaccagagccacctctacctctcctacctccccctccacccagtgaggaagagggcccagaggaaccacctaaagcttctccagagagtgaggcttgcagtctctctgcaggagatctgagtgattcatctgcttccagcctagctgaaccagaatcccctggggctggagggaccagtgggggacctggaggtgggactggggttccagatggaatggggcagcggcgctacaggacccagatgagcagcctgcagctgaagatcatgaaagcctgctatgaagcttaccgcacccccaccatgcaggagtgtgaggtgctgggagaggagattgggctgcccaagagagtcatccaggtctggttccagaatgctcgtgccaaggaaaagaaggccaaactacaggggacagccgctgggagcactgggggcagcagtgagggcctcttagcagcccagcgcactgactgcccctattgtgatgtcaagtatgatttctatgtctcctgccgaggccatctcttttcccgtcagcacctggccaagctcaaggaggcggttcgagcccagctgaagagtgaaagcaagtgctacgacttggccccagcacctgaggctcccccagctctcaaggccccacctgccaccacacctgcctccatgcccctcggggctgccccaaccttgcctcgcctggcgccggtcctcttatctggcccagctctggctcagcccccgctgggcaacttagctcctttcaattcaggcccggcagcctcctcaggcctcctcggcctcgccacttcggtcctgcctaccaccacagtggtccagactgctggcccaggccgccccttacctcagagacccatgcccgaccaaaccaacacctccacagcaggcaccactgaccctgtcccaggccctcctactgagcccttgggggacaaggtctccagtgagcgaaagccagttgcaggccccaccagctcctccaatgatgccctcaagaacctcaaagcattgaagaccactgtcccagccctgttggggggccagttcctgccctttccattgccccctgctgggggaacagcaccgccactacagggggcctacttccaacagctctatggcatgaagaaggggctatttcccatgaaccccatgatacctcagaccctcattgggctgctccccaatgccctcctccagccgccaccccagccccctgagcccacagccacagcacctccaaagcctcctgaactgcctgctccaggggagggggaagctggtgaggttgatgagctgctgacaggcagcactggcatctccaccgtggatgtaacccatcgctacctgtgccgccagtgcaagatggcatttgacggggaggccccggctactgcccaccagagatccttctgcttctttgggcggggctctgggggctccatgccacccccattgcgggtgcccatctgcacctaccactgcctggcatgtgaggtgctgctgagtgggcgtgaagccctagcctcccacctgcgctcctcggcccacaggcgcaaggcagccccacctcaagggggcccacccatctccatcaccaacgccgccactgctgcctcggctgctgtggcttttgccaaagaggaagcaagattacctcacacggactccaacccaaaaactacgactacctctacacttctagctttataaacagattaaccaagatggggagaggggagggcctcagggctccctcttttaccccaaggggtgttcggtgggagctcaaatccctcaccccaccccctggccccgcccacctcacaggaactgttcagttcccaccctcagtgggcaccacacaccccacttccagcagagtcctgcctcctcccaatccccacagacacacacattgatcctcctcctcagctccttgcagatgtagccctcccacaaaactctaaccaaactggaggctggcatgggagaagtgcttctggttcactcttcctaccctctccctcctaaccctctccttgcctgacaggggagcccctgtggcctggactctaggggatgccgccaccagaaacccctctgccaatccctaccttgcaccctgggaactgcagtaacttattctcaaaggctttaaacacagagatcctctcagcggccgtgggcctgccccttgtcctagccctgccacgtgagggtccagcctccagggacaggcactgcccaccaacggcaaatccaaagttctttcaaaaaaaaaaactgaaacacaaccaaaaaagcaagagcgagagagagtacgtgcacacgcgcacaaaagagagaaacggacaccagaggaatgaactaaagaaaaacgtaaacttggaaaatacaga

SEQ ID NO: 50028 - DNA, 282 bp, Homo sapiens
acttagctcctttcaattcaggtgagtagggaggctgggaggagctggacttcagagaacatccccctctaatgacatgcccttccttttccttcctgattcttcccatgcccaatctcctgtggccttcctttgcgtcaggctcttgggggaaagaagggagggaaggggcatggaaatccggtgctgggaacgggtgtgtgtggctggaggtggcctatggcaggaagaatgatgggacaggagatggctaatccttcatccttcctttcacctttctag

SEQ ID NO: 50029 - DNA, 5869 bp, Homo sapiens
gtggggggtggtggtgaagccactaggctttttctcattgcaggctacaactgtagaaatgacatttacaaccaaagtgctgtctgcacccacattaagccctctggacaatggccaagaaccccccactcatgggccagagcctacaccgagcagagaccaggcagcaggtaaggaatggaacagcaaacctcccaaggtaccaggaaaggggactccatgggccaacaaggtctgaagatgactgaggccaaggtcaactgccttggtattgagtgggtggggtctggcttaaacgaagttccctcctcattgtactttcttctctctcccctagaaggccctaacctgaccccagaagccagtccagatcctcttcctgagcctcccctggcctcagttgaggtcccagacaaaccctcaggaagccctggccaacccccttctccagccccatctccagtccctgaacctgatgcccaagctgaagacgtagctcctccgcccaccatggctgaggaggaagaggggaccactggggagctccgctctgcagagccagctccagctgactctcgccaccctctgacctatcggaaaaccaccaactttgccctggacaagtttctcgaccctgcccggccctataagtgcactgtgtgtaaggagtccttcacccagaagaatattctgttggttcattataattctgtctcccaccttcacaagatgaagaaggctgccattgacccctctgcccctgcacggggagaggccggtgccccacccaccaccactgctgccacagacaagccctttaagtgcacagtctgcagagtctcctacaaccagagctccaccctggagatccacatgcggtcagttctgcatcagactcgctctcggggaaccaagactgattccaagattgaagggccagaacgcagccaagaagagcccaaggaaggcgagacagagggggaggtgggcactgagaagaagggccctgacaccagtggcttcatatctggattgcctttcctgtcccctcccccacctcccttggacctgcaccgattcccagcccctctcttcaccccaccagtcctgccccccttccctctggtgcccgaatcactgcttaagctccagcagcagcagctgctcctgcccttctacctccacgatctcaaggtggggcccaagctgacactagctgggcctgcacctgtgctgtccctgccagctgccacccctcctcctccaccccaacctcccaaggctgagctggctgagcgggagtgggagcggccccccatggccaaagagggtaatgaggcagggccttcctcaccccccgacccattgcccaacgaggctgcccgcactgcagccaaagcccttctagaaaactttggctttgagctggtgatccagtacaatgaagggaagcaagctgtgccccctccccctaccccacccccacctgaggccctcgggggtggggacaagctggcctgtggggcctgtgggaaactcttctccaatatgcttatcctcaagacacacgaggaacatgtccaccgccgctttctgccctttgaagccctgagccgttatgctgctcagtttcgaaagagctatgacagcctatacccgccccttgcagagcctcccaaacctcctgatgggtctctggattcacctgttccccatctgggcccacccttcctggtcccagagcctgaggcaggggggacccgtgcccctgaagagcgaagtcgagcagggggacactggcccatagaagaggaagaaagctccagagggaatcttcctcccctggtgcctgccggccgccggttctccagaaccaagttcacagagttccagacccaagccctgcagtctttctttgagactagcgcctaccccaaagacggagaggtggagcgactcgcaagtctgttgggtctggctagccgtgtggtggtggtgtggttccagaatgcccgccagaaagcacgcaaaaatgcctgtgagggtgggtccatgccaaccggaggaggcactgggggagcctccggctgcaggcgttgccacgccactttctcctgtgtttttgagttggtgcgccacctcaagaagtgctatgatgaccagacccttgaagaggaggaggaagaggcagagagaggggaagaggaggaagaggtggaagaagaagaagtagaggaggaacagggccttgaacctccagcagggcctgagggcccattaccagagcctccagatggggaggagctgagccaagcagaggcaacaaaggcaggaggcaaagagcctgaagagaaggctactccatcaccttccccagcccatacctgtgaccagtgtgccatttctttctccagccaggacctcctgaccagtcaccgccgactacatttcctgccatctctgcagcccagtgctcccccccaactcctagatctgcccttgctggtgtttggggagagaaaccccctggtggcagccacctcaccaatgccaggtccacctctcaaacggaagcatgaggacggcagcttgtctcccacaggcagtgaagcagggggaggaggggagggcgagccccccagggacaagcgcctgcgcaccaccatcttgcctgagcagctagagatcctgtaccgttggtacatgcaggattccaacccaacacgcaagatgctcgactgcatctccgaggaggtggggctcaaaaagcgagtggtacaggtctggttccagaataccagggcccgggagaggaaaggccagtttcgaagcacccctgggggggtgcctagtccagcagtgaaaccgcctgccacagccacccctgcatccttgcccaagttcaacctcttattaggcaaggtagatgatggcactgggagggaagccccaaagagggaagcacctgcttttccctaccccactgccacgcttgcttctgggccccagcctttcctaccacctgggaaagaggccaccaccccaacaccagagccacctctacctctcctacctccccctccacccagtgaggaagagggcccagaggaaccacctaaagcttctccagagagtgaggcttgcagtctctctgcaggagatctgagtgattcatctgcttccagcctagctgaaccagaatcccctggggctggagggaccagtgggggacctggaggtgggactggggttccagatggaatggggcagcggcgctacaggacccagatgagcagcctgcagctgaagatcatgaaagcctgctatgaagcttaccgcacccccaccatgcaggagtgtgaggtgctgggagaggagattgggctgcccaagagagtcatccaggtctggttccagaatgctcgtgccaaggaaaagaaggccaaactacaggggacagccgctgggagcactgggggcagcagtgagggcctcttagcagcccagcgcactgactgcccctattgtgatgtcaagtatgatttctatgtctcctgccgaggccatctcttttcccgtcagcacctggccaagctcaaggaggcggttcgagcccagctgaagagtgaaagcaagtgctacgacttggccccagcacctgaggctcccccagctctcaaggccccacctgccaccacacctgcctccatgcccctcggggctgccccaaccttgcctcgcctggcgccggtcctcttatctggcccagctctggctcagcccccgctgggcaacttagctcctttcaattcaggcccggcagcctcctcaggcctcctcggcctcgccacttcggtcctgcctaccaccacagtggtccagactgctggcccaggccgccccttacctcagagacccatgcccgaccaaaccaacacctccacagcaggcaccactgaccctgtcccaggccctcctactgagcccttgggggacaaggtctccagtgagcgaaagccagttgcaggccccaccagctcctccaatgatgccctcaagaacctcaaagcattgaagaccactgtcccagccctgttggggggccagttcctgccctttccattgccccctgctgggggaacagcaccgccagctgtctttggcccccagctacagggggcctacttccaacagctctatggcatgaagaaggggctatttcccatgaaccccatgatacctcagaccctcattgggctgctccccaatgccctcctccagccgccaccccagccccctgagcccacagccacagcacctccaaagcctcctgaactgcctgctccaggggagggggaagctggtgaggttgatgagctgctgacaggcagcactggcatctccaccgtggatgtaacccatcgctacctgtgccgccagtgcaagatggcatttgacggggaggccccggctactgcccaccagagatccttctgcttctttgggcggggctctgggggctccatgccacccccattgcgggtgcccatctgcacctaccactgcctggcatgtgaggtgctgctgagtgggcgtgaagccctagcctcccacctgcgctcctcggcccacaggcgcaaggcagccccacctcaagggggcccacccatctccatcaccaacgccgccactgctgcctcggctgctgtggcttttgccaaagaggaagcaagattacctcacacggactccaacccaaaaactacgactacctctacacttctagctttataaacagattaaccaagatggggagaggggagggcctcagggctccctcttttaccccaaggggtgttcggtgggagctcaaatccctcaccccaccccctggccccgcccacctcacaggaactgttcagttcccaccctcagtgggcaccacacaccccacttccagcagagtcctgcctcctcccaatccccacagacacacacattgatcctcctcctcagctccttgcagatgtagcccttgcccatcttcacagacacatacacccatcttggcaccctgattattcatacatgtctgcctaccacacacaaaatatatccttggttctatcttccttttcctcactgaattcccagctccccatccccataaatgcatacacatacatgcacacacacacgttatcccatgatgttccactgagaaaacaccaaaaaattttgaaaaagaagataaaaagaagaaacgaaaaagaaagcccaaggcaaagaagggggaaggaaaacaaacttcgccactctctcttctccttcctaaccctttgtctagagcaccacaccgctcacaaactctttccaaatgctcagttggctcccaaagttggagcctggcatgggcagggagcccacaaaactctaaccaaactggaggctggcatgggagaagtgcttctggttcactcttcctaccctctccctcctaaccctctccttgcctgacaggggagcccctgtggcctggactctaggggatgccgccaccagaaacccctctgccaatccctaccttgcaccctgggaactgcagtaacttattctcaaaggctttaaacacagagatcctctcagcggccgtgggcctgccccttgtcctagccctgccacgtgagggtccagcctccagggacaggcactgcccaccaacggcaaatccaaagttctttcaaaaaaaaaaactgaaacacaaccaaaaaagcaagagcgagagagagtacgtgcacacgcgcacaaaagagagaaacggacaccagaggaatgaactaaagaaaaacgtaaacttggaaaatacaga

SEQ ID NO: 50030 - DNA, 5851 bp, Homo sapiens
gtggggggtggtggtgaagccactaggctttttctcattgcaggctacaactgtagaaatgacatttacaaccaaagtgctgtctgcacccacattaagccctctggacaatggccaagaaccccccactcatgggccagagcctacaccgagcagagaccaggcagcaggtaaggaatggaacagcaaacctcccaaggtaccaggaaaggggactccatgggccaacaaggtctgaagatgactgaggccaaggtcaactgccttggtattgagtgggtggggtctggcttaaacgaagttccctcctcattgtactttcttctctctcccctagaaggccctaacctgaccccagaagccagtccagatcctcttcctgagcctcccctggcctcagttgaggtcccagacaaaccctcaggaagccctggccaacccccttctccagccccatctccagtccctgaacctgatgcccaagctgaagacgtagctcctccgcccaccatggctgaggaggaagaggggaccactggggagctccgctctgcagagccagctccagctgactctcgccaccctctgacctatcggaaaaccaccaactttgccctggacaagtttctcgaccctgcccggccctataagtgcactgtgtgtaaggagtccttcacccagaagaatattctgttggttcattataattctgtctcccaccttcacaagatgaagaaggctgccattgacccctctgcccctgcacggggagaggccggtgccccacccaccaccactgctgccacagacaagccctttaagtgcacagtctgcagagtctcctacaaccagagctccaccctggagatccacatgcggtcagttctgcatcagactcgctctcggggaaccaagactgattccaagattgaagggccagaacgcagccaagaagagcccaaggaaggcgagacagagggggaggtgggcactgagaagaagggccctgacaccagtggcttcatatctggattgcctttcctgtcccctcccccacctcccttggacctgcaccgattcccagcccctctcttcaccccaccagtcctgccccccttccctctggtgcccgaatcactgcttaagctccagcagcagcagctgctcctgcccttctacctccacgatctcaaggtggggcccaagctgacactagctgggcctgcacctgtgctgtccctgccagctgccacccctcctcctccaccccaacctcccaaggctgagctggctgagcgggagtgggagcggccccccatggccaaagagggtaatgaggcagggccttcctcaccccccgacccattgcccaacgaggctgcccgcactgcagccaaagcccttctagaaaactttggctttgagctggtgatccagtacaatgaagggaagcaagctgtgccccctccccctaccccacccccacctgaggccctcgggggtggggacaagctggcctgtggggcctgtgggaaactcttctccaatatgcttatcctcaagacacacgaggaacatgtccaccgccgctttctgccctttgaagccctgagccgttatgctgctcagtttcgaaagagctatgacagcctatacccgccccttgcagagcctcccaaacctcctgatgggtctctggattcacctgttccccatctgggcccacccttcctggtcccagagcctgaggcaggggggacccgtgcccctgaagagcgaagtcgagcagggggacactggcccatagaagaggaagaaagctccagagggaatcttcctcccctggtgcctgccggccgccggttctccagaaccaagttcacagagttccagacccaagccctgcagtctttctttgagactagcgcctaccccaaagacggagaggtggagcgactcgcaagtctgttgggtctggctagccgtgtggtggtggtgtggttccagaatgcccgccagaaagcacgcaaaaatgcctgtgagggtgggtccatgccaaccggaggaggcactgggggagcctccggctgcaggcgttgccacgccactttctcctgtgtttttgagttggtgcgccacctcaagaagtgctatgatgaccagacccttgaagaggaggaggaagaggcagagagaggggaagaggaggaagaggtggaagaagaagaagtagaggaggaacagggccttgaacctccagcagggcctgagggcccattaccagagcctccagatggggaggagctgagccaagcagaggcaacaaaggcaggaggcaaagagcctgaagagaaggctactccatcaccttccccagcccatacctgtgaccagtgtgccatttctttctccagccaggacctcctgaccagtcaccgccgactacatttcctgccatctctgcagcccagtgctcccccccaactcctagatctgcccttgctggtgtttggggagagaaaccccctggtggcagccacctcaccaatgccaggtccacctctcaaacggaagcatgaggacggcagcttgtctcccacaggcagtgaagcagggggaggaggggagggcgagccccccagggacaagcgcctgcgcaccaccatcttgcctgagcagctagagatcctgtaccgttggtacatgcaggattccaacccaacacgcaagatgctcgactgcatctccgaggaggtggggctcaaaaagcgagtggtacaggtctggttccagaataccagggcccgggagaggaaaggccagtttcgaagcacccctgggggggtgcctagtccagcagtgaaaccgcctgccacagccacccctgcatccttgcccaagttcaacctcttattaggcaaggtagatgatggcactgggagggaagccccaaagagggaagcacctgcttttccctaccccactgccacgcttgcttctgggccccagcctttcctaccacctgggaaagaggccaccaccccaacaccagagccacctctacctctcctacctccccctccacccagtgaggaagagggcccagaggaaccacctaaagcttctccagagagtgaggcttgcagtctctctgcaggagatctgagtgattcatctgcttccagcctagctgaaccagaatcccctggggctggagggaccagtgggggacctggaggtgggactggggttccagatggaatggggcagcggcgctacaggacccagatgagcagcctgcagctgaagatcatgaaagcctgctatgaagcttaccgcacccccaccatgcaggagtgtgaggtgctgggagaggagattgggctgcccaagagagtcatccaggtctggttccagaatgctcgtgccaaggaaaagaaggccaaactacaggggacagccgctgggagcactgggggcagcagtgagggcctcttagcagcccagcgcactgactgcccctattgtgatgtcaagtatgatttctatgtctcctgccgaggccatctcttttcccgtcagcacctggccaagctcaaggaggcggttcgagcccagctgaagagtgaaagcaagtgctacgacttggccccagcacctgaggctcccccagctctcaaggccccacctgccaccacacctgcctccatgcccctcggggctgccccaaccttgcctcgcctggcgccggtcctcttatctggcccagctctggctcagcccccgctgggcaacttagctcctttcaattcaggcccggcagcctcctcaggcctcctcggcctcgccacttcggtcctgcctaccaccacagtggtccagactgctggcccaggccgccccttacctcagagacccatgcccgaccaaaccaacacctccacagcaggcaccactgaccctgtcccaggccctcctactgagcccttgggggacaaggtctccagtgagcgaaagccagttgcaggccccaccagctcctccaatgatgccctcaagaacctcaaagcattgaagaccactgtcccagccctgttggggggccagttcctgccctttccattgccccctgctgggggaacagcaccgccactacagggggcctacttccaacagctctatggcatgaagaaggggctatttcccatgaaccccatgatacctcagaccctcattgggctgctccccaatgccctcctccagccgccaccccagccccctgagcccacagccacagcacctccaaagcctcctgaactgcctgctccaggggagggggaagctggtgaggttgatgagctgctgacaggcagcactggcatctccaccgtggatgtaacccatcgctacctgtgccgccagtgcaagatggcatttgacggggaggccccggctactgcccaccagagatccttctgcttctttgggcggggctctgggggctccatgccacccccattgcgggtgcccatctgcacctaccactgcctggcatgtgaggtgctgctgagtgggcgtgaagccctagcctcccacctgcgctcctcggcccacaggcgcaaggcagccccacctcaagggggcccacccatctccatcaccaacgccgccactgctgcctcggctgctgtggcttttgccaaagaggaagcaagattacctcacacggactccaacccaaaaactacgactacctctacacttctagctttataaacagattaaccaagatggggagaggggagggcctcagggctccctcttttaccccaaggggtgttcggtgggagctcaaatccctcaccccaccccctggccccgcccacctcacaggaactgttcagttcccaccctcagtgggcaccacacaccccacttccagcagagtcctgcctcctcccaatccccacagacacacacattgatcctcctcctcagctccttgcagatgtagcccttgcccatcttcacagacacatacacccatcttggcaccctgattattcatacatgtctgcctaccacacacaaaatatatccttggttctatcttccttttcctcactgaattcccagctccccatccccataaatgcatacacatacatgcacacacacacgttatcccatgatgttccactgagaaaacaccaaaaaattttgaaaaagaagataaaaagaagaaacgaaaaagaaagcccaaggcaaagaagggggaaggaaaacaaacttcgccactctctcttctccttcctaaccctttgtctagagcaccacaccgctcacaaactctttccaaatgctcagttggctcccaaagttggagcctggcatgggcagggagcccacaaaactctaaccaaactggaggctggcatgggagaagtgcttctggttcactcttcctaccctctccctcctaaccctctccttgcctgacaggggagcccctgtggcctggactctaggggatgccgccaccagaaacccctctgccaatccctaccttgcaccctgggaactgcagtaacttattctcaaaggctttaaacacagagatcctctcagcggccgtgggcctgccccttgtcctagccctgccacgtgagggtccagcctccagggacaggcactgcccaccaacggcaaatccaaagttctttcaaaaaaaaaaactgaaacacaaccaaaaaagcaagagcgagagagagtacgtgcacacgcgcacaaaagagagaaacggacaccagaggaatgaactaaagaaaaacgtaaacttggaaaatacaga

SEQ ID NO: 50031 - DNA, 5792 bp, Homo sapiens
gtggggggtggtggtgaagccactaggctttttctcattgcaggctacaactgtagaaatgacatttacaaccaaagtgctgtctgcacccacattaagccctctggacaatggccaagaaccccccactcatgggccagagcctacaccgagcagagaccaggcagcaggtaaggaatggaacagcaaacctcccaaggtaccaggaaaggggactccatgggccaacaaggtctgaagatgactgaggccaaggtcaactgccttggtattgagtgggtggggtctggcttaaacgaagttccctcctcattgtactttcttctctctcccctagaaggccctaacctgaccccagaagccagtccagatcctcttcctgagcctcccctggcctcagttgaggtcccagacaaaccctcaggaagccctggccaacccccttctccagccccatctccagtccctgaacctgatgcccaagctgaagacgtagctcctccgcccaccatggctgaggaggaagaggggaccactggggagctccgctctgcagagccagctccagctgactctcgccaccctctgacctatcggaaaaccaccaactttgccctggacaagtttctcgaccctgcccggccctataagtgcactgtgtgtaaggagtccttcacccagaagaatattctgttggttcattataattctgtctcccaccttcacaagatgaagaaggctgccattgacccctctgcccctgcacggggagaggccggtgccccacccaccaccactgctgccacagacaagccctttaagtgcacagtctgcagagtctcctacaaccagagctccaccctggagatccacatgcggtcagttctgcatcagactcgctctcggggaaccaagactgattccaagattgaagggccagaacgcagccaagaagagcccaaggaaggcgagacagagggggaggtgggcactgagaagaagggccctgacaccagtggcttcatatctggattgcctttcctgtcccctcccccacctcccttggacctgcaccgattcccagcccctctcttcaccccaccagtcctgccccccttccctctggtgcccgaatcactgcttaagctccagcagcagcagctgctcctgcccttctacctccacgatctcaaggtggggcccaagctgacactagctgggcctgcacctgtgctgtccctgccagctgccacccctcctcctccaccccaacctcccaaggctgagctggctgagcgggagtgggagcggccccccatggccaaagagggtaatgaggcagggccttcctcaccccccgacccattgcccaacgaggctgcccgcactgcagccaaagcccttctagaaaactttggctttgagctggtgatccagtacaatgaagggaagcaagctgtgccccctccccctaccccacccccacctgaggccctcgggggtggggacaagctggcctgtggggcctgtgggaaactcttctccaatatgcttatcctcaagacacacgaggaacatgtccaccgccgctttctgccctttgaagccctgagccgttatgctgctcagtttcgaaagagctatgacagcctatacccgccccttgcagagcctcccaaacctcctgatgggtctctggattcacctgttccccatctgggcccacccttcctggtcccagagcctgaggcaggggggacccgtgcccctgaagagcgaagtcgagcagggggacactggcccatagaagaggaagaaagctccagagggaatcttcctcccctggtgcctgccggccgccggttctccagaaccaagttcacagagttccagacccaagccctgcagtctttctttgagactagcgcctaccccaaagacggagaggtggagcgactcgcaagtctgttgggtctggctagccgtgtggtggtggtgtggttccagaatgcccgccagaaagcacgcaaaaatgcctgtgagggtgggtccatgccaaccggaggaggcactgggggagcctccggctgcaggcgttgccacgccactttctcctgtgtttttgagttggtgcgccacctcaagaagtgctatgatgaccagacccttgaagaggaggaggaagaggcagagagaggggaagaggaggaagaggtggaagaagaagaagtagaggaggaacagggccttgaacctccagcagggcctgagggcccattaccagagcctccagatggggaggagctgagccaagcagaggcaacaaaggcaggaggcaaagagcctgaagagaaggctactccatcaccttccccagcccatacctgtgaccagtgtgccatttctttctccagccaggacctcctgaccagtcaccgccgactacatttcctgccatctctgcagcccagtgctcccccccaactcctagatctgcccttgctggtgtttggggagagaaaccccctggtggcagccacctcaccaatgccaggtccacctctcaaacggaagcatgaggacggcagcttgtctcccacaggcagtgaagcagggggaggaggggagggcgagccccccagggacaagcgcctgcgcaccaccatcttgcctgagcagctagagatcctgtaccgttggtacatgcaggattccaacccaacacgcaagatgctcgactgcatctccgaggaggtggggctcaaaaagcgagtggtacaggtctggttccagaataccagggcccgggagaggaaaggccagtttcgaagcacccctgggggggtgcctagtccagcagtgaaaccgcctgccacagccacccctgcatccttgcccaagttcaacctcttattaggcaaggtagatgatggcactgggagggaagccccaaagagggaagcacctgcttttccctaccccactgccacgcttgcttctgggccccagcctttcctaccacctgggaaagaggccaccaccccaacaccagagccacctctacctctcctacctccccctccacccagtgaggaagagggcccagaggaaccacctaaagcttctccagagagtgaggcttgcagtctctctgcaggagatctgagtgattcatctgcttccagcctagctgaaccagaatcccctggggctggagggaccagtgggggacctggaggtgggactggggttccagatggaatggggcagcggcgctacaggacccagatgagcagcctgcagctgaagatcatgaaagcctgctatgaagcttaccgcacccccaccatgcaggagtgtgaggtgctgggagaggagattgggctgcccaagagagtcatccaggtctggttccagaatgctcgtgccaaggaaaagaaggccaaactacaggggacagccgctgggagcactgggggcagcagtgagggcctcttagcagcccagcgcactgactgcccctattgtgatgtcaagtatgatttctatgtctcctgccgaggccatctcttttcccgtcagcacctggccaagctcaaggaggcggttcgagcccagctgaagagtgaaagcaagtgctacgacttggccccagcacctgaggctcccccagctctcaaggccccacctgccaccacacctgcctccatgcccctcggggctgccccaaccttgcctcgcctggcgccggtcctcttatctggcccagctctggctcagcccccgctgggcaacttagctcctttcaattcaggcccggcagcctcctcaggcctcctcggcctcgccacttcggtcctgcctaccaccacagtggtccagactgctggcccaggccgccccttacctcagagacccatgcccgaccaaaccaacacctccacagcaggcaccactgaccctgtcccaggccctcctactgagcccttgggggacaaggtctccagtgagcgaaagccagttgcaggccccaccagctcctccaatgatgccctcaagaacctcaaagcattgaagaccactgtcccagccctgttggggggccagttcctgccctttccattgccccctgctgggggaacagcaccgccactacagggggcctacttccaacagctctatggcatgaagaaggggctatttcccatgaaccccatgatacctcagaccctcattgggctgctccccaatgccctcctccagccgccaccccagccccctgagcccacagccacagcacctccaaagcctcctgaactgcctgctccaggggagggggaagctggtgaggttgatgagctgctgacaggcagcactggcatctccaccgtggatgtaacccatcgctacctgtgccgccagtgcaagatggcatttgacggggaggccccggctactgcccaccagagatccttctgcttctttgggcggggctctgggggctccatgccacccccattgcgggtgcccatctgcacctaccactgcctggcatgtgaggtgctgctgagtgggcgtgaagccctagcctcccacctgcgctcctcggcccacaggcgcaaggcagccccacctcaagggggcccacccatctccatcaccaacgccgccactgctgcctcggctgctgtggcttttgccaaagaggaagcaagattacctcacacggactccaacccaaaaactacgactacctctacacttctagctttataaacagattaaccaagatggggagaggggagggcctcagggctccctcttttaccccaaggggtgttcggtgggagctcaaatccctcaccccaccccctggccccgcccacctcacaggaactgttcagttcccaccctcagtgggcaccacacaccccacttccagcagagtcctgcctcctcccaatccccacagacacacacattgatcctcctcctcagctccttgcagatgtagcccttgcccatcttcacagacacatacacccatcttggcaccctgattattcatacatgtctgcctaccacacacaaaatatatccttggttctatcttccttttcctcactgaattcccagctccccatccccataaatgcatacacatacatgcacacacacacgttatcccatgatgttccactgagaaaacaccaaaaaattttgaaaaagaagataaaaagaagaaacgaaaaagaaagcccaaggcaaagaagggggaaggaaaacaaacttcgccactctctcttctccttcctaaccctttgtctagagcaccacaccgctcacaaactctttccaaatgctcagttggctcccaaagttggagcctggcatgggcagggagtcctaccctctccctcctaaccctctccttgcctgacaggggagcccctgtggcctggactctaggggatgccgccaccagaaacccctctgccaatccctaccttgcaccctgggaactgcagtaacttattctcaaaggctttaaacacagagatcctctcagcggccgtgggcctgccccttgtcctagccctgccacgtgagggtccagcctccagggacaggcactgcccaccaacggcaaatccaaagttctttcaaaaaaaaaaactgaaacacaaccaaaaaagcaagagcgagagagagtacgtgcacacgcgcacaaaagagagaaacggacaccagaggaatgaactaaagaaaaacgtaaacttggaaaatacaga

SEQ ID NO: 50032 - DNA, 603 bp, Homo sapiens
tcttgctctgtcattcaggctggagtgcagcagagcaatcatggctcactgtaacctcaaactcctgagctcaagcgatcctcccgcctcagctttccaaattgttggggctacagtcacatgtcaccacacccagctaaatgtaaaatatttagtctttttctattaggtataaaatacatatttaaaacattttaatcagctttcttcttgaaatctggcacaagtttctagattaaaacattaatatgatttcacaatgataaagtaaaaatgaaagcccattttcaagctcatttaaccactgcctcatcagcagatggtactatgggttatttgttaataaattctgcctgttctttcggatgaggggctttgagaggagtcagcttttacccccttatcagttaacaccggggaacctcatggtaaagccagagagacctattcaggtcagctctgcctcgtgttgccacaaacagcaaccttggaaacctcactatgctcaagtgactcatctacaaaataaaacgacctacccatcccacagcgttattatgagtatttaagaaaataatgtctctaaagcacccagcatacgga

SEQ ID NO: 50033 - DNA, 681 bp, Homo sapiens
tccaccccacagagaatgtctaatgagagcttttcccatgcctggggcagatggctctccacttgcaactcccagtgctgatactgtcattcagttgttcagccaccctagagacaggccaattgtcctgaagtggcttcctcgtacatggcataagctccctgaaggcaggacttgtctctcttgtccattgataggtcccctagcaaagtgcctggcatacaataggtgctcaatagctatttattggatggagggatggatggatggacatacagatagggaagaccctctttaccttgagaatcccaggggtattattatttatgattattttattatgcccatttcttttatcaaaatatgttagaagagctgaaagaggcaatcgccttgtctatctcattaacccaaagccctttggggtgctctgtttgcatcagccaagtacacatttgtcgtgcctgaagacacccgtgtgggcacctctgtgggctctctgtttgttgaggacccagatgagccccagaaccggatgaccaagtacagcatcttgcggggcgactaccaggacgctttcaccattgagacaaaccccgcccacaacgagggcatcatcaagcccatgaaggtttgtaggccaatggcaacaatgtcaaacgtgaggcttggggctcttgg

SEQ ID NO: 50034 - DNA, 3843 bp, Homo sapiens
  misc_feature (1)..(1): n is a, c, g, or t
ngacggtcggctgacaggctccacagagctccactcacgctcaggccctggacggacaggcagtccaacggaacagaaacatccctcagcccacaggcacgatctgttcctcctgggaagatgcagaggctcatgatgctcctcgccacatcgggcgcctgcctgggcctgctggcagtggcagcagtggcagcagcaggtgctaaccctgcccaacgggacacccacagcctgctgcccacccaccggcgccaaaagagagattggatttggaaccagatgcacattgatgaagagaaaaacacctcacttccccatcatgtaggcaagatcaagtcaagcgtgagtcgcaagaatgccaagtacctgctcaaaggagaatatgtgggcaaggtcttccgggtcgatgcagagacaggagacgtgttcgccattgagaggctggaccgggagaatatctcagagtaccacctcactgctgtcattgtggacaaggacactggtgaaaacctggagactccttccagcttcaccatcaaagttcatgacgtgaacgacaactggcctgtgttcacgcatcggttgttcaatgcgtccgtgcctgagtcgtcggctgtggggacctcagtcatctctgtgacagcagtggatgcagacgaccccactgtgggagaccacgcctctgtcatgtaccaaatcctgaaggggaaagagtattttgccatcgataattctggacgtattatcacaataacgaaaagcttggaccgagagaagcaggccaggtatgagatcgtggtggaagcgcgagatgcccagggcctccggggggactcgggcacggccaccgtgctggtcactctgcaagacatcaatgacaacttccccttcttcacccagaccaagtacacatttgtcgtgcctgaagacacccgtgtgggcacctctgtgggctctctgtttgttgaggacccagatgagccccagaaccggatgaccaagtacagcatcttgcggggcgactaccaggacgctttcaccattgagacaaaccccgcccacaacgagggcatcatcaagcccatgaagcctctggattatgaatacatccagcaatacagcttcatcgtcgaggccacagaccccaccatcgacctccgatacatgagccctcccgcgggaaacagagcccaggtcattatcaacatcacagatgtggacgagccccccattttccagcagcctttctaccacttccagctgaaggaaaaccagaagaagcctctgattggcacagtgctggccatggaccctgatgcggctaggcatagcattggatactccatccgcaggaccagtgacaagggccagttcttccgagtcacaaaaaagggggacatttacaatgagaaagaactggacagagaagtctacccctggtataacctgactgtggaggccaaagaactggattccactggaacccccacaggaaaagaatccattgtgcaagtccacattgaagttttggatgagaatgacaatgccccggagtttgccaagccctaccagcccaaagtgtgtgagaacgctgtccatggccagctggtcctgcagatctccgcaatagacaaggacataacaccacgaaacgtgaagttcaaattcaccttgaatactgagaacaactttaccctcacggataatcacgataacacggccaacatcacagtcaagtatgggcagtttgaccgggagcataccaaggtccacttcctacccgtggtcatctcagacaatgggatgccaagtcgcacgggcaccagcacgctgaccgtggccgtgtgcaagtgcaacgagcagggcgagttcaccttctgcgaggatatggccgcccaggtgggcgtgagcatccaggcagtggtagccatcttactctgcatcctcaccatcacagtgatcaccctgctcatcttcctgcggcggcggctccggaagcaggcccgcgcgcacggcaagagcgtgccggagatccacgagcagctggtcacctacgacgaggagggcggcggcgagatggacaccaccagctacgatgtgtcggtgctcaactcggtgcgccgcggcggggccaagcccccgcggcccgcgctggacgcccggccttccctctatgcgcaggtgcagaagccaccgaggcacgcgcctggggcacacggagggcccggggagatggcagccatgatcgaggtgaagaaggacgaggcggaccacgacggcgacggccccccctacgacacgctgcacatctacggctacgagggctccgagtccatagccgagtccctcagctccctgggcaccgactcatccgactctgacgtggattacgacttccttaacgactggggacccaggtttaagatgctggctgagctgtacggctcggacccccgggaggagctgctgtattaggcggccgaggtcactctgggcctggggacccaaaccccctgcagcccaggccagtcagtcgccaggcaccacagcctccaaaaatggcagtgactccccagcccagcaccccttcctcgtgggtcccagagacctcatcagccttgggatagcaaactccaggttcctgaaatatccaggaatatatgtcagtgatgactattctcaaatgctggcaaatccaggctggtgttctgtctgggctcagacatccacataaccctgtcacccacagaccgccgtctaactcaaagacttcctctggctccccaaggctgcaaagcaaaacagactgtgtttaactgctgcagggtctttttctagggtccctgaacgccctggtaaggctggtgaggtcctggtgcctatctgcctggaggcaaaggcctggacagcttgacttgtggggcaggattctctgcagcccattcccaagggagactgaccatcatgccctctctcgggagccctagccctgctccaactccatactccactccaagtgccccaccactccccaacccctctccaggcctgtcaagagggaggaaggggccccatggcagctcctgaccttgggtcctgaagtgacctcactggcctgccatgccagtaactgtgctgtactgagcactgaaccacattcagggaaatggcttattaaactttgaagcaactgtgaattcattctggaggggcagtggagatcaggagtgacagatcacagggtgagggccacctccacacccaccccctctggagaaggcctggaagagctgagaccttgctttgagactcctcagcacccctccagttttgcctgagaaggggcagatgttcccggagcagaagacgtctccccttctctgcctcacctggtcgccaatccatgctctctttcttttctctgtctactccttatcccttggtttagaggaacccaagatgtggcctttagcaaaactggacaatgtccaaacccatctgggcaaagcccctcacactgcaagggattgtagataacactgacttgtttgttttaaccaataactagcttcttataatgatttttttactaatgatacttacaagtttctagctctcacagacatatagaataagggtttttgcataataagcaggttgttatttaggttaacaatattaattcaggttttttagttggaaaaacaattcctgtaaccttctattttctataattgtagtaattgctctacagataatgtctatatattggccaaactggtgcatgacaagtactgtatttttttatacctaaataaagaaaaatctttagcctgggcaaca

SEQ ID NO: 50035 - DNA, 3788 bp, Homo sapiens
  misc_feature (1)..(1): n is a, c, g, or t
ngacggtcggctgacaggctccacagagctccactcacgctcaggccctggacggacaggcagtccaacggaacagaaacatccctcagcccacaggcacgatctgttcctcctgggaagatgcagaggctcatgatgctcctcgccacatcgggcgcctgcctgggcctgctggcagtggcagcagtggcagcagcaggtgctaaccctgcccaacgggacacccacagcctgctgcccacccaccggcgccaaaagagagattggatttggaaccagatgcacattgatgaagagaaaaacacctcacttccccatcatgtaggcaagatcaagtcaagcgtgagtcgcaagaatgccaagtacctgctcaaaggagaatatgtgggcaaggtcttccgggtcgatgcagagacaggagacgtgttcgccattgagaggctggaccgggagaatatctcagagtaccacctcactgctgtcattgtggacaaggacactggtgaaaacctggagactccttccagcttcaccatcaaagttcatgacgtgaacgacaactggcctgtgttcacgcatcggttgttcaatgcgtccgtgcctgagtcgtcggctgtggggacctcagtcatctctgtgacagcagtggatgcagacgaccccactgtgggagaccacgcctctgtcatgtaccaaatcctgaaggggaaagagtattttgccatcgataattctggacgtattatcacaataacgaaaagcttggaccgagagaagcaggccaggtatgagatcgtggtggaagcgcgagatgcccagggcctccggggggactcgggcacggccaccgtgctggtcactctgcaagacatcaatgacaacttccccttcttcacccagaccaagtacacatttgtcgtgcctgaagacacccgtgtgggcacctctgtgggctctctgtttgttgaggacccagatgagccccagaaccggatgaccaagtacagcatcttgcggggcgactaccaggacgctttcaccattgagacaaaccccgcccacaacgagggcatcatcaagcccatgaagcctctggattatgaatacatccagcaatacagcttcatcgtcgaggccacagaccccaccatcgacctccgatacatgagccctcccgcgggaaacagagcccaggtcattatcaacatcacagatgtggacgagccccccattttccagcagcctttctaccacttccagctgaaggaaaaccagaagaagcctctgattggcacagtgctggccatggaccctgatgcggctaggcatagcattggatactccatccgcaggaccagtgacaagggccagttcttccgagtcacaaaaaagggggacatttacaatgagaaagaactggacagagaagtctacccctggtataacctgactgtggaggccaaagaactggattccactggaacccccacaggaaaagaatccattgtgcaagtccacattgaagttttggatgagaatgacaatgccccggagtttgccaagccctaccagcccaaagtgtgtgagaacgctgtccatggccagctggtcctgcagatctccgcaatagacaaggacataacaccacgaaacgtgaagttcaaattcaccttgaatactgagaacaactttaccctcacggataatcacgataacacggccaacatcacagtcaagtatgggcagtttgaccgggagcataccaaggtccacttcctacccgtggtcatctcagacaatgggatgccaagtcgcacgggcaccagcacgctgaccgtggccgtgtgcaagtgcaacgagcagggcgagttcaccttctgcgaggatatggccgcccaggtgggcgtgagcatccaggcagtggtagccatcttactctgcatcctcaccatcacagtgatcaccctgctcatcttcctgcggcggcggctccggaagcaggcccgcgcgcacggcaagagcgtgccggagatccacgagcagctggtcacctacgacgaggagggcggcggcgagatggacaccaccagctacgatgtgtcggtgctcaactcggtgcgccgcggcggggccaagcccccgcggcccgcgctggacgcccggccttccctctatgcgcaggtgcagaagccaccgaggcacgcgcctggggcacacggagggcccggggagatggcagccatgatcgaggtgaagaaggacgaggcggaccacgacggcgacggccccccctacgacacgctgcacatctacggctacgagggctccgagtccatagccgagtccctcagctccctgggcaccgactcatccgactctgacgtggattacgacttccttaacgactggggacccaggtttaagatgctggctgagctgtacggctcggacccccgggaggagctgctgtattaggcggccgaggtcactctgggcctggggacccaaaccccctgcagcccaggccagtcagtcgccaggcaccacagcctccaaaaatggcagtgactccccagcccagcaccccttcctcgtgggtcccagagacctcatcagccttgggatagcaaactccaggttcctgaaatatccaggaatatatgtcagtgatgactattctcaaatgctggcaaatccaggctggtgttctgtctgggctcagacatccacataaccctgtcacccacagaccgccgtctaactcaaagacttcctctggctccccaaggctgcaaagcaaaacagactgtgtttaactgctgcagggtctttttctagggtccctgaacgccctggtaaggctggtgaggtcctggtgcctatctgcctggaggcaaaggcctggacagcttgacttgtggggcaggattctctgcagcccattcccaagggagactgaccatcatgccctctctcgggagccctagccctgctccaactccatactccactccaagtgccccaccactccccaacccctctccaggcctgtcaagagggaggaaggggccccatggcagctcctgaccttgggtcctgaagtgacctcactggcctgccatgccagtaactgtgctgtactgagcactgaaccacattcagggaaatggcttattaaactttgaagcaactgtgaattcattctggaggggcagtggagatcaggagtgacagatcacagggtgagggccacctccacacccaccccctctggagaaggcctggaagagctgagaccttgctttgagactcctcagcacccctccagttttgcctgagaaggggcagatgttcccggagcagaagacgtctccccttctctgcctcacctggtcgccaatccatgctctctttcttttctctgtctactccttatcccttggtttagaggaacccaagatgtggcctttagcaaaactggacaatgtccaaacccactcatgactgcatgacggagccgagccatgtgtctttacacctcgctgttgtcacatctcagggaactgaccctcaggcacaccttgcagaaggcaaggccctgccctgcccaacctctgtggtcacccatgcatcttccactggaacgtttcactgcaaacacaccttggagaagtggcatcagtcaacagagaggggcagggaaggagacaccaagctcacccttcgtcatggaccgaggttcccactttttggcaaaaccccttttcccttataggggaattttaata

SEQ ID NO: 50036 - DNA, 3426 bp, Homo sapiens
  misc_feature (1)..(1): n is a, c, g, or t
ngacggtcggctgacaggctccacagagctccactcacgctcaggccctggacggacaggcagtccaacggaacagaaacatccctcagcccacaggcacgatctgttcctcctgggaagatgcagaggctcatgatgctcctcgccacatcgggcgcctgcctgggcctgctggcagtggcagcagtggcagcagcaggtgctaaccctgcccaacgggacacccacagcctgctgcccacccaccggcgccaaaagagagattggatttggaaccagatgcacattgatgaagagaaaaacacctcacttccccatcatgtaggcaagatcaagtcaagcgtgagtcgcaagaatgccaagtacctgctcaaaggagaatatgtgggcaaggtcttccgggtcgatgcagagacaggagacgtgttcgccattgagaggctggaccgggagaatatctcagagtaccacctcactgctgtcattgtggacaaggacactggtgaaaacctggagactccttccagcttcaccatcaaagttcatgacgtgaacgacaactggcctgtgttcacgcatcggttgttcaatgcgtccgtgcctgagtcgtcggctgtggggacctcagtcatctctgtgacagcagtggatgcagacgaccccactgtgggagaccacgcctctgtcatgtaccaaatcctgaaggggaaagagtattttgccatcgataattctggacgtattatcacaataacgaaaagcttggaccgagagaagcaggccaggtatgagatcgtggtggaagcgcgagatgcccagggcctccggggggactcgggcacggccaccgtgctggtcactctgcaagacatcaatgacaacttccccttcttcacccagaccaagtacacatttgtcgtgcctgaagacacccgtgtgggcacctctgtgggctctctgtttgttgaggacccagatgagccccagaaccggatgaccaagtacagcatcttgcggggcgactaccaggacgctttcaccattgagacaaaccccgcccacaacgagggcatcatcaagcccatgaagcctctggattatgaatacatccagcaatacagcttcatcgtcgaggccacagaccccaccatcgacctccgatacatgagccctcccgcgggaaacagagcccaggtcattatcaacatcacagatgtggacgagccccccattttccagcagcctttctaccacttccagctgaaggaaaaccagaagaagcctctgattggcacagtgctggccatggaccctgatgcggctaggcatagcattggatactccatccgcaggaccagtgacaagggccagttcttccgagtcacaaaaaagggggacatttacaatgagaaagaactggacagagaagtctacccctggtataacctgactgtggaggccaaagaactggattccactggaacccccacaggaaaagaatccattgtgcaagtccacattgaagttttggatgagaatgacaatgccccggagtttgccaagccctaccagcccaaagtgtgtgagaacgctgtccatggccagctggtcctgcagatctccgcaatagacaaggacataacaccacgaaacgtgaagttcaaattcaccttgaatactgagaacaactttaccctcacggataatcacgataacacggccaacatcacagtcaagtatgggcagtttgaccgggagcataccaaggtccacttcctacccgtggtcatctcagacaatgggatgccaagtcgcacgggcaccagcacgctgaccgtggccgtgtgcaagtgcaacgagcagggcgagttcaccttctgcgaggatatggccgcccaggtgggcgtgagcatccaggcagtggtagccatcttactctgcatcctcaccatcacagtgatcaccctgctcatcttcctgcggcggcggctccggaagcaggcccgcgcgcacggcaagagcgtgccggagatccacgagcagctggtcacctacgacgaggagggcggcggcgagatggacaccaccagctacgatgtgtcggtgctcaactcggtgcgccgcggcggggccaagcccccgcggcccgcgctggacgcccggccttccctctatgcgcaggtgcagaagccaccgaggcacgcgcctggggcacacggagggcccggggagatggcagccatgatcgaggtgaagaaggacgaggcggaccacgacggcgacggccccccctacgacacgctgcacatctacggctacgagggctccgagtccatagccgagtccctcagctccctgggcaccgactcatccgactctgacgtggattacgacttccttaacgactggggacccaggtttaagatgctggctgagctgtacggctcggacccccgggaggagctgctgtattaggcggccgaggtcactctgggcctggggacccaaaccccctgcagcccaggccagtcagtcgccaggcaccacagcctccaaaaatggcagtgactccccagcccagcaccccttcctcgtgggtcccagagacctcatcagccttgggatagcaaactccaggttcctgaaatatccaggaatatatgtcagtgatgactattctcaaatgctggcaaatccaggctggtgttctgtctgggctcagacatccacataaccctgtcacccacagaccgccgtctaactcaaagacttcctctggctccccaaggctgcaaagcaaaacagactgtgtttaactgctgcagggtctttttctagggtccctgaacgccctggtaaggctggtgaggtcctggtgcctatctgcctggaggcaaaggcctggacagcttgacttgtggggcaggattctctgcagcccattcccaagggagactgaccatcatgccctctctcgggagccctagccctgctccaactccatactccactccaagtgccccaccactccccaacccctctccaggcctgtcaagagggaggaaggggccccatggcagctcctgaccttgggtcctgaagtgacctcactggcctgccatgccagtaactgtgctgtactgagcactgaaccacattcagggaaatggcttattaaactttgaagcaactgtgaattcattctggaggggcagtggagatcaggagtgacagatcacagggtgagggccacctccacacccaccccctctggagaaggcctggaagagctgagaccttgctttgagactcctcagcacccctccagttttgcctgagaaggggcagatgttcccggagcagaagacgtctccccttctctgcctcacctgtgtcttaacgggatcgtctagatcacctcagcaa

SEQ ID NO: 50037 - DNA, 4177 bp, Homo sapiens
ctctatttatccatctgaccgctggctgcggtcagccctagggatcactaacccatcccaataggccccaggaaagagaaaaccacattcccgctcactgtattagagatggggttcccagcaggaaacagagcgaaccctgggaggccaattgaagagattttatgaagggactgcttcagagagatctgttcctcctgggaagatgcagaggctcatgatgctcctcgccacatcgggcgcctgcctgggcctgctggcagtggcagcagtggcagcagcaggtgctaaccctgcccaacgggacacccacagcctgctgcccacccaccggcgccaaaagagagattggatttggaaccagatgcacattgatgaagagaaaaacacctcacttccccatcatgtaggcaagatcaagtcaagcgtgagtcgcaagaatgccaagtacctgctcaaaggagaatatgtgggcaaggtcttccgggtcgatgcagagacaggagacgtgttcgccattgagaggctggaccgggagaatatctcagagtaccacctcactgctgtcattgtggacaaggacactggtgaaaacctggagactccttccagcttcaccatcaaagttcatgacgtgaacgacaactggcctgtgttcacgcatcggttgttcaatgcgtccgtgcctgagtcgtcggctgtggggacctcagtcatctctgtgacagcagtggatgcagacgaccccactgtgggagaccacgcctctgtcatgtaccaaatcctgaaggggaaagagtattttgccatcgataattctggacgtattatcacaataacgaaaagcttggaccgagagaagcaggccaggtatgagatcgtggtggaagcgcgagatgcccagggcctccggggggactcgggcacggccaccgtgctggtcactctgcaagacatcaatgacaacttccccttcttcacccagaccaagtacacatttgtcgtgcctgaagacacccgtgtgggcacctctgtgggctctctgtttgttgaggacccagatgagccccagaaccggatgaccaagtacagcatcttgcggggcgactaccaggacgctttcaccattgagacaaaccccgcccacaacgagggcatcatcaagcccatgaagcctctggattatgaatacatccagcaatacagcttcatcgtcgaggccacagaccccaccatcgacctccgatacatgagccctcccgcgggaaacagagcccaggtcattatcaacatcacagatgtggacgagccccccattttccagcagcctttctaccacttccagctgaaggaaaaccagaagaagcctctgattggcacagtgctggccatggaccctgatgcggctaggcatagcattggatactccatccgcaggaccagtgacaagggccagttcttccgagtcacaaaaaagggggacatttacaatgagaaagaactggacagagaagtctacccctggtataacctgactgtggaggccaaagaactggattccactggaacccccacaggaaaagaatccattgtgcaagtccacattgaagttttggatgagaatgacaatgccccggagtttgccaagccctaccagcccaaagtgtgtgagaacgctgtccatggccagctggtcctgcagatctccgcaatagacaaggacataacaccacgaaacgtgaagttcaaattcaccttgaatactgagaacaactttaccctcacggataatcacgataacacggccaacatcacagtcaagtatgggcagtttgaccgggagcataccaaggtccacttcctacccgtggtcatctcagacaatgggatgccaagtcgcacgggcaccagcacgctgaccgtggccgtgtgcaagtgcaacgagcagggcgagttcaccttctgcgaggatatggccgcccaggtgggcgtgagcatccaggcagtggtagccatcttactctgcatcctcaccatcacagtgatcaccctgctcatcttcctgcggcggcggctccggaagcaggcccgcgcgcacggcaagagcgtgccggagatccacgagcagctggtcacctacgacgaggagggcggcggcgagatggacaccaccagctacgatgtgtcggtgctcaactcggtgcgccgcggcggggccaagcccccgcggcccgcgctggacgcccggccttccctctatgcgcaggtgcagaagccaccgaggcacgcgcctggggcacacggagggcccggggagatggcagccatgatcgaggtgaagaaggacgaggcggaccacgacggcgacggccccccctacgacacgctgcacatctacggctacgagggctccgagtccatagccgagtccctcagctccctgggcaccgactcatccgactctgacgtggattacgacttccttaacgactggggacccaggtttaagatgctggctgagctgtacggctcggacccccgggaggagctgctgtattaggcggccgaggtcactctgggcctggggacccaaaccccctgcagcccaggccagtcagtcgccaggcaccacagcctccaaaaatggcagtgactccccagcccagcaccccttcctcgtgggtcccagagacctcatcagccttgggatagcaaactccaggttcctgaaatatccaggaatatatgtcagtgatgactattctcaaatgctggcaaatccaggctggtgttctgtctgggctcagacatccacataaccctgtcacccacagaccgccgtctaactcaaagacttcctctggctccccaaggctgcaaagcaaaacagactgtgtttaactgctgcagggtctttttctagggtccctgaacgccctggtaaggctggtgaggtcctggtgcctatctgcctggaggcaaaggcctggacagcttgacttgtggggcaggattctctgcagcccattcccaagggagactgaccatcatgccctctctcgggagccctagccctgctccaactccatactccactccaagtgccccaccactccccaacccctctccaggcctgtcaagagggaggaaggggccccatggcagctcctgaccttgggtcctgaagtgacctcactggcctgccatgccagtaactgtgctgtactgagcactgaaccacattcagggaaatggcttattaaactttgaagcaactgtgaattcattctggaggggcagtggagatcaggagtgacagatcacagggtgagggccacctccacacccaccccctctggagaaggcctggaagagctgagaccttgctttgagactcctcagcacccctccagttttgcctgagaaggggcagatgttcccggagcagaagacgtctccccttctctgcctcacctggtcgccaatccatgctctctttcttttctctgtctactccttatcccttggtttagaggaacccaagatgtggcctttagcaaaactggacaatgtccaaacccactcatgactgcatgacggagccgagccatgtgtctttacacctcgctgttgtcacatctcagggaactgaccctcaggcacaccttgcagaaggcaaggccctgccctgcccaacctctgtggtcacccatgcatcttccactggaacgtttcactgcaaacacaccttggagaagtggcatcagtcaacagagaggggcagggaaggagacaccaagctcacccttcgtcatggaccgaggttcccactctgggcaaagcccctcacactgcaagggattgtagataacactgacttgtttgttttaaccaataactagcttcttataatgatttttttactaatgatacttacaagtttctagctctcacagacatatagaataagggtttttgcataataagcaggttgttatttaggttaacaatattaattcaggttttttagttggaaaaacaattcctgtaaccttctattttctataattgtagtaattgctctacagataatgtctatatattggccaaactggtgcatgacaagtactgtatttttttatacctaaataaagaaaaatctttagcctgggcaaca

SEQ ID NO: 50038 - DNA, 4027 bp, Homo sapiens
ataggctagtatgagctgggtttaatcggcagaggtatctgttcctcctgggaagatgcagaggctcatgatgctcctcgccacatcgggcgcctgcctgggcctgctggcagtggcagcagtggcagcagcaggtgctaaccctgcccaacgggacacccacagcctgctgcccacccaccggcgccaaaagagagattggatttggaaccagatgcacattgatgaagagaaaaacacctcacttccccatcatgtaggcaagatcaagtcaagcgtgagtcgcaagaatgccaagtacctgctcaaaggagaatatgtgggcaaggtcttccgggtcgatgcagagacaggagacgtgttcgccattgagaggctggaccgggagaatatctcagagtaccacctcactgctgtcattgtggacaaggacactggtgaaaacctggagactccttccagcttcaccatcaaagttcatgacgtgaacgacaactggcctgtgttcacgcatcggttgttcaatgcgtccgtgcctgagtcgtcggctgtggggacctcagtcatctctgtgacagcagtggatgcagacgaccccactgtgggagaccacgcctctgtcatgtaccaaatcctgaaggggaaagagtattttgccatcgataattctggacgtattatcacaataacgaaaagcttggaccgagagaagcaggccaggtatgagatcgtggtggaagcgcgagatgcccagggcctccggggggactcgggcacggccaccgtgctggtcactctgcaagacatcaatgacaacttccccttcttcacccagaccaagtacacatttgtcgtgcctgaagacacccgtgtgggcacctctgtgggctctctgtttgttgaggacccagatgagccccagaaccggatgaccaagtacagcatcttgcggggcgactaccaggacgctttcaccattgagacaaaccccgcccacaacgagggcatcatcaagcccatgaagcctctggattatgaatacatccagcaatacagcttcatcgtcgaggccacagaccccaccatcgacctccgatacatgagccctcccgcgggaaacagagcccaggtcattatcaacatcacagatgtggacgagccccccattttccagcagcctttctaccacttccagctgaaggaaaaccagaagaagcctctgattggcacagtgctggccatggaccctgatgcggctaggcatagcattggatactccatccgcaggaccagtgacaagggccagttcttccgagtcacaaaaaagggggacatttacaatgagaaagaactggacagagaagtctacccctggtataacctgactgtggaggccaaagaactggattccactggaacccccacaggaaaagaatccattgtgcaagtccacattgaagttttggatgagaatgacaatgccccggagtttgccaagccctaccagcccaaagtgtgtgagaacgctgtccatggccagctggtcctgcagatctccgcaatagacaaggacataacaccacgaaacgtgaagttcaaattcaccttgaatactgagaacaactttaccctcacggataatcacgataacacggccaacatcacagtcaagtatgggcagtttgaccgggagcataccaaggtccacttcctacccgtggtcatctcagacaatgggatgccaagtcgcacgggcaccagcacgctgaccgtggccgtgtgcaagtgcaacgagcagggcgagttcaccttctgcgaggatatggccgcccaggtgggcgtgagcatccaggcagtggtagccatcttactctgcatcctcaccatcacagtgatcaccctgctcatcttcctgcggcggcggctccggaagcaggcccgcgcgcacggcaagagcgtgccggagatccacgagcagctggtcacctacgacgaggagggcggcggcgagatggacaccaccagctacgatgtgtcggtgctcaactcggtgcgccgcggcggggccaagcccccgcggcccgcgctggacgcccggccttccctctatgcgcaggtgcagaagccaccgaggcacgcgcctggggcacacggagggcccggggagatggcagccatgatcgaggtgaagaaggacgaggcggaccacgacggcgacggccccccctacgacacgctgcacatctacggctacgagggctccgagtccatagccgagtccctcagctccctgggcaccgactcatccgactctgacgtggattacgacttccttaacgactggggacccaggtttaagatgctggctgagctgtacggctcggacccccgggaggagctgctgtattaggcggccgaggtcactctgggcctggggacccaaaccccctgcagcccaggccagtcagtcgccaggcaccacagcctccaaaaatggcagtgactccccagcccagcaccccttcctcgtgggtcccagagacctcatcagccttgggatagcaaactccaggttcctgaaatatccaggaatatatgtcagtgatgactattctcaaatgctggcaaatccaggctggtgttctgtctgggctcagacatccacataaccctgtcacccacagaccgccgtctaactcaaagacttcctctggctccccaaggctgcaaagcaaaacagactgtgtttaactgctgcagggtctttttctagggtccctgaacgccctggtaaggctggtgaggtcctggtgcctatctgcctggaggcaaaggcctggacagcttgacttgtggggcaggattctctgcagcccattcccaagggagactgaccatcatgccctctctcgggagccctagccctgctccaactccatactccactccaagtgccccaccactccccaacccctctccaggcctgtcaagagggaggaaggggccccatggcagctcctgaccttgggtcctgaagtgacctcactggcctgccatgccagtaactgtgctgtactgagcactgaaccacattcagggaaatggcttattaaactttgaagcaactgtgaattcattctggaggggcagtggagatcaggagtgacagatcacagggtgagggccacctccacacccaccccctctggagaaggcctggaagagctgagaccttgctttgagactcctcagcacccctccagttttgcctgagaaggggcagatgttcccggagcagaagacgtctccccttctctgcctcacctggtcgccaatccatgctctctttcttttctctgtctactccttatcccttggtttagaggaacccaagatgtggcctttagcaaaactggacaatgtccaaacccactcatgactgcatgacggagccgagccatgtgtctttacacctcgctgttgtcacatctcagggaactgaccctcaggcacaccttgcagaaggcaaggccctgccctgcccaacctctgtggtcacccatgcatcttccactggaacgtttcactgcaaacacaccttggagaagtggcatcagtcaacagagaggggcagggaaggagacaccaagctcacccttcgtcatggaccgaggttcccactctgggcaaagcccctcacactgcaagggattgtagataacactgacttgtttgttttaaccaataactagcttcttataatgatttttttactaatgatacttacaagtttctagctctcacagacatatagaataagggtttttgcataataagcaggttgttatttaggttaacaatattaattcaggttttttagttggaaaaacaattcctgtaaccttctattttctataattgtagtaattgctctacagataatgtctatatattggccaaactggtgcatgacaagtactgtatttttttatacctaaataaagaaaaatctttagcctgggcaaca

SEQ ID NO: 50039 - DNA, 1263 bp, Homo sapiens
gcgcttggtcatctagaggatccctaaagacgctggtgaggtcctggtgcctatctgcctggaggcaaaggcctggacagcttgacttgtggggcaggattctctgcagcccattcccaagggagactgaccatcatgccctctctcgggagccctagccctgctccaactccatactccactccaagtgccccaccactccccaacccctctccaggcctgtcaagagggaggaaggggccccatggcagctcctgaccttgggtcctgaagtgacctcactggcctgccatgccagtaactgtgctgtactgagcactgaaccacattcagggaaatggcttattaaactttgaagcaactgtgaattcattctggaggggcagtggagatcaggagtgacagatcacagggtgagggccacctccacacccaccccctctggagaaggcctggaagagctgagaccttgctttgagactcctcagcacccctccagttttgcctgagaaggggcagatgttcccggagcagaagacgtctccccttctctgcctcacctggtcgccaatccatgctctctttcttttctctgtctactccttatcccttggtttagaggaacccaagatgtggcctttagcaaaactggacaatgtccaaacccactcatgactgcatgacggagccgagccatgtgtctttacacctcgctgttgtcacatctcagggaactgaccctcaggcacaccttgcagaaggcaaggccctgccctgcccaacctctgtggtcacccatgcatcttccactggaacgtttcactgcaaacacaccttggagaagtggcatcagtcaacagagaggggcagggaaggagacaccaagctcacccttcgtcatggaccgaggttcccactctgggcaaagcccctcacactgcaagggattgtagataacactgacttgtttgttttaaccaataactagcttcttataatgatttttttactaatgatacttacaagtttctagctctcacagacatatagaataagggtttttgcataataagcaggttgttatttaggttaacaatattaattcaggttttttagttggaaaaacaattcctgtaaccttctattttctataattgtagtaattgctctacagataatgtctatatattggccaaactggtgcatgacaagtactgtatttttttatacctaaataaagaaaaatctttagcctgggcaaca

SEQ ID NO: 50040 - DNA, 334 bp, Homo sapiens
tggaccctgatgcggctaggcatagcattgggtaagggggcgtgtgtcgatgagaatgataaggacaatccggcctggatgttcctatgcctgctggtctgaggccaggactcagagaggggaactggcttctcctagcacttacagggaaagtgacagaggcaagaccagaagcccaagctcttgcacttggcagcctggcatcttgacctgcctggactcccccacctagcatggtcctgggcatccagagctacttgtcctctgtccggccttgaaggcttattctctgcaccacagctctcaccagtcctatgtggtaagatctgacagt

SEQ ID NO: 50041 - DNA, 381 bp, Homo sapiens
aggcacacagccagggttgtgggtgtggccatgaggctgctgagatgaaatggggagcagctgaagacagacaccaggcccagccgctgtcttgatgacctcagaaatatcacttgtcgaggccatgggcccctcatctataaaatgggtgtcatcctggtactaccttgcatagttgctgtgcagatcatgtgccacacacatgcttggcccagagcaggcactcaccatcctttttccttacgcagcctctggattatgaatacatccagcaatacagcttcatcgtcgaggccacagaccccaccatcgacctccgatacatgagccctcccgcgggaaacagagcccaggtcattatcaacatcacagatgtggacg

SEQ ID NO: 50042 - DNA, 4548 bp, Homo sapiens
  misc_feature (1)..(1): n is a, c, g, or t
  misc_feature (4096)..(4096): n is a, c, g, or t
  misc_feature (4099)..(4099): n is a, c, g, or t
  misc_feature (4117)..(4117): n is a, c, g, or t
  misc_feature (4124)..(4124): n is a, c, g, or t
  misc_feature (4126)..(4126): n is a, c, g, or t
ngacggtcggctgacaggctccacagagctccactcacgctcaggccctggacggacaggcagtccaacggaacagaaacatccctcagcccacaggcacgatctgttcctcctgggaagatgcagaggctcatgatgctcctcgccacatcgggcgcctgcctgggcctgctggcagtggcagcagtggcagcagcaggtgctaaccctgcccaacgggacacccacagcctgctgcccacccaccggcgccaaaagagagattggatttggaaccagatgcacattgatgaagagaaaaacacctcacttccccatcatgtaggcaagatcaagtcaagcgtgagtcgcaagaatgccaagtacctgctcaaaggagaatatgtgggcaaggtcttccgggtcgatgcagagacaggagacgtgttcgccattgagaggctggaccgggagaatatctcagagtaccacctcactgctgtcattgtggacaaggacactggtgaaaacctggagactccttccagcttcaccatcaaagttcatgacgtgaacgacaactggcctgtgttcacgcatcggttgttcaatgcgtccgtgcctgagtcgtcggctgtggggacctcagtcatctctgtgacagcagtggatgcagacgaccccactgtgggagaccacgcctctgtcatgtaccaaatcctgaaggggaaagagtattttgccatcgataattctggacgtattatcacaataacgaaaagcttggaccgagagaagcaggccaggtatgagatcgtggtggaagcgcgagatgcccagggcctccggggggactcgggcacggccaccgtgctggtcactctgcaagacatcaatgacaacttccccttcttcacccagaccaagtacacatttgtcgtgcctgaagacacccgtgtgggcacctctgtgggctctctgtttgttgaggacccagatgagccccagaaccggatgaccaagtacagcatcttgcggggcgactaccaggacgctttcaccattgagacaaaccccgcccacaacgagggcatcatcaagcccatgaagcctctggattatgaatacatccagcaatacagcttcatcgtcgaggccacagaccccaccatcgacctccgatacatgagccctcccgcgggaaacagagcccaggtcattatcaacatcacagatgtggacgagccccccattttccagcagcctttctaccacttccagctgaaggaaaaccagaagaagcctctgattggcacagtgctggccatggaccctgatgcggctaggcatagcattggatactccatccgcaggaccagtgacaagggccagttcttccgagtcacaaaaaagggggacatttacaatgagaaagaactggacagagaagtctacccctggtataacctgactgtggaggccaaagaactggattccactggaacccccacaggaaaagaatccattgtgcaagtccacattgaagttttggatgagaatgacaatgccccggagtttgccaagccctaccagcccaaagtgtgtgagaacgctgtccatggccagctggtcctgcagatctccgcaatagacaaggacataacaccacgaaacgtgaagttcaaattcaccttgaatactgagaacaactttaccctcacggataatcacgataacacggccaacatcacagtcaagtatgggcagtttgaccgggagcataccaaggtccacttcctacccgtggtcatctcagacaatgggatgccaagtcgcacgggcaccagcacgctgaccgtggccgtgtgcaagtgcaacgagcagggcgagttcaccttctgcgaggatatggccgcccaggtgggcgtgagcatccaggcagtggtagccatcttactctgcatcctcaccatcacagtgatcaccctgctcatcttcctgcggcggcggctccggaagcaggcccgcgcgcacggcaagagcgtgccggagatccacgagcagctggtcacctacgacgaggagggcggcggcgagatggacaccaccagctacgatgtgtcggtgctcaactcggtgcgccgcggcggggccaagcccccgcggcccgcgctggacgcccggccttccctctatgcgcaggtgcagaagccaccgaggcacgcgcctggggcacacggagggcccggggagatggcagccatgatcgaggtgaagaaggacgaggcggaccacgacggcgacggccccccctacgacacgctgcacatctacggctacgagggctccgagtccatagccgagtccctcagctccctgggcaccgactcatccgactctgacgtggattacgacttccttaacgactggggacccaggtttaagatgctggctgagctgtacggctcggacccccgggaggagctgctgtattaggcggccgaggtcactctgggcctggggacccaaaccccctgcagcccaggccagtcagtcgccaggcaccacagcctccaaaaatggcagtgactccccagcccagcaccccttcctcgtgggtcccagagacctcatcagccttgggatagcaaactccaggttcctgaaatatccaggaatatatgtcagtgatgactattctcaaatgctggcaaatccaggctggtgttctgtctgggctcagacatccacataaccctgtcacccacagaccgccgtctaactcaaagacttcctctggctccccaaggctgcaaagcaaaacagactgtgtttaactgctgcagggtctttttctagggtccctgaacgccctggtaaggctggtgaggtcctggtgcctatctgcctggaggcaaaggcctggacagcttgacttgtggggcaggattctctgcagcccattcccaagggagactgaccatcatgccctctctcgggagccctagccctgctccaactccatactccactccaagtgccccaccactccccaacccctctccaggcctgtcaagagggaggaaggggccccatggcagctcctgaccttgggtcctgaagtgacctcactggcctgccatgccagtaactgtgctgtactgagcactgaaccacattcagggaaatggcttattaaactttgaagcaactgtgaattcattctggaggggcagtggagatcaggagtgacagatcacagggtgagggccacctccacacccaccccctctggagaaggcctggaagagctgagaccttgctttgagactcctcagcacccctccagttttgcctgagaaggggcagatgttcccggagcagaagacgtctccccttctctgcctcacctggtcgccaatccatgctctctttcttttctctgtctactccttatcccttggtttagaggaacccaagatgtggcctttagcaaaactggacaatgtccaaacccactcatgactgcatgacggagccgagccatgtgtctttacacctcgctgttgtcacatctcagggaactgaccctcaggcacaccttgcagaaggcaaggccctgccctgcccaacctctgtggtcacccatgcatcttccactggaacgtttcactgcaaacacaccttggagaagtggcatcagtcaacagagaggggcagggaaggagacaccaagctcacccttcgtcatggaccgaggttcccactctgggcaaagcccctcacactgcaagggattgtagataacactgacttgtttgttttaaccaataactagcttcttataatgatttttttactaatgatacttacaagtttctagctctcacagacatatagaataagggtttttgcataataagcaggttgttatttaggttaacaatattaattcaggttttttagttggaaaaacaattcctgtaaccttctattttctataattgtagtaattgctctacagataatgtctatatattggccaaactggtgcatgacaagtactgtatttttttatacctaaataaagaaaaatctttagcctgggcaacaaaanaanaaaacaacaaaaaacaanaaaaaananaaaaaaagaaaaaaaaaaagacaaacaaaagaaaaaaaaagaaaacaagaaaaaaaacaaaaaaaaacaacaaaaacagggcgagagaacaacaggagagcaacggaagggggagcgagaacagaagagcaacgacgagaggaggaggaagagcaagaaacacaagggggaggagagaaggaaagagggggacgaaacagaggggtacacaaggagagagcatgagtaggaacaaaaagaaggagagaggtggggtgaatggtagttaaaaaatagagaaggagagagcaggtggtgggggaacgaaagaatggggagagatgtagtgagaagataaaacgggaggaggggagagagaaaggggggcttcaggtgtggtgtatagagggagggagtagtataggggtggagtgagcgaagaa

SEQ ID NO: 50043 - DNA, 4092 bp, Homo sapiens
  misc_feature (1)..(1): n is a, c, g, or t
ngacggtcggctgacaggctccacagagctccactcacgctcaggccctggacggacaggcagtccaacggaacagaaacatccctcagcccacaggcacgatctgttcctcctgggaagatgcagaggctcatgatgctcctcgccacatcgggcgcctgcctgggcctgctggcagtggcagcagtggcagcagcaggtgctaaccctgcccaacgggacacccacagcctgctgcccacccaccggcgccaaaagagagattggatttggaaccagatgcacattgatgaagagaaaaacacctcacttccccatcatgtaggcaagatcaagtcaagcgtgagtcgcaagaatgccaagtacctgctcaaaggagaatatgtgggcaaggtcttccgggtcgatgcagagacaggagacgtgttcgccattgagaggctggaccgggagaatatctcagagtaccacctcactgctgtcattgtggacaaggacactggtgaaaacctggagactccttccagcttcaccatcaaagttcatgacgtgaacgacaactggcctgtgttcacgcatcggttgttcaatgcgtccgtgcctgagtcgtcggctgtggggacctcagtcatctctgtgacagcagtggatgcagacgaccccactgtgggagaccacgcctctgtcatgtaccaaatcctgaaggggaaagagtattttgccatcgataattctggacgtattatcacaataacgaaaagcttggaccgagagaagcaggccaggtatgagatcgtggtggaagcgcgagatgcccagggcctccggggggactcgggcacggccaccgtgctggtcactctgcaagacatcaatgacaacttccccttcttcacccagaccaagtacacatttgtcgtgcctgaagacacccgtgtgggcacctctgtgggctctctgtttgttgaggacccagatgagccccagaaccggatgaccaagtacagcatcttgcggggcgactaccaggacgctttcaccattgagacaaaccccgcccacaacgagggcatcatcaagcccatgaagcctctggattatgaatacatccagcaatacagcttcatcgtcgaggccacagaccccaccatcgacctccgatacatgagccctcccgcgggaaacagagcccaggtcattatcaacatcacagatgtggacgagccccccattttccagcagcctttctaccacttccagctgaaggaaaaccagaagaagcctctgattggcacagtgctggccatggaccctgatgcggctaggcatagcattggatactccatccgcaggaccagtgacaagggccagttcttccgagtcacaaaaaagggggacatttacaatgagaaagaactggacagagaagtctacccctggtataacctgactgtggaggccaaagaactggattccactggaacccccacaggaaaagaatccattgtgcaagtccacattgaagttttggatgagaatgacaatgccccggagtttgccaagccctaccagcccaaagtgtgtgagaacgctgtccatggccagctggtcctgcagatctccgcaatagacaaggacataacaccacgaaacgtgaagttcaaattcaccttgaatactgagaacaactttaccctcacggataatcacgataacacggccaacatcacagtcaagtatgggcagtttgaccgggagcataccaaggtccacttcctacccgtggtcatctcagacaatgggatgccaagtcgcacgggcaccagcacgctgaccgtggccgtgtgcaagtgcaacgagcagggcgagttcaccttctgcgaggatatggccgcccaggtgggcgtgagcatccaggcagtggtagccatcttactctgcatcctcaccatcacagtgatcaccctgctcatcttcctgcggcggcggctccggaagcaggcccgcgcgcacggcaagagcgtgccggagatccacgagcagctggtcacctacgacgaggagggcggcggcgagatggacaccaccagctacgatgtgtcggtgctcaactcggtgcgccgcggcggggccaagcccccgcggcccgcgctggacgcccggccttccctctatgcgcaggtgcagaagccaccgaggcacgcgcctggggcacacggagggcccggggagatggcagccatgatcgaggtgaagaaggacgaggcggaccacgacggcgacggccccccctacgacacgctgcacatctacggctacgagggctccgagtccatagccgagtccctcagctccctgggcaccgactcatccgactctgacgtggattacgacttccttaacgactggggacccaggtttaagatgctggctgagctgtacggctcggacccccgggaggagctgctgtattaggcggccgaggtcactctgggcctggggacccaaaccccctgcagcccaggccagtcagtcgccaggcaccacagcctccaaaaatggcagtgactccccagcccagcaccccttcctcgtgggtcccagagacctcatcagccttgggatagcaaactccaggttcctgaaatatccaggaatatatgtcagtgatgactattctcaaatgctggcaaatccaggctggtgttctgtctgggctcagacatccacataaccctgtcacccacagaccgccgtctaactcaaagacttcctctggctccccaaggctgcaaagcaaaacagactgtgtttaactgctgcagggtctttttctagggtccctgaacgccctggtaaggctggtgaggtcctggtgcctatctgcctggaggcaaaggcctggacagcttgacttgtggggcaggattctctgcagcccattcccaagggagactgaccatcatgccctctctcgggagccctagccctgctccaactccatactccactccaagtgccccaccactccccaacccctctccaggcctgtcaagagggaggaaggggccccatggcagctcctgaccttgggtcctgaagtgacctcactggcctgccatgccagtaactgtgctgtactgagcactgaaccacattcagggaaatggcttattaaactttgaagcaactgtgaattcattctggaggggcagtggagatcaggagtgacagatcacagggtgagggccacctccacacccaccccctctggagaaggcctggaagagctgagaccttgctttgagactcctcagcacccctccagttttgcctgagaaggggcagatgttcccggagcagaagacgtctccccttctctgcctcacctggtcgccaatccatgctctctttcttttctctgtctactccttatcccttggtttagaggaacccaagatgtggcctttagcaaaactggacaatgtccaaacccactcatgactgcatgacggagccgagccatgtgtctttacacctcgctgttgtcacatctcagggaactgaccctcaggcacaccttgcagaaggcaaggccctgccctgcccaacctctgtggtcacccatgcatcttccactggaacgtttcactgcaaacacaccttggagaagtggcatcagtcaacagagaggggcagggaaggagacaccaagctcacccttcgtcatggaccgaggttcccactctgggcaaagcccctcacactgcaagggattgtagataacactgacttgtttgttttaaccaataactagcttcttataatgatttttttactaatgatacttacaagtttctagctctcacagacatatagaataagggtttttgcataataagcaggttgttatttaggttaacaatattaattcaggttttttagttggaaaaacaattcctgtaaccttctattttctataattgtagtaattgctctacagataatgtctatatattggccaaactggtgcatgacaagtactgtatttttttatacctaaataaagaaaaatctttagcctgggcaaca

SEQ ID NO: 50044 - DNA, 3824 bp, Homo sapiens
  misc_feature (1)..(1): n is a, c, g, or t
ngacggtcggctgacaggctccacagagctccactcacgctcaggccctggacggacaggcagtccaacggaacagaaacatccctcagcccacaggcacgatctgttcctcctgggaagatgcagaggctcatgatgctcctcgccacatcgggcgcctgcctgggcctgctggcagtggcagcagtggcagcagcaggtgctaaccctgcccaacgggacacccacagcctgctgcccacccaccggcgccaaaagagagattggatttggaaccagatgcacattgatgaagagaaaaacacctcacttccccatcatgtaggcaagatcaagtcaagcgtgagtcgcaagaatgccaagtacctgctcaaaggagaatatgtgggcaaggtcttccgggtcgatgcagagacaggagacgtgttcgccattgagaggctggaccgggagaatatctcagagtaccacctcactgctgtcattgtggacaaggacactggtgaaaacctggagactccttccagcttcaccatcaaagttcatgacgtgaacgacaactggcctgtgttcacgcatcggttgttcaatgcgtccgtgcctgagtcgtcggctgtggggacctcagtcatctctgtgacagcagtggatgcagacgaccccactgtgggagaccacgcctctgtcatgtaccaaatcctgaaggggaaagagtattttgccatcgataattctggacgtattatcacaataacgaaaagcttggaccgagagaagcaggccaggtatgagatcgtggtggaagcgcgagatgcccagggcctccggggggactcgggcacggccaccgtgctggtcactctgcaagacatcaatgacaacttccccttcttcacccagaccaagtacacatttgtcgtgcctgaagacacccgtgtgggcacctctgtgggctctctgtttgttgaggacccagatgagccccagaaccggatgaccaagtacagcatcttgcggggcgactaccaggacgctttcaccattgagacaaaccccgcccacaacgagggcatcatcaagcccatgaagcctctggattatgaatacatccagcaatacagcttcatcgtcgaggccacagaccccaccatcgacctccgatacatgagccctcccgcgggaaacagagcccaggtcattatcaacatcacagatgtggacgagccccccattttccagcagcctttctaccacttccagctgaaggaaaaccagaagaagcctctgattggcacagtgctggccatggaccctgatgcggctaggcatagcattggatactccatccgcaggaccagtgacaagggccagttcttccgagtcacaaaaaagggggacatttacaatgagaaagaactggacagagaagtctacccctggtataacctgactgtggaggccaaagaactggattccactggaacccccacaggaaaagaatccattgtgcaagtccacattgaagttttggatgagaatgacaatgccccggagtttgccaagccctaccagcccaaagtgtgtgagaacgctgtccatggccagctggtcctgcagatctccgcaatagacaaggacataacaccacgaaacgtgaagttcaaattcaccttgaatactgagaacaactttaccctcacggataatcacgataacacggccaacatcacagtcaagtatgggcagtttgaccgggagcataccaaggtccacttcctacccgtggtcatctcagacaatgggatgccaagtcgcacgggcaccagcacgctgaccgtggccgtgtgcaagtgcaacgagcagggcgagttcaccttctgcgaggatatggccgcccaggtgggcgtgagcatccaggcagtggtagccatcttactctgcatcctcaccatcacagtgatcaccctgctcatcttcctgcggcggcggctccggaagcaggcccgcgcgcacggcaagagcgtgccggagatccacgagcagctggtcacctacgacgaggagggcggcggcgagatggacaccaccagctacgatgtgtcggtgctcaactcggtgcgccgcggcggggccaagcccccgcggcccgcgctggacgcccggccttccctctatgcgcaggtgcagaagccaccgaggcacgcgcctggggcacacggagggcccggggagatggcagccatgatcgaggtgaagaaggacgaggcggaccacgacggcgacggccccccctacgacacgctgcacatctacggctacgagggctccgagtccatagccgagtccctcagctccctgggcaccgactcatccgactctgacgtggattacgacttccttaacgactggggacccaggtttaagatgctggctgagctgtacggctcggacccccgggaggagctgctgtattaggcggccgaggtcactctgggcctggggacccaaaccccctgcagcccaggccagtcagtcgccaggcaccacagcctccaaaaatggcagtgactccccagcccagcaccccttcctcgtgggtcccagagacctcatcagccttgggatagcaaactccaggttcctgaaatatccaggaatatatgtcagtgatgactattctcaaatgctggcaaatccaggctggtgttctgtctgggctcagacatccacataaccctgtcacccacagaccgccgtctaactcaaagacttcctctggctccccaaggctgcaaagcaaaacagactgtgtttaactgctgcagggtctttttctagggtccctgaacgccctggtaaggctggtgaggtcctggtgcctatctgcctggaggcaaaggcctggacagcttgacttgtggggcaggattctctgcagcccattcccaagggagactgaccatcatgccctctctcgggagccctagccctgctccaactccatactccactccaagtgccccaccactccccaacccctctccaggcctgtcaagagggaggaaggggccccatggcagctcctgaccttgggtcctgaagtgacctcactggcctgccatgccagtaactgtgctgtactgagcactgaaccacattcagggaaatggcttattaaactttgaagcaactgtgaattcattctggaggggcagtggagatcaggagtgacagatcacagggtgagggccacctccacacccaccccctctggagaaggcctggaagagctgagaccttgctttgagactcctcagcacccctccagttttgcctgagaaggggcagatgttcccggagcagaagacgtctccccttctctgcctcacctggtcgccaatccatgctctctttcttttctctgtctactccttatcccttggtttagaggaacccaagatgtggcctttagcaaaactggacaatgtccaaacccactcatgactgcatgacggagccgagccatgtgtctttacacctcgctgttgtcacatctcagggaactgaccctcaggcacaccttgcagaaggcaaggccctgccctgcccaacctctgtggtcacccatgcatcttccactggaacgtttcactgcaaacacaccttggagaagtggcatcagtcaacagagaggggcagggaaggagacaccaagctcacccttcgtcatggaccgaggttcccacttcgtgggcagcgctgcccacgaagtggaataagccttcgaaaagaaattgtccttgaagcttgtatctgatatcagc

SEQ ID NO: 50045 - DNA, 4049 bp, Homo sapiens
gtgtctaagtactcctttcatcgtcactggccagaatctgaatgtgtctcctctttccatctgttcctcctgggaagatgcagaggctcatgatgctcctcgccacatcgggcgcctgcctgggcctgctggcagtggcagcagtggcagcagcaggtgctaaccctgcccaacgggacacccacagcctgctgcccacccaccggcgccaaaagagagattggatttggaaccagatgcacattgatgaagagaaaaacacctcacttccccatcatgtaggcaagatcaagtcaagcgtgagtcgcaagaatgccaagtacctgctcaaaggagaatatgtgggcaaggtcttccgggtcgatgcagagacaggagacgtgttcgccattgagaggctggaccgggagaatatctcagagtaccacctcactgctgtcattgtggacaaggacactggtgaaaacctggagactccttccagcttcaccatcaaagttcatgacgtgaacgacaactggcctgtgttcacgcatcggttgttcaatgcgtccgtgcctgagtcgtcggctgtggggacctcagtcatctctgtgacagcagtggatgcagacgaccccactgtgggagaccacgcctctgtcatgtaccaaatcctgaaggggaaagagtattttgccatcgataattctggacgtattatcacaataacgaaaagcttggaccgagagaagcaggccaggtatgagatcgtggtggaagcgcgagatgcccagggcctccggggggactcgggcacggccaccgtgctggtcactctgcaagacatcaatgacaacttccccttcttcacccagaccaagtacacatttgtcgtgcctgaagacacccgtgtgggcacctctgtgggctctctgtttgttgaggacccagatgagccccagaaccggatgaccaagtacagcatcttgcggggcgactaccaggacgctttcaccattgagacaaaccccgcccacaacgagggcatcatcaagcccatgaagcctctggattatgaatacatccagcaatacagcttcatcgtcgaggccacagaccccaccatcgacctccgatacatgagccctcccgcgggaaacagagcccaggtcattatcaacatcacagatgtggacgagccccccattttccagcagcctttctaccacttccagctgaaggaaaaccagaagaagcctctgattggcacagtgctggccatggaccctgatgcggctaggcatagcattggatactccatccgcaggaccagtgacaagggccagttcttccgagtcacaaaaaagggggacatttacaatgagaaagaactggacagagaagtctacccctggtataacctgactgtggaggccaaagaactggattccactggaacccccacaggaaaagaatccattgtgcaagtccacattgaagttttggatgagaatgacaatgccccggagtttgccaagccctaccagcccaaagtgtgtgagaacgctgtccatggccagctggtcctgcagatctccgcaatagacaaggacataacaccacgaaacgtgaagttcaaattcaccttgaatactgagaacaactttaccctcacggataatcacgataacacggccaacatcacagtcaagtatgggcagtttgaccgggagcataccaaggtccacttcctacccgtggtcatctcagacaatgggatgccaagtcgcacgggcaccagcacgctgaccgtggccgtgtgcaagtgcaacgagcagggcgagttcaccttctgcgaggatatggccgcccaggtgggcgtgagcatccaggcagtggtagccatcttactctgcatcctcaccatcacagtgatcaccctgctcatcttcctgcggcggcggctccggaagcaggcccgcgcgcacggcaagagcgtgccggagatccacgagcagctggtcacctacgacgaggagggcggcggcgagatggacaccaccagctacgatgtgtcggtgctcaactcggtgcgccgcggcggggccaagcccccgcggcccgcgctggacgcccggccttccctctatgcgcaggtgcagaagccaccgaggcacgcgcctggggcacacggagggcccggggagatggcagccatgatcgaggtgaagaaggacgaggcggaccacgacggcgacggccccccctacgacacgctgcacatctacggctacgagggctccgagtccatagccgagtccctcagctccctgggcaccgactcatccgactctgacgtggattacgacttccttaacgactggggacccaggtttaagatgctggctgagctgtacggctcggacccccgggaggagctgctgtattaggcggccgaggtcactctgggcctggggacccaaaccccctgcagcccaggccagtcagtcgccaggcaccacagcctccaaaaatggcagtgactccccagcccagcaccccttcctcgtgggtcccagagacctcatcagccttgggatagcaaactccaggttcctgaaatatccaggaatatatgtcagtgatgactattctcaaatgctggcaaatccaggctggtgttctgtctgggctcagacatccacataaccctgtcacccacagaccgccgtctaactcaaagacttcctctggctccccaaggctgcaaagcaaaacagactgtgtttaactgctgcagggtctttttctagggtccctgaacgccctggtaaggctggtgaggtcctggtgcctatctgcctggaggcaaaggcctggacagcttgacttgtggggcaggattctctgcagcccattcccaagggagactgaccatcatgccctctctcgggagccctagccctgctccaactccatactccactccaagtgccccaccactccccaacccctctccaggcctgtcaagagggaggaaggggccccatggcagctcctgaccttgggtcctgaagtgacctcactggcctgccatgccagtaactgtgctgtactgagcactgaaccacattcagggaaatggcttattaaactttgaagcaactgtgaattcattctggaggggcagtggagatcaggagtgacagatcacagggtgagggccacctccacacccaccccctctggagaaggcctggaagagctgagaccttgctttgagactcctcagcacccctccagttttgcctgagaaggggcagatgttcccggagcagaagacgtctccccttctctgcctcacctggtcgccaatccatgctctctttcttttctctgtctactccttatcccttggtttagaggaacccaagatgtggcctttagcaaaactggacaatgtccaaacccactcatgactgcatgacggagccgagccatgtgtctttacacctcgctgttgtcacatctcagggaactgaccctcaggcacaccttgcagaaggcaaggccctgccctgcccaacctctgtggtcacccatgcatcttccactggaacgtttcactgcaaacacaccttggagaagtggcatcagtcaacagagaggggcagggaaggagacaccaagctcacccttcgtcatggaccgaggttcccactctgggcaaagcccctcacactgcaagggattgtagataacactgacttgtttgttttaaccaataactagcttcttataatgatttttttactaatgatacttacaagtttctagctctcacagacatatagaataagggtttttgcataataagcaggttgttatttaggttaacaatattaattcaggttttttagttggaaaaacaattcctgtaaccttctattttctataattgtagtaattgctctacagataatgtctatatattggccaaactggtgcatgacaagtactgtatttttttatacctaaataaagaaaaatctttagcctgggcaaca

SEQ ID NO: 50046 - DNA, 3634 bp, Homo sapiens
tccaccccacagagaatgtctaatgagagcttttcccatgcctggggcagatggctctccacttgcaactcccagtgctgatactgtcattcagttgttcagccaccctagagacaggccaattgtcctgaagtggcttcctcgtacatggcataagctccctgaaggcaggacttgtctctcttgtccattgataggtcccctagcaaagtgcctggcatacaataggtgctcaatagctatttattggatggagggatggatggatggacatacagatagggaagaccctctttaccttgagaatcccaggggtattattatttatgattattttattatgcccatttcttttatcaaaatatgttagaagagctgaaagaggcaatcgccttgtctatctcattaacccaaagccctttggggtgctctgtttgcatcagccaagtacacatttgtcgtgcctgaagacacccgtgtgggcacctctgtgggctctctgtttgttgaggacccagatgagccccagaaccggatgaccaagtacagcatcttgcggggcgactaccaggacgctttcaccattgagacaaaccccgcccacaacgagggcatcatcaagcccatgaagcctctggattatgaatacatccagcaatacagcttcatcgtcgaggccacagaccccaccatcgacctccgatacatgagccctcccgcgggaaacagagcccaggtcattatcaacatcacagatgtggacgagccccccattttccagcagcctttctaccacttccagctgaaggaaaaccagaagaagcctctgattggcacagtgctggccatggaccctgatgcggctaggcatagcattggatactccatccgcaggaccagtgacaagggccagttcttccgagtcacaaaaaagggggacatttacaatgagaaagaactggacagagaagtctacccctggtataacctgactgtggaggccaaagaactggattccactggaacccccacaggaaaagaatccattgtgcaagtccacattgaagttttggatgagaatgacaatgccccggagtttgccaagccctaccagcccaaagtgtgtgagaacgctgtccatggccagctggtcctgcagatctccgcaatagacaaggacataacaccacgaaacgtgaagttcaaattcaccttgaatactgagaacaactttaccctcacggataatcacgataacacggccaacatcacagtcaagtatgggcagtttgaccgggagcataccaaggtccacttcctacccgtggtcatctcagacaatgggatgccaagtcgcacgggcaccagcacgctgaccgtggccgtgtgcaagtgcaacgagcagggcgagttcaccttctgcgaggatatggccgcccaggtgggcgtgagcatccaggcagtggtagccatcttactctgcatcctcaccatcacagtgatcaccctgctcatcttcctgcggcggcggctccggaagcaggcccgcgcgcacggcaagagcgtgccggagatccacgagcagctggtcacctacgacgaggagggcggcggcgagatggacaccaccagctacgatgtgtcggtgctcaactcggtgcgccgcggcggggccaagcccccgcggcccgcgctggacgcccggccttccctctatgcgcaggtgcagaagccaccgaggcacgcgcctggggcacacggagggcccggggagatggcagccatgatcgaggtgaagaaggacgaggcggaccacgacggcgacggccccccctacgacacgctgcacatctacggctacgagggctccgagtccatagccgagtccctcagctccctgggcaccgactcatccgactctgacgtggattacgacttccttaacgactggggacccaggtttaagatgctggctgagctgtacggctcggacccccgggaggagctgctgtattaggcggccgaggtcactctgggcctggggacccaaaccccctgcagcccaggccagtcagtcgccaggcaccacagcctccaaaaatggcagtgactccccagcccagcaccccttcctcgtgggtcccagagacctcatcagccttgggatagcaaactccaggttcctgaaatatccaggaatatatgtcagtgatgactattctcaaatgctggcaaatccaggctggtgttctgtctgggctcagacatccacataaccctgtcacccacagaccgccgtctaactcaaagacttcctctggctccccaaggctgcaaagcaaaacagactgtgtttaactgctgcagggtctttttctagggtccctgaacgccctggtaaggctggtgaggtcctggtgcctatctgcctggaggcaaaggcctggacagcttgacttgtggggcaggattctctgcagcccattcccaagggagactgaccatcatgccctctctcgggagccctagccctgctccaactccatactccactccaagtgccccaccactccccaacccctctccaggcctgtcaagagggaggaaggggccccatggcagctcctgaccttgggtcctgaagtgacctcactggcctgccatgccagtaactgtgctgtactgagcactgaaccacattcagggaaatggcttattaaactttgaagcaactgtgaattcattctggaggggcagtggagatcaggagtgacagatcacagggtgagggccacctccacacccaccccctctggagaaggcctggaagagctgagaccttgctttgagactcctcagcacccctccagttttgcctgagaaggggcagatgttcccggagcagaagacgtctccccttctctgcctcacctggtcgccaatccatgctctctttcttttctctgtctactccttatcccttggtttagaggaacccaagatgtggcctttagcaaaactggacaatgtccaaacccactcatgactgcatgacggagccgagccatgtgtctttacacctcgctgttgtcacatctcagggaactgaccctcaggcacaccttgcagaaggcaaggccctgccctgcccaacctctgtggtcacccatgcatcttccactggaacgtttcactgcaaacacaccttggagaagtggcatcagtcaacagagaggggcagggaaggagacaccaagctcacccttcgtcatggaccgaggttcccactctgggcaaagcccctcacactgcaagggattgtagataacactgacttgtttgttttaaccaataactagcttcttataatgatttttttactaatgatacttacaagtttctagctctcacagacatatagaataagggtttttgcataataagcaggttgttatttaggttaacaatattaattcaggttttttagttggaaaaacaattcctgtaaccttctattttctataattgtagtaattgctctacagataatgtctatatattggccaaactggtgcatgacaagtactgtatttttttatacctaaataaagaaaaatctttagcctgggcaaca

SEQ ID NO: 50047 - DNA, 1124 bp, Homo sapiens
  misc_feature (1)..(1): n is a, c, g, or t
ngacggtcggctgacaggctccacagagctccactcacgctcaggccctggacggacaggcagtccaacggaacagaaacatccctcagcccacaggcacgatctgttcctcctgggaagatgcagaggctcatgatgctcctcgccacatcgggcgcctgcctgggcctgctggcagtggcagcagtggcagcagcaggtgctaaccctgcccaacgggacacccacagcctgctgcccacccaccggcgccaaaagagagattggatttggaaccagatgcacattgatgaagagaaaaacacctcacttccccatcatgtaggcaagatcaagtcaagcgtgagtcgcaagaatgccaagtacctgctcaaaggagaatatgtgggcaaggtcttccgggtcgatgcagagacaggagacgtgttcgccattgagaggctggaccgggagaatatctcagagtaccacctcactgctgtcattgtggacaaggacactggtgaaaacctggagactccttccagcttcaccatcaaagttcatgacgtgaacgacaactggcctgtgttcacgcatcggttgttcaatgcgtccgtgcctgagtcgtcggctgtggggacctcagtcatctctgtgacagcagtggatgcagacgaccccactgtgggagaccacgcctctgtcatgtaccaaatcctgaaggggaaagagtattttgccatcgataattctggacgtattatcacaataacgaaaagcttggaccgagagaagcaggccaggtatgagatcgtggtggaagcgcgagatgcccagggcctccggggggactcgggcacggccaccgtgctggtcactctgcaagacatcaatgacaacttccccttcttcacccagagtgagcccctcctctagggccctgggaaggggggctgggataccccagactcagtgacttggggctctgggaaaagagttacaaatcactttacctctccctctatcccagggtaggcctgatgcccaaaggagtcctttgggtgaagggaggggccctgcttccatcccaataccacattcccaaggccatcctgccgccccctgccacaatcccctcatag

SEQ ID NO: 50048 - DNA, 966 bp, Homo sapiens
gttgtcgatttcctttaaaaagttacctatttatgttcttactaagagtatatgaaattacctgttctcctaaactcttgttagctctggaaattataatttttaaagatcttcgcaaattttgtttttgctataagacaattatttcagttaaattttttcttgaaaattttagtttgccaggatgttttcaatcctgtctctgtctctgataagttttctatctttaacttcatgttacttgcaaatttgacaagaatttaaatgttgtaaaaaaaatagggtttagcctagaatcctgtagcaggccaacagaaatttcccatcaatccactagttagttctgcatccctaggtacaatcattcagcaagtccctaacccacttaattacctcagtctctaactgatattttcaaacctttcctaaagggtacaatgaaagacaatgtcaaatattttgttgaggtctggatttagtacctaccacatttctctggtgaaccaatctaataaccctatgaaagaataagtctttacctgtgtacaaccctttacagtttggacacatttttaaattcatttattttcatttggacaaatgaaaatatatgttgcacatactcagtccatccccctattttcagcctccctttcgaatgtagttggggcctccaaatcctaagcctttccagagttccgtagcatgaatctgtttcttggctttttcactgccaggttgggtttctggtctgctgagccagtgccacccaaccctgttcttcccttaagagttacatctcctatgagctaggcgcagtggcatatacctatagtccagctacttgggaggctaaggcaggaggatcacttgagcccaggagtctgaggctgcagtgcactgtgatcacacctgtgacgagccctgcactccagcctgggcagcatagcaagagctcatctcttt

SEQ ID NO: 50049 - DNA, 313 bp, Homo sapiens
gaaattctgggtctggcttccagggtctcagtgttccagcctccacactttaaagagagggctcagatgctctcattgtctggttctgtcttggtcctatttattgataataccctagctcactgaagccaagagttcagtttttggtttatttatttatttatttatttttgagacagagtttcgctcttgttgcccaggctggagtgcagtgatgcgatctcggctcaccgcaacctccatctcccaggttcaagtgattctcctgcctcagcctctcaagcagctgggattacaggtgcctgccacaatg

SEQ ID NO: 50050 - DNA, 199 bp, Homo sapiens
cacgctgctactgagatgttttgtgtatagtggcctcgctccgtgcatctaagttgttccttgatacacagaggaagcacgcagccctctcttccattttgcaagtatttggagcaatggagcaggagaaactgacttgccccaaatctctgatcattttctagacattgccctaccctggtgacttagggtcgtgact

SEQ ID NO: 50051 - DNA, 758 bp, Homo sapiens
tgtgaacagatgcagtggtggggatgcagcagaggaaggggtcaggagtgccccaggagggggcggtaccgaggcagggattcagctgggtctgagagggaggcaaggctgagggggatggccctttggagtgggcagggacatgaccacagaaagcctgggaagtggaaacagacaggagcctgctggagctcttggagctttgtgtggggcactgggggaaggaggcaggcactccaccctgacctgcccctacctcggatgagggtcttctctgcctgttggatgatgtgctgcccctgctcttggaggaagaggcctcccagccaccccctcctgccagtcgccctgacctgctgacccagacagatctgctatccctacagcatccaggaaggccacagggagggggcccaggtggcatgggtttctgaggcctgggatctgctctcagtcccgctctcgccaaccccctttgcccctctgtgacagtgtgtgtacatatgcgtgcatgtgtgtacctgtgtggtgtggctcacaaggtcacccctgggggtgggataataagaggtaaagtgtgaccccctctcttccgtacattcattttttcaagcttgtgaatattcacattgttaatataatcttctgcagtcccatgacttcgaatagcacttagatgccgatgacccccccacagagagagcgtcgccccacagagagagcgtcaccccacagagagagcgtcacccccagagaga

SEQ ID NO: 50052 - DNA, 920 bp, Homo sapiens
tgtgaacagatgcagtggtggggatgcagcagaggaaggggtcaggagtgccccaggagggggcggtaccgaggcagggattcagctgggtctgagagggaggcaaggctgagggggatggccctttggagtgggcagggacatgaccacagaaagcctgggaagtggaaacagacaggagcctgctggagctcttggagctttgtgtggggcactgggggaaggaggcaggcactccaccctgacctgcccctacctcggatgagggtcttctctgcctgttggatgatgtgctgcccctgctcttggaggaagaggcctcccagccaccccctcctgccagtcgccctgacctgctgacccagacagatctgctatccctacagcatccaggaaggccacagggagggggcccaggtggcatgggtttctgaggcctgggatctgctctcagtcccgctctcgccaaccccctttgcccctctgtgacagtgtgtgtacatatgcgtgcatgtgtgtacctgtgtggtgtggctcacaaggtcacccctgggggtgggataataagaggtaaagtgtgaccccctctcttccgtacattcattttttcaagcttgtgaatattcacattgttaatataatcttctgcagtcccatgacttcgaatagcacttagatgccgatgacccccccaccaaagaaaccccactgtctcccacagactccaggtctgtatctccaactgcctactcaatacaacacgtccacctgatgcaatgaacttaatgtgtctaaaccccaattccacatttccagtcctcctaccggctcctcccccagtcttctctactttactatatgacaactccatttttcccaatactggttttaaaaaccctggagtagtccttgactccagt

SEQ ID NO: 50053 - DNA, 657 bp, Homo sapiens
tcaccggtcgggcctgggaccagcctggcgccttcgtgtacactagcatgggaaccatcaacccagcaggccatggaccaacttcactatgtgacagaccagacagatctgctatccctacagcatccaggaaggccacagggagggggcccaggtggcatgggtttctgaggcctgggatctgctctcagtcccgctctcgccaaccccctttgcccctctgtgacagtgtgtgtacatatgcgtgcatgtgtgtacctgtgtggtgtggctcacaaggtcacccctgggggtgggataataagaggtaaagtgtgaccccctctcttccgtacattcattttttcaagcttgtgaatattcacattgttaatataatcttctgcagtcccatgacttcgaatagcacttagatgccgatgacccccccaccaaagaaaccccactgtctcccacagactccaggtctgtatctccaactgcctactcaatacaacacgtccacctgatgcaatgaacttaatgtgtctaaaccccaattccacatttccagtcctcctaccggctcctcccccagtcttctctactttactatatgacaactccatttttcccaatactggttttaaaaaccctggagtagtccttgactccagt

SEQ ID NO: 50054 - DNA, 574 bp, Homo sapiens
gtagtcaacacttttgaaggctgaaaaaccagactgctggtcccgatgaaacccaggatccagagggagaactgctcctgtttgtctgccctttctcaactgattctttctgaataatccccacatgcacactgggagaatggggtggagccacgggaggtttgcaccttgtgcagaggggaggagcctgacctcttaagttcatgtgtgtggtggtctggtattcaatatgtgaggtgggagcctgttagcagaacctcttcttttttggctgagagctttcttttaataaattgctctctcctcaaattacaatgtgtctgtgtgcctaatctctcctggtcgtgtgacaggaacccaattttaactgaactaaggagcaaaaattctgcatcaattggaggaattactttctggatatcagtacctattattaattatatcaatcaagacatggcagtactatttgaaggaaacccagataaaccaatggagcagaatatcaaatccagaaaacagttctcaaaaacactgcctcctataccatgacagatgtgacatgcaggacagtaag

SEQ ID NO: 50055 - DNA, 352 bp, Homo sapiens
cagcgatcccatggcctttgcacgtgggggtctcggatcccccttcttgtttctcccagactccaggcctcctgtcctctcactgcatggtcgctaaaaagagatccactgggttactgaggccaacacccactcctgggctgcttagtgtcagctctctgtctggtctttggggtccctttgttatctggccctacgtggcctctttccttgccagctgaaatgtgcatctaaacagatgttcattctgtttattgagctggagggcctttagtttcccttgttgatcgtatggctgaaactcgaagtcgctacgctgttgtttttcctatgcaaaattaaaggtagaaaa

SEQ ID NO: 50056 - DNA, 456 bp, Homo sapiens
gtctcgtgaaggttttctcaggagacagaccttaaaacctgtctctgggcccacagtaaagaacttggggaaagagaatcatggttcagagtatacactgaggtgggagggaccccagaaaaggcttgtagttgaaatgtagacctagaaaagagaagttcgtagtatcaccaccccctgattctctaagatggattgggaagctgcggagtgtgaagctctgggactttagttttgtggcgatatgagcaactacccatattgaggcatttctcaaatgcacaaacattgtttcatgagtcattttagcccagataggtcatggtgtcagtggcaaatgctgcaggtggcagatgcctgttacatgaatcacagtggccagtgcagacgttgccagcatccgagatggctgcgaccctgagtagggccctgatgatggaccagatctttctgtgt

SEQ ID NO: 50057 - DNA, 659 bp, Homo sapiens
ggagtttccccatgttggccaggcaggtcttaaactcctgacctcaggtgagccaccgcacctggcctcatttttctctatgaagtaaaataagggtccagttgcattcttctgcatgcaaatatccagttttcccaacagcatttatttaagagatcgtcctttccccattgtgtgatgttggcacctttgtcaaagatcagttgaccatgagtttggatttgtttctgagctctgttcttccattgtgtgtgttttcatgccagtattataaccgtaataggtccgttgccccatgagcacagcatgtcaatacagcaggttgcagcaaagaaagacggtttactgtaaggctgcagaacaaggaggtaggatgaaaatgaaatccgtcctcccagggagtttggagctagggtttttaagggttttaaagtgtggaaatcactgcttaaagagtgcagtgtggagtcatgagacaggaagatgaagaaactattctcatgctgattctgttcctctgtggttgtcttcagactgcttggcatcagctatttcactggaatttgggacctgagaaacatcttgtgcaattcttaaaagcctcatgattctaacattagaaatcctatgtatgggaacagtggggactctgtctcaaa

SEQ ID NO: 50058 - DNA, 219 bp, Homo sapiens
ttttttaagtagagacgaggcttcacggaagcaacagcataattttagtttaaatataattttttccttattgacagtcattcgacatggacttcaatgcacatggagaaactgtagatgcaaggaaatgcttgtttgtgcttgacactgtactgaattctgagtgcaaagcacattagaaatattagaaataaaggcagcatgtagattcaaaggccc

SEQ ID NO: 50059 - DNA, 307 bp, Homo sapiens
taaaggaggacaggattctaagtgctgccaggtcctcctgattcttttgtttacagggaagtgacctgatttacctttttaaaagctcactctgtgtagagaacagattttaggggtcaagggcagacccagaggagagacagcgctgacttgaccccacatgctagcagcagaggtgcagagctggagagaggtcaggacccatcttggtggagtgtggggacagtgtggggagcgggagacaacgccatacgcacacccctccctttgcaggcctcctggtcccaggcacactcaccacccctgg

SEQ ID NO: 50060 - DNA, 307 bp, Homo sapiens
caagtgcaatggaccaaatgtttgtgatctcacaaaattcatatattgaaatcctcatccacaatatgatgatattaggaggtggggctttgggaggtgattaaatcaggagggtagagctttcatgaatgggttagtgctcttataagagatcccagagatgtctctaggtctctcttcaccatgtgaggacatgacaagaagatgagaagatggccatctgcaagccaggaagtgggtgttcacccacagagagagatgccttgatcttggacttcccagcttccagaactatgagaaataaatg

SEQ ID NO: 50061 - DNA, 192 bp, Homo sapiens
gacgcgtgagctgcattctgaggagtgagtaggagtttgccaggaggagagtgggggtagcagcgctggcaggaggagcggcttgcgaaagggcttggcgggagaggaagagagaagctgagtgtcgcggaggctgagagggaggaggggtgagtgggttgtggtggagatgaggcttctggagggcagttt

SEQ ID NO: 50062 - DNA, 296 bp, Homo sapiens
  misc_feature (36)..(36): n is a, c, g, or t
  misc_feature (57)..(57): n is a, c, g, or t
  misc_feature (59)..(59): n is a, c, g, or t
  misc_feature (96)..(96): n is a, c, g, or t
cagcagcatggcacagtgaactgtgagacgtctggntgccatctggttctgccactnanttggtctgcttctttaagatagctgttgatccttttncagctaggtttcttcatctgtaaaattgaggactggaaacagggaactggagcccacaactctcaaaccagaaagcttagaaagaacctgtgccttctaacaagttggtatcaggtgaaggataggcaagtactttgcatttagataagttaggtaattctttcccctctaatgtaattcaagtaaaaacaaatagcaag

SEQ ID NO: 50063 - DNA, 263 bp, Homo sapiens
taaaaataacaaacatgaaatagattcatgaaaccccatcatattaggatctagaaactcccaatgtctaaattgccactactgagtagttgtgtttttgtaggtattgtacctcctttcactgaattgaataaatatagaatccatttactacagggagggcaaggcttctccttcaggatttaaaccgtaagtccctaaagacatttggaggaagtcttatctggatgcaggaggacagaccttgtgtttcagtatgattt

SEQ ID NO: 50064 - DNA, 613 bp, Homo sapiens
tattctcgtgatccgcgtcacaaacacaataaacttattcacttgtgtctctagatctaaatttgtacttgtatattttattcatttatttattatagatggagtctcgctctgtcgcccaggctggagtgcaataggcacaatctcgcctcactgcaaccttcgcctgctgggttcaagcgattctcctgtcttagcctccctagtagctgggattacaggtacacaccaacatgcctagctaatttttgtatttttagtagagatgaggtttcaccatgttggccaggctgatcttgaactcctgacctcaagtgatctgcccgccttggcctcccaaagtgctgggattacaggcgtgagccaccgcgcctggtctgaaatatgttcattttaatccagcagaattcattgctgtttcaagatagaaccagatttggaaataaaattggaaggtggctatctgccaaaaatttcaagtgcctcttggccatgggtagcttattcaggaaacccaagtcttttaaggaaggacttggatttttttcttaatttcaaagaacgtttttgtgccaagggatacatatatgaggtctggggtacgagctcgaat

SEQ ID NO: 50065 - DNA, 570 bp, Homo sapiens
ggattataggcgtgagccaccttcccggctatttttgtatttttagtagagacggggtttcgccatgttcgccaggctggtctcgaacttctgacctcaggcgaccctcactgcaaccttcgcctgctgggttcaagcgattctcctgtcttagcctccctagtagctgggattacaggtacacaccaacatgcctagctaatttttgtatttttagtagagatgaggtttcaccatgttggccaggctgatcttgaactcctgacctcaagtgatctgcccgccttggcctcccaaagtgctgggattacaggcgtgagccaccgcgcctggtctgaaatatgttcattttaatccagcagaattcattgctgtttcaagatagaaccagatttggaaataaaattggaaggtggctatctgccaaaaatttcaagtgcctcttggccatgggtagcttattcaggaaacccaagtcttttaaggaaggacttggatttttttcttaatttcaaagaacgtttttgtgccaagggatacatatatgaggtctggggtacgagctcgaat

SEQ ID NO: 50066 - DNA, 418 bp, Homo sapiens
aacagatatgtatatatgagtttaccaaaaggaatgtactagaatgttcatggtagcactattcacagtatccccaaaatgtgaactacacaaatgctcattgttgtggactgaattgtgtcccccaaaattcacaggttgaagcccttaccccagtggaactatatttggagatagggcctttaaggaggtacctaagattaactgaagtcataaggatagggccttaatccaataggactggtgttctcataagaaaaggcagagaccccaggagtgcgtgcacacagaggaaagaaaggccacatgaggacatagtgaaggcggccgtctgcaagccagaaagagagccctcaccaaaaatcgatcctggcagcaccttgatcttggcctctagcctccagaactgtgtgagaaa

SEQ ID NO: 50067 - DNA, 617 bp, Homo sapiens
tctctgttcacttgccaaaaacaaacaaaaatgacctcacttcagacacagggataaaagcaggaggaaattgctatagttagaacactataggttttttttccccctgtactttttggatacatatttttaaaaaaataaataggatcacttactctggcctagcacaatttcatctaaagtgttttgaaagttatagtcttaattttagggacagaataggttatcgtaaggggtgtgagggtttttaaatgcaaggcattttccaggggacttttaaaaatcaataccaggaagcaaaataaaaaatttaaaaatcaaaacccagcagggcacggtggctcgcacctgtaatcctagcactttgggaggccaaggcaggcagatttcttgagcccaggagttcgagaccagcctgggcaaaatggtgagatctcatttctacaaaaaaaaaaaaaaaaaaaaaagcaaaacacacacacacacaacaaaattagccatgcgtagtggcacacatctgtagttccagctactcaggaggctgagacgaaagttgcagtgagccaagattgcaccactgccctgcaacctgggcaacagagtgaaaccttgcctcc

SEQ ID NO: 50068 - DNA, 190 bp, Homo sapiens
caggagaggagctgtctttgcaaagccccctcgggtctgggaattaagggcttctgctgccgacttccaccctgcagcccttcaaaaagtgtcatcactgccaagtgcaattccaaataaagagacgccttcgcagagccacctgcgggttgagggaaagctggaaggctggggggcatcactgcgaggc

SEQ ID NO: 50069 - DNA, 1040 bp, Homo sapiens
aactttttttgtaaaggagtaaattttttaggctttgtgggccatgtaagttctctgttacgtatccttatgctcatggactatataaaaacactctcctatcccaagttggcccacagaccatggtttgcagactcctgattaaagcctaatcaatagcaaataaaacaaaataaagatacctattctagagaattagataatcctcaggtgagtcagttaaacagtgtttcatcatgtcattcaatggacatgtgttcttttggccatttgcaggttttgaatatgggagatacatatttatatatttttgagggcagggtttcattgtcacccaggttggagcgcagtggtgcaaacatggctcactgtagccttgagctcctgagctcaaacaatcttccttcttcagcctcccatgtagctgaaaccaaaggcatgcaacaccacgtccagcttttaaaaaatgttttgtagagatggggcgtcactttgtggcccgggctggtctcgaactcctgggctcaagcgatacttctgccttagcctcccaaagcattgggatcgcaggcataagccactgtgcccagctatattatttttttcctaacaaagatgccctgctggagggagctggaggggaaacagtgagggagaatgtgaaggaatttgaagaggtagggccttgtgggtgggatagcccacacctaacctcttttcctaggggctgcccctggtttactggtataaaaattaatcactctcttttcactctcagagtgtcccagtttggatgatacatgataaatgggtcacgttaagaagtttgctcctcaacataaaattaataggaagggttgacaaattttaaactagtcaagtgtgatataatcagatttgcattttgaaaggatgactgccttgttggtaatggatttgaggcaaagacacaggggatgttaaatggttgtttaccaggaaatttgtctttcaggttaaacaatttgttaaactttctcaatagcaagttaattttgaaa

SEQ ID NO: 50070 - DNA, 724 bp, Homo sapiens
tctgtttataaatattttccataagaagaaagcaaggaataatcttctgacactgtattgtaaaaaaatctttgtctcttttccttttatcttccctaggcatagagattttatgagaatgttttggcatcaaggtttttcttggaatttttgtggggtgatgtgtcctcagccaccctttagtttttttcctggtcctgggttccagtactgtctgtgaataaaccaagatatcagtcatggctatgtctgcaagactgtctaatgaatattaattcctggggtcattttctcccataggacaacctgtggtatgggagtgtagcctctgaagggagcaggtgtattccctggggctgagaggaatctcctggtgtacttttcgtttgaaaagctaaccccttcagatgttaagactgtgttcacccagcccgactttcctttctttgggccacattgctggtcacccaatcaaatgctggtattgagttgaaaacaaataatttctgaccccttgattctctacaatttgtgaaaaaagactagtatctctgccaggcacggctcccggcttgagttagatcttttaaaagtaggaattcagggactacagccacctcagtcgaattgcctaccacttaactattttcactccctacacaaaactgatcttcccctgcatttttcacaggtgtcctaagcagggtctcaaatctactcccac

SEQ ID NO: 50071 - DNA, 1579 bp, Homo sapiens
  misc_feature (1578)..(1578): n is a, c, g, or t
gacggtttccggaatatggcggggcgtttggctcttgctgcagccagagctccaggtctcgtcttcatttctgtgtcctttgttcttagaggcccagcctgtgtggccctgtgacccgcagatattgggagatacacagctaagactccaggaccccctggaagcctagaaatgggaccattgacatttacagatgtggccatagaattctctctggaggagtggcagtgcctggacacagcacaacagaacttatatagaaatgtgatgttagagaactacagaaacttggtcttcctgggtattgctgtttctaagccagacctaatcacttgtctagagaaagaaaaagaaccctgcaagatgaagcgacatgaaatggtggatgaacccccagttgtgtgttctcattttgctgaagacttttggccagagcaagacataaaagattctttccaaaaagtgacactgaggagatatgataaacgtggacatgagaacttacaattaagaaaaggctataaaactgtaggtgattgtaagctatacaaaggaggttataatggacttaaccaatgtttgacacttacccagagcaaaatgtatcactgtgatatatatgtaaaagtcttttatgcattttcaaatgcagatagatacaagacaagacatactggaaagaaacctttccagtgtaaaaaatgtggcaaatcattctgcatgctttcacaactaactcaacataagaaaattcatattagagagaatacctacagatgtaaagaatttgcaatgcctttaatcagtcctcagcccttactaaccataagagaatttatgttggtgagaaacactacagatgtgaagaatgtggcaaagcatttaaccactactcaacccttactaaccataagagaattcattctggagagaagccctacaaatgtgatgaatgtggcaaaacctttagcatatcctcaacctttactaaacataagataattcatactgaagagaaaccctacaaatgtaaagaatgtggcaaagcctttaaccggtcctcaacccttactagccataagagaatacatactggtgagaaaccctacaaatgtgaagaatgtggcaaagcctttaactggtcttcaactcttactaaacataaggtaattcatactggagagaagccctacaaatgtgaagaatgtggcaaagcttttaaccagtcttcaagacttactcgacataaaaaaattcatactggagaggaaccctacaaatttgaaaaatgtggcagagtttttacctgttcctcaacacttactcaagacaagaaaattcatactggagagaaaccctacaattgtgaagaatgtggcaaagtttttacctattcctctacacttactagacataagagaattcatactgaagagaaaccctataaatgtaacgaatgtggcaaagcttttaaccggtcctcacaccttactagccataggagaattcatactggagagaaaccctacaaatgtgaagaatgtggcaaagcctttaagcagtcctcaaaccttaacng

SEQ ID NO: 50072 - DNA, 1325 bp, Homo sapiens
gacggtttccggaatatggcggggcgtttggctcttgctgcagccagagctccaggtctcgtcttcatttctgtgtcctttgttcttagaggcccagcctgtgtggccctgtgacccgcagatattgggagatacacagctaagactccaggaccccctggaagcctagaaatgatggagtcttgctctgtcgcccaggctggagtgcatggcaccatctcggctcacagcaacttccacctcccgggttcaagtgattctcctgcctcagcctcctgagtagctgggactacagatgtgcaccaccacgcccagctaaatttttatttttttatttttagtagagaaagggtttcactgtgttagccaggatagtctcgatctcctgacatcgtgatctgcccacctcagccttccaaagtgctgggattacaggcatgagccatcgtgcccagccctgtattatatctttatctttatcaagttgtggtctaagtgagcatttggtatgattttgggattattgaatttgctgaggattgttgtgtttctgattgcgtggtcaattttagagtatgtgacacatggtgatgagaaagatatatatactatgttggtttcagatgaagagtttcatatatgtttattagaatgatttggtcaagtgttgagtttaggttctgatatctgctaattttctgcctcaaggtgggaaattaaagaaaataaaattaaattaaaaagagaaagaaacaaggtttcctgtattaggctgacttatcctagaggcagtaacaggcacagcccacatccaggaaaagttttgataacactatttaagaagccagggctggaaagaatgtgctctggagactctcccagcattccctcaacatagggagaagagaaacaaattttcctttctcttatgattcctgtttttcatttaagcagcacattgaaggtcatgagatgcctgagcaggcctggattgcagccacctaggcaccatagtgaaggttataagataagcccatgcaaggcactagagcaagcctaggtaacagccatctgggccacatagtaagagtcatatgtaagtctgagttataaacctgtcatagtatgattaactgcttttgttctgtttctgtatccttgctttcacatcactacactttgtgccactgtaggcttgtttcaagttagcccaccctctttagaagtgtatgtaaaagttaaatgctgtctttgtccttggcccagtctctggatgttaatccactgggtctgagtgcactcaataaaatcctccttttctacct

SEQ ID NO: 50073 - DNA, 1105 bp, Homo sapiens
gacggtttccggaatatggcggggcgtttggctcttgctgcagccagagctccaggtctcgtcttcatttctgtgtcctttgttcttagaggcccagcctgtgtggccctgtgacccgcagatattgggagatacacagctaagactccaggaccccctggaagcctagaaatggtgagagtgccgagtctgacatccccagagagggggaggggctggtcggaaccgtgagaagtggccgtggcggacttaggtctcccggcagtcagctccacaatctgcgcccggaattctccttgcccagctcggcttcagtccccttcagccataagatggcgactgtgctgacagccgggccccgggcgtcctgtcttccctccgcagtgactgtgcctgacgtgtagccctgtctggggagctctgcacgcgcaattccgcagtctctcccagattgtgcaagaaccatgggaggggcgtcaggcatagagattttatgagaatgttttggcatcaaggtttttcttggaatttttgtggggtgatgtgtcctcagccaccctttagtttttttcctggtcctgggttccagtactgtctgtgaataaaccaagatatcagtcatggctatgtctgcaagactgtctaatgaatattaattcctggggtcattttctcccataggacaacctgtggtatgggagtgtagcctctgaagggagcaggtgtattccctggggctgagaggaatctcctggtgtacttttcgtttgaaaagctaaccccttcagatgttaagactgtgttcacccagcccgactttcctttctttgggccacattgctggtcacccaatcaaatgctggtattgagttgaaaacaaataatttctgaccccttgattctctacaatttgtgaaaaaagactagtatctctgccaggcacggctcccggcttgagttagatcttttaaaagtaggaattcagggactacagccacctcagtcgaattgcctaccacttaactattttcactccctacacaaaactgatcttcccctgcatttttcacaggtgtcctaagcagggtctcaaatctactcccac

SEQ ID NO: 50074 - DNA, 895 bp, Homo sapiens
gacggtttccggaatatggcggggcgtttggctcttgctgcagccagagctccaggtctcgtcttcatttctgtgtcctttgttcttagaggcccagcctgtgtggccctgtgacccgcagatattgggagatacacagctaagactccaggaccccctggaagcctagaaatgtgactgtgcctgacgtgtagccctgtctggggagctctgcacgcgcaattccgcagtctctcccagattgtgcaagaaccatgggaggggcgtcaggcatagagattttatgagaatgttttggcatcaaggtttttcttggaatttttgtggggtgatgtgtcctcagccaccctttagtttttttcctggtcctgggttccagtactgtctgtgaataaaccaagatatcagtcatggctatgtctgcaagactgtctaatgaatattaattcctggggtcattttctcccataggacaacctgtggtatgggagtgtagcctctgaagggagcaggtgtattccctggggctgagaggaatctcctggtgtacttttcgtttgaaaagctaaccccttcagatgttaagactgtgttcacccagcccgactttcctttctttgggccacattgctggtcacccaatcaaatgctggtattgagttgaaaacaaataatttctgaccccttgattctctacaatttgtgaaaaaagactagtatctctgccaggcacggctcccggcttgagttagatcttttaaaagtaggaattcagggactacagccacctcagtcgaattgcctaccacttaactattttcactccctacacaaaactgatcttcccctgcatttttcacaggtgtcctaagcagggtctcaaatctactcccac

SEQ ID NO: 50075 - DNA, 620 bp, Homo sapiens
gacggtttccggaatatggcggggcgtttggctcttgctgcagccagagctccaggtctcgtcttcatttctgtgtcctttgttcttagaggcccagcctgtgtggccctgtgacccgcagatattgggagatacacagctaagactccaggaccccctggaagcctagaaatgggaccattgacatttacagatgtggccatagaattctctctggaggagtggcagtgcctggacacagcacaacagaacttatatagaaatgtgatgttagagaactacagaaacttggtcttcctgggtattgctgtttctaagccagacctaatcacttgtctagagaaagaaaaagaaccctgcaagatgaagcgacatgaaatggtggatgaacccccagttgtgtgttctcattttgctgaagacttttggccagagcaagacataaaagattctttccaaaaagtgacactgaggagatatgataaacgtggacatgagaacttacaattaagaaaaggctataaaactgtaggtgattgtaagctatacaaaggaggttataatggacttaaccaatgtttgacacattcttcacatctgtagtgtttctgggtaccgag

SEQ ID NO: 50076 - DNA, 379 bp, Homo sapiens
tgttcacccagcccgactttcctttctttgggccacattgctggtcacccaatcaaatgctggtattgagttgaaaacaaataatttctgaccccttgattctctacaatttgtgaaaaaagactagtatctctgccaggcacggtggctcacgcctgtaatcccagcactttgggaggccaaggtgggcagatcacctgaggtcaggagttcgagaccagcctagctaacatgatgaaattccgtctctactaaaaacagaaaattaaccaggcgtggtggtgcatgcctgtaatcccagctactcaggaggctgaggcagaagaactcgggaggcggaggttgcggtgagccgagatcgtgccattgcactccagcc

SEQ ID NO: 50077 - DNA, 395 bp, Homo sapiens
aagcattggatggcacatttaaaaagatttgttttctgtttataaatattttccataagaagaaagcaaggaataatcttctgacactgtattgtaaaaaaatctttgtctcttttccttttatcttccctaggcatagagattttatgagaatgttttggcatcaaggtttttcttggaatttttgtggggtgatgtgtcctcagccaccctttagtttttttcctggtcctgggttccagtactgtctgtgaataaaccaagatatcagtcatggctatgtctgcaagactgtctaatgaatattaattcctggggtcattttctcccataggacaacctgtggtatgggagtgtagcctctgaagggagcaggtgtattccctggggctgag

SEQ ID NO: 50078 - DNA, 698 bp, Homo sapiens
tactaaccataagagaatttatgttggtgagaaacactacagatgtgaagaatgtggcaaagcatttaaccactactcaacccttactaaccataagagaattcatactggagagaaaccctacaaatgtaaagaatgtggcaaagcctttagcaggtactcaacccttactacccataagagaattcattctggagagaagccctacaaatgtgatgaatgtggcaaaacctttagcatatcctcaacctttactaaacataagataattcatactgaagagaaaccctacaaatgtaaagaatgtggcaaagcctttaaccggtcctcaacccttactagccataagagaatacatactggtgagaaaccctacaaatgtgaagaatgtggcaaagcctttaactggtcttcaactcttactaaacataaggtaattcatactggagagaagccctacaaatgtgaagaatgtggcaaagcttttaaccagtcttcaagacttactcgacataaaaaaattcatactggagaggaaccctacaaatttgaaaaatgtggcagagtttttacctgttcctcaacacttactcaagacaagaaaattcatactggagagaaaccctacaattgtgaagaatgtggcaaagtttttacctattcctctacacttactagacataagagaattcatactg

SEQ ID NO: 50079 - DNA, 336 bp, Homo sapiens
gcaaagtatttcatcatatgcatgtactgtaccttatttagccagccccattttgtttggcttgtggagaattacaatagctgttttgactgttgtatcacatgccaggcactgtactgtgtattatctcatgtaattctcatagttactgcatggtgtaggtatttttatccccagtttacaggtagagaaactgaacccagagatgttaaataatttgcccaagttttttggctgactatactgatgaagatactgatactagcattctgttgtcagttatttgccagacagaattctttattttttaatacataatatcatttactcttgaga

SEQ ID NO: 50080 - DNA, 316 bp, Homo sapiens
aaacaaacaaaaatcgtgggctttctgagaaaaggagaagtctatgttttaatgacattctgagtgagaaaacattccaaattgtattaaatgatataatttgtgtttctctcatccatctcatattaacctgcacagagatggagaaaaagttagccaatctagtactcattgtgatatctcattgacaaccaatcttgaggcatttgtcaaaaaagttactctaacagtaaggtgtaacccaaatcaaattaataagtaatttttgaagcattttttaatgtcaaaagacagtcttttattgcatttagcaaga

SEQ ID NO: 50081 - DNA, 535 bp, Homo sapiens
gtctgtcccaacattagtgcatactcaacagagctgccaaagtcctcttccgctgacacactttgagtcatacgacgcttctgctcagaaacctccagtggttttccatttccagcctagaaaggctagcatggaaaaccttccatggtcctgtcttcaattaaccttctttagcctcctcttccatatcacactagtgccccaaacataagctgtctcccagccaaacaggccaccacatcattccagaaatgccttgtattttcctgattctatgacatgacttaatctattcttaatgctcacttcaaacaccacttttctcaggaaggtttccgagagacaagtgtttatttttccccctatctaactccattgcgttaatttttgtcttatagtttccacatatggctttgcattcaagttacttttagacacatcttatccattcttctagactgtcatctccttgacaataaagactgtgttttattcatctttgtgtatccttccatgcttcactcagtagcagatg

SEQ ID NO: 50082 - DNA, 418 bp, Homo sapiens
cgtggttcctgttttgccacatctgtgagaggcgctgggaacggggacttgccttacacctctcggttaacaccctggagactgatggagttcagagcagggtaatttacagcccatccctccaatcttaattcactcgatgctcctttcttccttattgtattagtgtgacccaggtacctgccaacaataatggcctctccagctaggagcctctccccaactcccaggacaatttataccttttccttggattttccccccttaaattaaacaaaaagaggaaaaatgagaaaaggttagcatgggtttggagcactgaagcccccgtggttctgggcaggaagccaatggcctgagggcacacatgtgtgtgctctcccagaagggccttcaccggccctgttttacagccacc

SEQ ID NO: 50083 - DNA, 509 bp, Homo sapiens
aaatacccaaggtgatgaataccccaaacaccctaacttgatcattacacattctatacatgtagcaaaatatcacatgtgctctgaaaatatgtaaaatatgtatcaacaaaagtttttgtttgtttttaaagcagcctataaacagagtgtcattttctgaatactaaagatattccttttttatgcatctggtaagtgggcttctttttattctgcagactgatgctctgcctttcccaggatgccacgatgatgaagagtaaccaggatacatttagaaaaggtgcctctccggggcccagagctgttgccaaggcgcactggtgcattcggcacaaagcggtgcgggcagaaattaacatggtctgcatcaggtggaggctgtgttaattttccctgtgcactgactgtctaacctaaacatcccatggtggaaacagaaccattagttggtatttctagggaagggacattgagcctcagatgggttaaaacaatatttgcaa

SEQ ID NO: 50084 - DNA, 404 bp, Homo sapiens
cctcaacaaaatacaggcaaatcaaatccaccagcataccaaaaagcttattcatcacgatcaagcaggctttacacctgggatgaaacgggggttcaacatatgcaaatcagaaatttgaggccaggtgcagtggctcactcctgtagtcctagcacttggggagaccgaggcaagaggattgcctgagctcaggagtttgagaccagcctgggcaacatggcaaaaccctgtctttactgaaaatacaaaaaactacccgggagtggtggtgcacacctttagtctcagctactcgggaactaaagcacgagaattgcttaaacccgggaggtggcggttgcagtgagcccagatagcaccactgaactccaggttgggtgacagagcaagacactgtctcc

SEQ ID NO: 50085 - DNA, 396 bp, Homo sapiens
caaaagagtggtgacaataggcacataactacagcatctactacggacctcgccatccagaagcagccagtctagtagaatagtggaatgggctattgaaagctcagctaagactccagctcaaggaaaataggccacaaagttggagcactctcctttgggcatgcaatatatgtgtagaactaacagctaatatatgggccccagtagttagaatacatgggtctgggaaaaaggcatggctttggccatcattactcccagtgaccttcttatggaatttgtgttttccatttgtacaaacttagaattttccaggcttagaagcacgtgttcccagagatcaataaggtttatgctgcacttaaaactgcagctgccacagggttactttga

SEQ ID NO: 50086 - DNA, 868 bp, Homo sapiens
agacccacagcatggtctctggggtcccacatcccaggtagagaatgacccaggtcgctggcgtctgtgccatctctgctccactgaccactcatgggggtcctggagatcctgacaccggtggccggggagcagcagcccaggcacaggccccagtgcacatgcagatcccaccgtgtctgcacaaggccttgccccaacgaggcctgggtgccgtgtgagggccgggacgctaacacagcggagggtacccacgcgtgagctgctctggggtccctccccgtgtttcttcctgtaatgaaacttgtacccaaatgggatatgcagggttgcactgtgcagtcgctgtgtgttttagggtctcatacccgtgtgcgccagcaggaccacagctgtgaccggctgctccagaagaagtgggtgggttgagaccccaccggcagggtcactgggggtagcaggccctctgtcagcactgacttctgtatcatgtcagggatttttagggcggcaagctcaggtggacaggcagttttattctgtttcccatgtcaagtccagccccagactgactttctgaggtcacagacggagcctcaccccatccaaggcggtgtcctggactcccactgtgctccccagagggcagggtgagtgcgtggcatccttttggcgggcgtgggtgcctctgtggacctggcgtgaggcttctctgtttctgagtctcctatggaccatctgtcttctgtgtggctgctgaggaatcacactggggtggccgtgccggtggctgaatgagaacaggacccccatgctgcacagccctgcttaacgcgggggtggccccagaagcgggtgggcgaggctg

SEQ ID NO: 50087 - DNA, 485 bp, Homo sapiens
aaagctctgcaactttattcaagatcacacaggggtttcattctggtcagtgggaaggagaatgaccaagaaggagccagtcagggaggtttgtatggccaggcctggatctggtacctgtgccttcctcttacattccattgattagctcattcatgtgaccacacccaactgcaaaggagtctggtaaatgtagtctatagctgtgcctaagtagagggggaaaactggtttgggggaacaagttcataccttgttagctgtactgatgcaacatgacttagggacatttcaagtcttgtgattcaagtctcatgatttcaaggaacttgaaatttagttaagtcttattgttagtgagctacgcttttggacaagccccatcctctctctggacctagtcagtaagacgcaggacttgcaccaggtccttcctagatttgggactctctcatgcactctgtctttccctcctcagcatttcc

SEQ ID NO: 50088 - DNA, 423 bp, Homo sapiens
tactcagaaaataactccctgctacccttttcttaagcagttttcggcattcatgtttatcatcttacctggttttatatgctttgtattatttttgactgtttttatcttattttaataagatagttgttgttccatttattatctgcgttccctcccaccatccactgtgcccaacctccgtgtatcctccatgggagcccatttttcttcctgccctgggctcagtgtctggttcacaatctgacatgtaatgactgaatcatcaaatgagtgcaggaattcagggactgcgaatcaagtcatattagaaaaaatggttctccatttggaagaagatctctggtaagtttagaattagaaatattggctttattcttaagattcctggagaaagcaaggcaatcgtctttttttcatagc

SEQ ID NO: 50089 - DNA, 368 bp, Homo sapiens
gggggtgatgcagggaataagtacactaacctctctctcctttgccatctacattcctgctgggctgatcactggccaaatccagctgttgcaaagagggcagggctgcccagctaatgctatctgtagaagctgggcttctggggcacagagcaagtcagagacaggcagaacagggatgtgggtttggaccaaacactgaataaaccagatcaaggattcttctatcaagacaagtttatatacttgcagcttgatcccattgtttcccttagataactgtgcacttgtttttgtctgccctctttcctgtgtctacactcttcctgtcttattctatttacacatagctcagtcttttccaatta

SEQ ID NO: 50090 - DNA, 307 bp, Homo sapiens
caaggtttttattcctatactgaatatcatgctgagggagtatccatggggacagaattctaggacagcttaaaacaatcactccttaagctttggaagcttatcatctaaaacggaggctaatgggtgtattgggagggaaagaaagagaagcccattcctgctcctgacttgatgtgtgaccctgaaaaagtatagtgttctgtgggtctatccttgatctctgtaaaatgggaataatgttaccttcctcagaaagctctggtgggaaaaaagaaaaagtacagcaatgtctggcacattgtaa

SEQ ID NO: 50091 - DNA, 369 bp, Homo sapiens
agcccttattcttttttcatttgcattcccatggacatttatgtatttttttgcctaggaaagtgctgtttcttagtgtaataaataagtgttaaaagtagttctccacagctgtttcctggcccttgctatttctttcccttctctttttcttttaaaatgaagagggtagttaaaaagaaatagacatcagaactggaagttcactctgtaacttcagcaactaacacaatatgagtctgatgtgttaaatatttttcactggcgttggcaaaagcttagtgaattttgtaagagccattgttctgaaataagcatatattatagatatgttagcagaatacttgataaatcttatttgtggatatt

SEQ ID NO: 50092 - DNA, 1178 bp, Homo sapiens
ttcactctcctagaaacccaactagatccttcaccctctgacaccatggtaaactcctgttgtggctccgtgtgctctcaccaaggctgtggccaagacctctgccaggagacctgctgccgccccagctgctgtgagaccacctgctgcaggaccacctactgtcgccccagctgctgtgtgtccagctgctgcaggccccagtgctgccagtctgtgtgctgccagcccacctgctgccgccccagatgctgcatctccagctgctgtcgccccagctgctgtgtgtccagctgctgcaagccccagtgctgccagtctatgtgctgccagcccacttgctgccgccccagatgctgcatctccagctgctgtcgccccagctgctgtgtgtccagctgctgcagaccccagtgctgccagtctgtgtgctgccagcccacctgctgccaccccagctgcagcatctccagctgctgccgcccctcttgctgtgaatccagctgctgccgcccctgctgctgcctgcgtccagtctgtggcggagtctcctgccacaccacttgctatcgcccaacctgtgtcatctccagctgcccccgccccttgtgctgtgcctcctcttgctgctgagcccactgccctggctcatctctcccttcactgcaggcccacagttgtagaccattcttctgtgctgactattaggacacatggagtgggattgatgtcattcagcagggtggacttcatgtttccaatgagcccatcaccatcccactgactctgtgagaacattctggttcattttaaactccctcccttgctttctttctcttccagtcatggcaccaaatatgaaataatttgtaatccactagctaagaaattattccaatcctctaaattcctcattttttaaatcgttttgagcctacagaatatccttcccagtgaggtacacattatctccatttcaaacatattatttgtctgtcagcctttcagtcattcttttctcttggaaaggtaggaggctgcccctcccatgctctcctgctttctccctgttctctctttgtctctgtttgttcaagtttgccagaatttttctattttattggttctttatctttattgggttcacaaaatatattggattaaaccttttcatttag

SEQ ID NO: 50093 - DNA, 311 bp, Homo sapiens
cggaggaggagggggcagtgcctgcagagcaccaggtggcaatggccgcagccagagccttgggggatgtgacagtccttgggtctctactgctccagcatctgctgcacttctccactcctggtcttgtacttcgaagtctgggtgccttgacgggaccacagcttctgtcccttgcccaaagtcccgctggctctcatgtgctcgatgccatcctgaccagcccctctgtgacgcgcaagctgcgccgccgtgtgctgcagaacctaaagagggacaatatgtggctctggcctgtagtcgccatggca

SEQ ID NO: 50094 - DNA, 314 bp, Homo sapiens
cattcttttccaggtgacagagactagaacacatttcaggagacactttaagagtgaaagttttgcaggatgaaaagagttacagagatggatgatggtgatggtcacacagcatcatggacgtgtttaataccactgaactgtacccttgaaaatggttaagatgagtctcgctctgctacccaggctggagtgcagtggtgtgatctcggctcactgcaacctccacctcccagattccagtgattcttctgcctcagccttccaagttacctgggattacaggcgcctgccaccatgcccagctaatgttt

SEQ ID NO: 50095 - DNA, 255 bp, Homo sapiens
cgcgtttggtgcataaaatataatttctataacatgaatttgaactttatgtctttgtaaaataaatatgctaaatataacaaacaaattattatactataacttgcaaaattagaatttagaagtgattttggaagatgatttatgtattccagttctctgtaaattaatgagaaatgactcagtttgttaaattgctgaagttgtaatcattattgatttgtctttaactaattaaagactgtcctttaaggc

SEQ ID NO: 50096 - DNA, 107 bp, Homo sapiens
gtgtggacatagacaatagactggactggtgtggacgatggacagggttctgccgtctcctggggccctgagaggcacctactcatccagcccttgcagaccagcag

SEQ ID NO: 50097 - DNA, 368 bp, Homo sapiens
tctttgaagacacggtcttgcttgttgccctggctggattgcagtgatatgatcacggctcactgcagccttgacctcctgggctcaagcagtcttcccacctcagcctcctgagtagcagagaccacaggtgtgcaccacaacacctagctaatttttaaaatgtcttgtaaagacagagtctcactgtgttgcccaggctggtcttgaactcctggtttcaagcaatcttcctgcctcagccccacaaagtgttggaattacaggtgtgagccacgatggccagcctgccatttctaattagctttgtgcttggacaagttattccactgctctgtgtcatagtttccttatatgtcaagtggtgg

SEQ ID NO: 50098 - DNA, 1373 bp, Homo sapiens
caggcagtgcaggagtatggttgagatgctaccaactgccattctgctggtcttggcagtgtccgtggttgctaaagataacgccacgtgtgatggcccctgtgggttacggttcaggcaaaacccacagggtggtgtccgcatcgtcggcgggaaggctgcacagcatggggcctggccctggatggtcagcctccagatcttcacgtacaacagccacaggtaccacacatgtggaggcagcttgctgaattcacgatgggtgctcactgctgctcactgcttcgtcggcaaaaataatgtgcatgactggagactggttttcggagcaaaggaaattacatatgggaacaataaaccagtaaaggcgcctctgcaagagagatatgtggagaaaatcatcattcatgaaaaatacaactctgcgacagagggaaatgacattgccctcgtggagatcacccctcccatttcgtgtgggcgcttcattgggccgggctgcctgccccactttaaggcaggcctccccagaggctcccagagctgctgggtggccggctggggatatatagaagagaaagcccccaggccatcatctatactgatggaggcacgtgtggatctcatcgacctggacttgtgtaactcgacccagtggtacaatgggcgcgttcagccaaccaatgtgtgcgcggggtatcctgtaggcaagatcgacacctgccagggagacagcggcgggcctctcatgtgcaaagacagcaaggaaagcgcctatgtggtcgtgggaatcacaagctggggggtaggctgtgcccgtgccaagcgccccggaatctacacggccacctggccttatctgaactggatcgcctccaagattggttctaacgctttgcgtatgattcaatcggccacccctccaccgcccaccactcgaccgcccccgattcgaccccccttctcccaccctatctctgctcaccttccttggtatttccaaccgccccctcgaccacttccaccccgaccaccggcagcccagccccgacccccaccttcacccccgcccccacccccacctccagcctcacctttacccccacccccacccccacccccacctacaccctcatctaccacaaaacttccccaaggactttcttttgccaagcgcctacagcagctcatagaggtcttgaaggggaagacctattccgacggaaagaaccattatgacatggagaccacagagctcccagaactgacctcgacctcctgatctgacctggttctcaacagacccagtgagcccttcactcctgagaaaaaggaaagatgaaataaataaataaacatatatatatagatat

SEQ ID NO: 50099 - DNA, 718 bp, Homo sapiens
caggcagtgcaggagtatggttgagatgctaccaactgccattctgctggtcttggcagtgtccgtggttgctaaagataacgccacgtgtgatggcccctgtgggttacggttcaggcaaaacccacagggtggtgtccgcatcgtcggcgggaaggctgcacagcatggggcctggccctggatggtcagcctccagatcttcacgtacaacagccacaggtaccacacatgtggaggcagcttgctgaattcacgatgggtgctcactgctgctcactgcttcgtcggcaaaaataatgtgcatgactggagactggttttcggagcaaaggaaattacatatgggaacaataaaccagtaaaggcgcctctgcaagagagatatgtggagaaaatcatcattcatgaaaaatacaactctgcgacagagggaaatgacattgccctcgtggagatcacccctcccatttcgtgtgggcgcttcattgggccgggctgcctgccccactttaaggcaggcctccccagaggctcccagagctgctgggtggccggctggggatatatagaagagaaaggcttcctggagtgtccggcaggtacctctccattcaagacgggtgtagctgtcgctctagagctctgtccataaccaagctgtctctctctcccctggctcccagaagatctcttgcccatccaacactacctgata

SEQ ID NO: 50100 - DNA, 1625 bp, Homo sapiens
caggcagtgcaggagtatggttgagatgctaccaactgccattctgctggtcttggcagtgtccgtggttgctaaagataacgccacgtgtgatggcccctgtgggttacggttcaggcaaaacccacagggtggtgtccgcatcgtcggcgggaaggctgcacagcatggggcctggccctggatggtcagcctccagatcttcacgtacaacagccacaggtaccacacatgtggaggcagcttgctgaattcacgatgggtgctcactgctgctcactgcttcgtcggcaaaaataatgtgcatgactggagactggttttcggagcaaaggaaattacatatgggaacaataaaccagtaaaggcgcctctgcaagagagatatgtggagaaaatcatcattcatgaaaaatacaactctgcgacagagggaaatgacattgccctcgtggagatcacccctcccatttcgtgtgggcgcttcattgggccgggctgcctgccccactttaaggcaggcctccccagaggctcccagagctgctgggtggccggctggggatatatagaagagaaagcccccaggccatcatctatactgatggaggcacgtgtggatctcatcgacctggacttgtgtaactcgacccagtggtacaatgggcgcgttcagccaaccaatgtgtgcgcggggtatcctgtaggcaagatcgacacctgccagcaggagaccatgtcactgtggaaattgtcctcccagagccttccgacccctctgggcaggggaagagtggctcaggcagatagtgacctctgtgtccttctggacagggagacagcggcgggcctctcatgtgcaaagacagcaaggaaagcgcctatgtggtcgtgggaatcacaagctggggggtaggctgtgcccgtgccaagcgccccggaatctacacggccacctggccttatctgaactggatcgcctccaagattggttctaacgctttgcgtatgattcaatcggccacccctccaccgcccaccactcgaccgcccccgattcgaccccccttctcccaccctatctctgctcaccttccttggtatttccaaccgccccctcgaccacttccaccccgaccaccggcagcccagccccgacccccaccttcacccccgcccccacccccacctccagcctcacctttacccccacccccacccccacccccacctacaccctcatctaccacaaaacttccccaaggactttcttttgccaagcgcctacagcagctcatagaggtcttgaaggggaagacctattccgacggaaagaaccattatgacatggagaccacagagctcccagaactgacctcgacctcctgatctgacctggttctcaacagacccagtgagcccttcactcctgagaaaaaggaaagatgaaataaataaataaacatatatatatagatatacacacacacatatctgtatgtatacatgcatatacatcaagagatgctttctggacttcttcctatcccccctcccaacccaaatttcccctataaaatctaccctctctccttcaccctacaataaggcggaattgcttgtac

SEQ ID NO: 50101 - DNA, 1518 bp, Homo sapiens
caggcagtgcaggagtatggttgagatgctaccaactgccattctgctggtcttggcagtgtccgtggttgctaaagataacgccacgtgtgatggcccctgtgggttacggttcaggcaaaacccacagggtggtgtccgcatcgtcggcgggaaggctgcacagcatggggcctggccctggatggtcagcctccagatcttcacgtacaacagccacaggtaccacacatgtggaggcagcttgctgaattcacgatgggtgctcactgctgctcactgcttcgtcggcaaaaataatgtgcatgactggagactggttttcggagcaaaggaaattacatatgggaacaataaaccagtaaaggcgcctctgcaagagagatatgtggagaaaatcatcattcatgaaaaatacaactctgcgacagagggaaatgacattgccctcgtggagatcacccctcccatttcgtgtgggcgcttcattgggccgggctgcctgccccactttaaggcaggcctccccagaggctcccagagctgctgggtggccggctggggatatatagaagagaaagcccccaggccatcatctatactgatggaggcacgtgtggatctcatcgacctggacttgtgtaactcgacccagtggtacaatgggcgcgttcagccaaccaatgtgtgcgcggggtatcctgtaggcaagatcgacacctgccagggagacagcggcgggcctctcatgtgcaaagacagcaaggaaagcgcctatgtggtcgtgggaatcacaagctggggggtaggctgtgcccgtgccaagcgccccggaatctacacggccacctggccttatctgaactggatcgcctccaagattggttctaacgctttgcgtatgattcaatcggccacccctccaccgcccaccactcgaccgcccccgattcgaccccccttctcccaccctatctctgctcaccttccttggtatttccaaccgccccctcgaccacttccaccccgaccaccggcagcccagccccgacccccaccttcacccccgcccccacccccacctccagcctcacctttacccccacccccacccccacccccacctacaccctcatctaccacaaaacttccccaaggactttcttttgccaagcgcctacagcagctcatagaggtcttgaaggggaagacctattccgacggaaagaaccattatgacatggagaccacagagctcccagaactgacctcgacctcctgatctgacctggttctcaacagacccagtgagcccttcactcctgagaaaaaggaaagatgaaataaataaataaacatatatatatagatatacacacacacatatctgtatgtatacatgcatatacatcaagagatgctttctggacttcttcctatcccccctcccaacccaaatttcccctataaaatctaccctctctccttcaccctacaataaggcggaattgcttgtac

SEQ ID NO: 50102 - DNA, 256 bp, Homo sapiens
  misc_feature (161)..(161): n is a, c, g, or t
  misc_feature (170)..(170): n is a, c, g, or t
  misc_feature (220)..(220): n is a, c, g, or t
caacgacgtgcagctccaggtagcggttctgacgcagggcagggaggtggccctcctggggggtgactctgacaccgaagaactcacacagcgtcagccagaagccaggggtgaactgcaggcctcggtgggcctgggagtgcagagcatcacggaaactntgggccccntcctcctggagcatttccccacccactggagggcggtagtcccaccacgnacacccttacgccatgtttccctccctggggtctct

SEQ ID NO: 50103 - DNA, 376 bp, Homo sapiens
aaagttaaaccaaaagaatatatgaagggcatataatgaagggatatctacaaagttgtgacagggctaatgggaagaacaggggatatgaggcagcccaagatcagcaacagtagtgatccagtgtcaccctgtgctggttatgaagatttagtctcttctatcttttccaataccgctttgctagccacctccccaaaccctaccaatagaaagcactggaggaagactagagggctggaaggatgtgaaaagatttcccactttgtttgttgacatcctcacagaatgggttcttcaacctggcagtggcagttgaatccagtaacagcagttggcttcagtttggagatcttccatgctcctaaaatcagcc

SEQ ID NO: 50104 - DNA, 527 bp, Homo sapiens
agatcagccagaagagggcttgagatcagttaccagacactgggggtgactgtcacactaagagcctttggggactcaataatactgggatacagtatttaggactggtatcctgttcctctgcccggtggggctcctattgactccctctgggtacagtggagttgcccctctgcccaggtgtggtggagcctagagagagtgcagtggatagggacctcacctcagcttgactgatattttgagctctgcacagtgtcctcaaacctgggacagaaaagatgagacccagacctcccaggagctcttggtcatagaggttactctctgtgtgtccttgccgtctgctgctttcacaatgggatagaattgggcagaattgggcagaattgggcagaatgttatttttggctgtggtgagtacagtgctgcctcactggacccaagcccaagctgcccgttaatttccagcagcttccagcccaggcattcaggccactgaggatgaggggagagaccatggttcg

SEQ ID NO: 50105 - DNA, 813 bp, Homo sapiens
tgaggaaatggaaactgaagcatgttgtacatacattttgtgtgagaagaacctgcaaggtcaaagtacatgtcagaaagcagcaaagtcattcatttaacatcttttactgacatttctgaatgtctcaagccccagctggatagaagatacgcttatacagaagaacctagggttaaaaccgtgtcagatgttggtgccttgggaggatctgacatggaaaatttgttgcaatctttgtatgtagaaaatagagctggattcttctttactaaattctgcgagcattcagggaacaagttgtggaagaacagtgtgtacttttggtttgacctgcaggcttatcatcagcttttctaccaagaaacacttcagccttttaaagtatgcaagcaagcgcaagtacgtagtaaataatattggttcaatgtgaagcactaagtacacagagaaatgaaaattgtgtccagtcccaaacgagaaatctgggatcgcaggcaaaaaggcagcaattaaattgttgccatgggattactgtatttgaaatcagcaaaatattgttttataatatgatttgtgagttttcagttttatgtcttttatttggtttgctttattttctcttgccaactacttgttcttctgataaagaacatctctctctcttttttttctaatgtatacctttttggtttggttttgagtgatttaaaagaagaccccgagaatggacatgtaatgaatcattgaagtgatggggaacagagacattgaccaatgttgctctctgagcttcctgcagatatcagctgt

SEQ ID NO: 50106 - DNA, 4195 bp, Homo sapiens
  misc_feature (1470)..(1470): n is a, c, g, or t
agcggagtggattagtgaccaggcaggattccagaggcctttccttcccacttccaccttgaattccaacttaaaatgcaagccatgtacagagaatgaacagagggccagaaatgtgctacgcttgcctgtgtataacgtagggctaggtgctgtctcccatgatttcatttactcaaaggaaatcagatttgagggagataatgtaatattttgtcttgtttcagagccaccaactattacagaagaagaatttgaagattctctggcaacagatgatttccttgtagactactttaatgaattcctaagccttccaaccttttcagaggcaattagatttaatgcagattatggagtttttgaagtagctaatgatgctccacaatttctggaaaaacaactgaaaaaaattctacaaaaccagcaacctcgaaatcccatttatgatgttgtaaggaaaggaaagaatgaggttaaacctgttcaaatgaatgcccccgatgaagatgagaccattaatgtcaactacaatattatgtgtctcagtcgtgaagaaggtattaagtggatcaaaaaagaaagacttccagcatttctggaaagtgattgttactttgaatacaggttagccaaattggtctcacaagtaagatggagcaagtccggcatgaatttcacagtaggatcaaatttttctccctggatcgtgaaaaaaccacccagtctaccacctcctgccactgaagaagataatcttgtaattatgaaaaagttctatgtatcacttggtgaggcttcctatactcaaacaaaagattggtttgcattagcaaaacaaagtcagcaaacagtatcaaccttttcgttaccctgttgtgtaccctacaacaaacttaaatcaccagctatttcatctgtttctgagaattttatctttgatgatggagttcaccctaggacaaaaaaggacccatctaaaaccaacaaattgatttctgaatttgaagaagaagaaggagaagaagaagaggtgtctgtatctctacaagacactccttctcaagctcttctgagagtataccttgaaaagaaacaggatgttgatgaaagcctgacaatgcatttctcaacatgtgaagaatttttaagctcctatatatactttattttgagaggagcaattcagcaaattgttggaaagccagttggagaaaccccagactatataaacttcaacaatataacaaaagtgtcatttgatgattgttttgagtctattcatggcaagaattttttaagtgaattagttcaaactacaaaggagaggtcagaagagatagaacaaacaagtttaagttcaaagaatgagagcgctggaccagagagcagggcggactggtgtatttctcataggacttatgacattggcaatagaaaggagtttgaaagatttaagaaatttataanaggtacattgggagagagatattggtggctatggatggatattgagaggttaaaagttcttaaggatcctggaagacatcaaagacatcttgagaagatgaaaaaatgctatctagtgagcaatggagattactacctttctgcagaaatcttatcaaaatttaaactgttagatggatcacagtggaatgaagagcatttaagaaatattcagtctgaagttttaaaacctttacttctgtattgggcaccaagattctgtgttactcattcagcctcaacaaaatatgctagtgctgaactgaaattctggcacctccgtcaagcaaaaccaaggaaggatattgacccttttccacaaatggcaaccctcttgccattaagacccaaatcttgcattccacagatacctgagatccagaaagaagaattcagcttatcacaacctcctaaatctcccaataaatcacctgaagtaaaaacagcaactcaaaagccttggaagcgggagcttttgtatccaggttcttctaaggatgatgtgattgagaaagggtcaaagtacatgtcagaaagcagcaaagtcattcatttaacatcttttactgacatttctgaatgtctcaagccccagctggatagaagatacgcttatacagaagaacctagggttaaaaccgtgtcagatgttggtgccttgggaggatctgacatggaaaatttgttgcaatctttgtatgtagaaaatagagctggattcttctttactaaattctgcgagcattcagggaacaagttgtggaagaacagtgtgtacttttggtttgacctgcaggcttatcatcagcttttctaccaagaaacacttcagccttttaaagtatgcaagcaagcgcaatatctttttgccacatacgttgctccttctgccactcttgacattggactccaacaggaaaagaaaaaagaaatttatatgaaaatacagccaccatttgaagacctttttgacacagcagaggaatatatccttctcctccttcttgagccatggacaaagatggtaaaatcggaccaaattgcttataaaaaggtggagctggtggaagaaactcgacagttagactccacatacttcagaaagctacaggctttgcataaagagacattttccaagaaagctgaggacaccacttgtgaaattggaactggcattttatcactctctaacgtctctaaacgaacagaatattgggataatgttcctgcagaatacaagcattttaagtttagtgatctgcttaacaacaaactggagtttgaacatttccgtcagtttcttgagactcattcttcaagcatggatcttatgtgctggacagacattgagcagttccggagaataacttacagagatcgaaatcaaaggaaggcaaaatctatatacattaaaaacaaataccttaataaaaaatatttctttggacccaacagtccagcttctctgtatcagcagaaccaggtaatgcatttaagtggtggctgggggaagattcttcatgagcagcttgatgcacctgttctagttgaaatccagaagcatgtgcaaaataggctagaaaatgtatggctgccattgtttcttgcaagtgaacagtttgcagcacgtcagaagataaaggtacagatgaaagacatagcagaagagctcttactacagaaggctgaaaagaaaatcggggtctggaagcctgtggagagtaagtggatctcttcatcttgtaaaatcattgcttttcgcaaagcattattgaatccagttacttcaagacaatttcaacgttttgtggctctaaaaggagatttattggaaaatggtttactcttttggcaagaagtacaaaaatataaggacttgtgccattctcattgtgatgagtctgtcatccagaagaagattacaactattatcaactgctttattaattccagtattccaccagctttacaaattgacattccagtagagcaagcccagaagattattgaacaccggaaggagttaggaccatatgtatttagagaggcacagatgacaatttttggggttctgtttaaattctggcctcagttctgtgagtttaggaagaatttaacagatgaaaatattatgagtgttttagagagaagacaagaatataataagcagaaaaaaaaattggcagtcctagaagacgaaaaatctggaaaggatggaatcaaacaatatgcaaatacttcagtgcctgctatcaaaactgctttactcagtgattccttcctaggcctccaaccatatggccgacagccaacctggtgctactcaaagtatatagaagccttagaacaggagagaattcttcttaagatccaagaagaactagaaaaaaagttgtttgcaggcttgcaacctctcacaaattttaaggctagctcttcaactatgtctttgaaaaagaatatgtctgcccacagcagccagaagtgacagcattcttgtgaatgtttacatcctgctgctgataggttcaaggaattctttaaaccagattctgctgacatgagaagctccagtgatttgtttttttgaaggtctgtatcagagcaagcctaacatctaaataaagtttgattctggattttccaggtgggaaataaaaaaaaaaatttggcttgtcttaaaaaa

SEQ ID NO: 50107 - DNA, 4077 bp, Homo sapiens
  misc_feature (1352)..(1352): n is a, c, g, or t
cgctcaggccctgacccgcgctggacccgcgcgctagggccctgacggcccgcgcgggctccaggcgcgggcagcggggacggcatgcccgagaagaggctcaccgcggagccaccaactattacagaagaagaatttgaagattctctggcaacagatgatttccttgtagactactttaatgaattcctaagccttccaaccttttcagaggcaattagatttaatgcagattatggagtttttgaagtagctaatgatgctccacaatttctggaaaaacaactgaaaaaaattctacaaaaccagcaacctcgaaatcccatttatgatgttgtaaggaaaggaaagaatgaggttaaacctgttcaaatgaatgcccccgatgaagatgagaccattaatgtcaactacaatattatgtgtctcagtcgtgaagaaggtattaagtggatcaaaaaagaaagacttccagcatttctggaaagtgattgttactttgaatacaggttagccaaattggtctcacaagtaagatggagcaagtccggcatgaatttcacagtaggatcaaatttttctccctggatcgtgaaaaaaccacccagtctaccacctcctgccactgaagaagataatcttgtaattatgaaaaagttctatgtatcacttggtgaggcttcctatactcaaacaaaagattggtttgcattagcaaaacaaagtcagcaaacagtatcaaccttttcgttaccctgttgtgtaccctacaacaaacttaaatcaccagctatttcatctgtttctgagaattttatctttgatgatggagttcaccctaggacaaaaaaggacccatctaaaaccaacaaattgatttctgaatttgaagaagaagaaggagaagaagaagaggtgtctgtatctctacaagacactccttctcaagctcttctgagagtataccttgaaaagaaacaggatgttgatgaaagcctgacaatgcatttctcaacatgtgaagaatttttaagctcctatatatactttattttgagaggagcaattcagcaaattgttggaaagccagttggagaaaccccagactatataaacttcaacaatataacaaaagtgtcatttgatgattgttttgagtctattcatggcaagaattttttaagtgaattagttcaaactacaaaggagaggtcagaagagatagaacaaacaagtttaagttcaaagaatgagagcgctggaccagagagcagggcggactggtgtatttctcataggacttatgacattggcaatagaaaggagtttgaaagatttaagaaatttataanaggtacattgggagagagatattggtggctatggatggatattgagaggttaaaagttcttaaggatcctggaagacatcaaagacatcttgagaagatgaaaaaatgctatctagtgagcaatggagattactacctttctgcagaaatcttatcaaaatttaaactgttagatggatcacagtggaatgaagagcatttaagaaatattcagtctgaagttttaaaacctttacttctgtattgggcaccaagattctgtgttactcattcagcctcaacaaaatatgctagtgctgaactgaaattctggcacctccgtcaagcaaaaccaaggaaggatattgacccttttccacaaatggcaaccctcttgccattaagacccaaatcttgcattccacagatacctgagatccagaaagaagaattcagcttatcacaacctcctaaatctcccaataaatcacctgaagtaaaaacagcaactcaaaagccttggaagcgggagcttttgtatccaggttcttctaaggatgatgtgattgagaaagggtcaaagtacatgtcagaaagcagcaaagtcattcatttaacatcttttactgacatttctgaatgtctcaagccccagctggatagaagatacgcttatacagaagaacctagggttaaaaccgtgtcagatgttggtgccttgggaggatctgacatggaaaatttgttgcaatctttgtatgtagaaaatagagctggattcttctttactaaattctgcgagcattcagggaacaagttgtggaagaacagtgtgtacttttggtttgacctgcaggcttatcatcagcttttctaccaagaaacacttcagccttttaaagtatgcaagcaagcgcaatatctttttgccacatacgttgctccttctgccactcttgacattggactccaacaggaaaagaaaaaagaaatttatatgaaaatacagccaccatttgaagacctttttgacacagcagaggaatatatccttctcctccttcttgagccatggacaaagatggtaaaatcggaccaaattgcttataaaaaggtggagctggtggaagaaactcgacagttagactccacatacttcagaaagctacaggctttgcataaagagacattttccaagaaagctgaggacaccacttgtgaaattggaactggcattttatcactctctaacgtctctaaacgaacagaatattgggataatgttcctgcagaatacaagcattttaagtttagtgatctgcttaacaacaaactggagtttgaacatttccgtcagtttcttgagactcattcttcaagcatggatcttatgtgctggacagacattgagcagttccggagaataacttacagagatcgaaatcaaaggaaggcaaaatctatatacattaaaaacaaataccttaataaaaaatatttctttggacccaacagtccagcttctctgtatcagcagaaccaggtaatgcatttaagtggtggctgggggaagattcttcatgagcagcttgatgcacctgttctagttgaaatccagaagcatgtgcaaaataggctagaaaatgtatggctgccattgtttcttgcaagtgaacagtttgcagcacgtcagaagataaaggtacagatgaaagacatagcagaagagctcttactacagaaggctgaaaagaaaatcggggtctggaagcctgtggagagtaagtggatctcttcatcttgtaaaatcattgcttttcgcaaagcattattgaatccagttacttcaagacaatttcaacgttttgtggctctaaaaggagatttattggaaaatggtttactcttttggcaagaagtacaaaaatataaggacttgtgccattctcattgtgatgagtctgtcatccagaagaagattacaactattatcaactgctttattaattccagtattccaccagctttacaaattgacattccagtagagcaagcccagaagattattgaacaccggaaggagttaggaccatatgtatttagagaggcacagatgacaatttttggggttctgtttaaattctggcctcagttctgtgagtttaggaagaatttaacagatgaaaatattatgagtgttttagagagaagacaagaatataataagcagaaaaaaaaattggcagtcctagaagacgaaaaatctggaaaggatggaatcaaacaatatgcaaatacttcagtgcctgctatcaaaactgctttactcagtgattccttcctaggcctccaaccatatggccgacagccaacctggtgctactcaaagtatatagaagccttagaacaggagagaattcttcttaagatccaagaagaactagaaaaaaagttgtttgcaggcttgcaacctctcacaaattttaaggctagctcttcaactatgtctttgaaaaagaatatgtctgcccacagcagccagaagtgacagcattcttgtgaatgtttacatcctgctgctgataggttcaaggaattctttaaaccagattctgctgacatgagaagctccagtgatttgtttttttgaaggtctgtatcagagcaagcctaacatctaaataaagtttgattctggattttccaggtgggaaataaaaaaaaaaatttggcttgtcttaaaaaa

SEQ ID NO: 50108 - DNA, 1938 bp, Homo sapiens
atggactgtggagccagaggagtagaaggagcaatggaaacctggcaggaagattctctggcaacagatgatttccttgtagactactttaatgaattcctaagccttccatatctttttgccacatacgttgctccttctgccactcttgacattggactccaacaggaaaagaaaaaagaaatttatatgaaaatacagccaccatttgaagacctttttgacacagcagaggaatatatccttctcctccttcttgagccatggacaaagatggtaaaatcggaccaaattgcttataaaaaggtggagctggtggaagaaactcgacagttagactccacatacttcagaaagctacaggctttgcataaagagacattttccaagaaagctgaggacaccacttgtgaaattggaactggcattttatcactctctaacgtctctaaacgaacagaatattgggataatgttcctgcagaatacaagcattttaagtttagtgatctgcttaacaacaaactggagtttgaacatttccgtcagtttcttgagactcattcttcaagcatggatcttatgtgctggacagacattgagcagttccggagaataacttacagagatcgaaatcaaaggaaggcaaaatctatatacattaaaaacaaataccttaataaaaaatatttctttggacccaacagtccagcttctctgtatcagcagaaccaggtaatgcatttaagtggtggctgggggaagattcttcatgagcagcttgatgcacctgttctagttgaaatccagaagcatgtgcaaaataggctagaaaatgtatggctgccattgtttcttgcaagtgaacagtttgcagcacgtcagaagataaaggtacagatgaaagacatagcagaagagctcttactacagaaggctgaaaagaaaatcggggtctggaagcctgtggagagtaagtggatctcttcatcttgtaaaatcattgcttttcgcaaagcattattgaatccagttacttcaagacaatttcaacgttttgtggctctaaaaggagatttattggaaaatggtttactcttttggcaagaagtacaaaaatataaggacttgtgccattctcattgtgatgagtctgtcatccagaagaagattacaactattatcaactgctttattaattccagtattccaccagctttacaaattgacattccagtagagcaagcccagaagattattgaacaccggaaggagttaggaccatatgtatttagagaggcacagatgacaatttttggggttctgtttaaattctggcctcagttctgtgagtttaggaagaatttaacagatgaaaatattatgagtgttttagagagaagacaagaatataataagcagaaaaaaaaattggcagtcctagaagacgaaaaatctggaaaggatggaatcaaacaatatgcaaatacttcagtgcctgctatcaaaactgctttactcagtgattccttcctaggcctccaaccatatggccgacagccaacctggtgctactcaaagtatatagaagccttagaacaggagagaattcttcttaagatccaagaagaactagaaaaaaagttgtttgcaggcttgcaacctctcacaaattttaaggctagctcttcaactatgtctttgaaaaagaatatgtctgcccacagcagccagaagtgacagcattcttgtgaatgtttacatcctgctgctgataggttcaaggaattctttaaaccagattctgctgacatgagaagctccagtgatttgtttttttgaaggtctgtatcagagcaagcctaacatctaaataaagtttgattctggattttccaggtgggaaataaaaaaaaaaatttggcttgtcttaaaaaa

SEQ ID NO: 50109 - DNA, 4041 bp, Homo sapiens
  misc_feature (1316)..(1316): n is a, c, g, or t
cgctcaggccctgacccgcgctggacccgcgcgctagggccctgacggcccgcgcgggctccaggcgcgggcagcggggacggcatgcccgagaagaggctcaccgcggagccaccaactattacagaagaagaatttgaagattctctggcaacagatgatttccttgtagactactttaatgaattcctaagccttccaaccttttcagaggcaattagatttaatgcagattatggagtttttgaagtagctaatgatgctccacaatttctggaaaaacaactgaaaaaaattctacaaaaccagcaacctcgaaatcccatttatgatgttgtaaggaaaggaaagaatgaggttaaacctgttcaaatgaatgcccccgatgaagatgagaccattaatgtcaactacaatattatgtgtctcagtcgtgaagaaggtattaagtggatcaaaaaagaaagacttccagcatttctggaaagtgattgttactttgaatacaggttagccaaattggtctcacaagtaagatggagcaagtccggcatgaatttcacagtaggatcaaatttttctccctggatcgtgaaaaaaccacccagtctaccacctcctgccactgaagaagataatcttgcttcctatactcaaacaaaagattggtttgcattagcaaaacaaagtcagcaaacagtatcaaccttttcgttaccctgttgtgtaccctacaacaaacttaaatcaccagctatttcatctgtttctgagaattttatctttgatgatggagttcaccctaggacaaaaaaggacccatctaaaaccaacaaattgatttctgaatttgaagaagaagaaggagaagaagaagaggtgtctgtatctctacaagacactccttctcaagctcttctgagagtataccttgaaaagaaacaggatgttgatgaaagcctgacaatgcatttctcaacatgtgaagaatttttaagctcctatatatactttattttgagaggagcaattcagcaaattgttggaaagccagttggagaaaccccagactatataaacttcaacaatataacaaaagtgtcatttgatgattgttttgagtctattcatggcaagaattttttaagtgaattagttcaaactacaaaggagaggtcagaagagatagaacaaacaagtttaagttcaaagaatgagagcgctggaccagagagcagggcggactggtgtatttctcataggacttatgacattggcaatagaaaggagtttgaaagatttaagaaatttataanaggtacattgggagagagatattggtggctatggatggatattgagaggttaaaagttcttaaggatcctggaagacatcaaagacatcttgagaagatgaaaaaatgctatctagtgagcaatggagattactacctttctgcagaaatcttatcaaaatttaaactgttagatggatcacagtggaatgaagagcatttaagaaatattcagtctgaagttttaaaacctttacttctgtattgggcaccaagattctgtgttactcattcagcctcaacaaaatatgctagtgctgaactgaaattctggcacctccgtcaagcaaaaccaaggaaggatattgacccttttccacaaatggcaaccctcttgccattaagacccaaatcttgcattccacagatacctgagatccagaaagaagaattcagcttatcacaacctcctaaatctcccaataaatcacctgaagtaaaaacagcaactcaaaagccttggaagcgggagcttttgtatccaggttcttctaaggatgatgtgattgagaaagggtcaaagtacatgtcagaaagcagcaaagtcattcatttaacatcttttactgacatttctgaatgtctcaagccccagctggatagaagatacgcttatacagaagaacctagggttaaaaccgtgtcagatgttggtgccttgggaggatctgacatggaaaatttgttgcaatctttgtatgtagaaaatagagctggattcttctttactaaattctgcgagcattcagggaacaagttgtggaagaacagtgtgtacttttggtttgacctgcaggcttatcatcagcttttctaccaagaaacacttcagccttttaaagtatgcaagcaagcgcaatatctttttgccacatacgttgctccttctgccactcttgacattggactccaacaggaaaagaaaaaagaaatttatatgaaaatacagccaccatttgaagacctttttgacacagcagaggaatatatccttctcctccttcttgagccatggacaaagatggtaaaatcggaccaaattgcttataaaaaggtggagctggtggaagaaactcgacagttagactccacatacttcagaaagctacaggctttgcataaagagacattttccaagaaagctgaggacaccacttgtgaaattggaactggcattttatcactctctaacgtctctaaacgaacagaatattgggataatgttcctgcagaatacaagcattttaagtttagtgatctgcttaacaacaaactggagtttgaacatttccgtcagtttcttgagactcattcttcaagcatggatcttatgtgctggacagacattgagcagttccggagaataacttacagagatcgaaatcaaaggaaggcaaaatctatatacattaaaaacaaataccttaataaaaaatatttctttggacccaacagtccagcttctctgtatcagcagaaccaggtaatgcatttaagtggtggctgggggaagattcttcatgagcagcttgatgcacctgttctagttgaaatccagaagcatgtgcaaaataggctagaaaatgtatggctgccattgtttcttgcaagtgaacagtttgcagcacgtcagaagataaaggtacagatgaaagacatagcagaagagctcttactacagaaggctgaaaagaaaatcggggtctggaagcctgtggagagtaagtggatctcttcatcttgtaaaatcattgcttttcgcaaagcattattgaatccagttacttcaagacaatttcaacgttttgtggctctaaaaggagatttattggaaaatggtttactcttttggcaagaagtacaaaaatataaggacttgtgccattctcattgtgatgagtctgtcatccagaagaagattacaactattatcaactgctttattaattccagtattccaccagctttacaaattgacattccagtagagcaagcccagaagattattgaacaccggaaggagttaggaccatatgtatttagagaggcacagatgacaatttttggggttctgtttaaattctggcctcagttctgtgagtttaggaagaatttaacagatgaaaatattatgagtgttttagagagaagacaagaatataataagcagaaaaaaaaattggcagtcctagaagacgaaaaatctggaaaggatggaatcaaacaatatgcaaatacttcagtgcctgctatcaaaactgctttactcagtgattccttcctaggcctccaaccatatggccgacagccaacctggtgctactcaaagtatatagaagccttagaacaggagagaattcttcttaagatccaagaagaactagaaaaaaagttgtttgcaggcttgcaacctctcacaaattttaaggctagctcttcaactatgtctttgaaaaagaatatgtctgcccacagcagccagaagtgacagcattcttgtgaatgtttacatcctgctgctgataggttcaaggaattctttaaaccagattctgctgacatgagaagctccagtgatttgtttttttgaaggtctgtatcagagcaagcctaacatctaaataaagtttgattctggattttccaggtgggaaataaaaaaaaaaatttggcttgtcttaaaaaa

SEQ ID NO: 50110 - DNA, 794 bp, Homo sapiens
agcggagtggattagtgaccaggcaggattccagaggcctttccttcccacttccaccttgaattccaacttaaaatgcaagccatgtacagagaatgaacagagggccagaaatgtgctacgcttgcctgtgtataacagccaccaactattacagaagaagaatttgaagattctctggcaacagatgatttccttgtagactactttaatgaattcctaagccttccaaccttttcagaggcaattagatttaatgcagattatggagtttttgaagtagctaatgatgctccacaatttctggaaaaacaactgaaaaaaattctacaaaaccagcaacctcgaaatcccatttatgatgttgtaaggaaaggaaagaatgaggttaaacctgttcaaatgaatgcccccgatgaagatgagaccattaatgtcaactacaatattatgtgtctcagtcgtgacgcaaggtattacacgtggatcacacccgcacacgcacttccagcatttctgcgaaacagtgatcgtcaccttgacatacagcgttacgccacatgggtctcacacagtaagacactggagccaagtccggcctgcaatttcaacacgtacggatcaacactttttctccccggactccgtgcacaaaacacgcatcccagtactaagcaaagcctccctggcccaactggccacgcacagaaaactctaggtaattcatgacacacagtacctactgtattccaattggctgaatggcttccctatacctcaaacgcagcacatcg

SEQ ID NO: 50111 - DNA, 4050 bp, Homo sapiens
  misc_feature (1325)..(1325): n is a, c, g, or t
agcggagtggattagtgaccaggcaggattccagaggcctttccttcccacttccaccttgaattccaacttaaaatgcaagccatgtacagagaatgaacagagggccagaaatgtgctacgcttgcctgtgtataacgtagggctaggtgctgtctcccatgatttcatttactcaaaggaaatcagatttgagggagataatgtaatattttgtcttgtttcagagccaccaactattacagaagaagaatttgaagattctctggcaacagatgatttccttgtagactactttaatgaattcctaagccttccactaggtctctggacccattatggaaattagattgacacaccaaagctcctgctccctttccaagaacaagcctgagcaacaccacaggatattcaaggagttcttgtttgaccttttcagaggcaattagatttaatgcagattatggagtttttgaagtagctaatgatgctccacaatttctggaaaaacaactgaaaaaaattctacaaaaccagcaacctcgaaatcccatttatgatgttgtaaggaaaggaaagaatgaggttaaacctgttcaaatgaatgcccccgatgaagatgagaccattaatgtcaactacaatattatggcttcctatactcaaacaaaagattggtttgcattagcaaaacaaagtcagcaaacagtatcaaccttttcgttaccctgttgtgtaccctacaacaaacttaaatcaccagctatttcatctgtttctgagaattttatctttgatgatggagttcaccctaggacaaaaaaggacccatctaaaaccaacaaattgatttctgaatttgaagaagaagaaggagaagaagaagaggtgtctgtatctctacaagacactccttctcaagctcttctgagagtataccttgaaaagaaacaggatgttgatgaaagcctgacaatgcatttctcaacatgtgaagaatttttaagctcctatatatactttattttgagaggagcaattcagcaaattgttggaaagccagttggagaaaccccagactatataaacttcaacaatataacaaaagtgtcatttgatgattgttttgagtctattcatggcaagaattttttaagtgaattagttcaaactacaaaggagaggtcagaagagatagaacaaacaagtttaagttcaaagaatgagagcgctggaccagagagcagggcggactggtgtatttctcataggacttatgacattggcaatagaaaggagtttgaaagatttaagaaatttataanaggtacattgggagagagatattggtggctatggatggatattgagaggttaaaagttcttaaggatcctggaagacatcaaagacatcttgagaagatgaaaaaatgctatctagtgagcaatggagattactacctttctgcagaaatcttatcaaaatttaaactgttagatggatcacagtggaatgaagagcatttaagaaatattcagtctgaagttttaaaacctttacttctgtattgggcaccaagattctgtgttactcattcagcctcaacaaaatatgctagtgctgaactgaaattctggcacctccgtcaagcaaaaccaaggaaggatattgacccttttccacaaatggcaaccctcttgccattaagacccaaatcttgcattccacagatacctgagatccagaaagaagaattcagcttatcacaacctcctaaatctcccaataaatcacctgaagtaaaaacagcaactcaaaagccttggaagcgggagcttttgtatccaggttcttctaaggatgatgtgattgagaaagggtcaaagtacatgtcagaaagcagcaaagtcattcatttaacatcttttactgacatttctgaatgtctcaagccccagctggatagaagatacgcttatacagaagaacctagggttaaaaccgtgtcagatgttggtgccttgggaggatctgacatggaaaatttgttgcaatctttgtatgtagaaaatagagctggattcttctttactaaattctgcgagcattcagggaacaagttgtggaagaacagtgtgtacttttggtttgacctgcaggcttatcatcagcttttctaccaagaaacacttcagccttttaaagtatgcaagcaagcgcaatatctttttgccacatacgttgctccttctgccactcttgacattggactccaacaggaaaagaaaaaagaaatttatatgaaaatacagccaccatttgaagacctttttgacacagcagaggaatatatccttctcctccttcttgagccatggacaaagatggtaaaatcggaccaaattgcttataaaaaggtggagctggtggaagaaactcgacagttagactccacatacttcagaaagctacaggctttgcataaagagacattttccaagaaagctgaggacaccacttgtgaaattggaactggcattttatcactctctaacgtctctaaacgaacagaatattgggataatgttcctgcagaatacaagcattttaagtttagtgatctgcttaacaacaaactggagtttgaacatttccgtcagtttcttgagactcattcttcaagcatggatcttatgtgctggacagacattgagcagttccggagaataacttacagagatcgaaatcaaaggaaggcaaaatctatatacattaaaaacaaataccttaataaaaaatatttctttggacccaacagtccagcttctctgtatcagcagaaccaggtaatgcatttaagtggtggctgggggaagattcttcatgagcagcttgatgcacctgttctagttgaaatccagaagcatgtgcaaaataggctagaaaatgtatggctgccattgtttcttgcaagtgaacagtttgcagcacgtcagaagataaaggtacagatgaaagacatagcagaagagctcttactacagaaggctgaaaagaaaatcggggtctggaagcctgtggagagtaagtggatctcttcatcttgtaaaatcattgcttttcgcaaagcattattgaatccagttacttcaagacaatttcaacgttttgtggctctaaaaggagatttattggaaaatggtttactcttttggcaagaagtacaaaaatataaggacttgtgccattctcattgtgatgagtctgtcatccagaagaagattacaactattatcaactgctttattaattccagtattccaccagctttacaaattgacattccagtagagcaagcccagaagattattgaacaccggaaggagttaggaccatatgtatttagagaggcacagatgacaatttttggggttctgtttaaattctggcctcagttctgtgagtttaggaagaatttaacagatgaaaatattatgagtgttttagagagaagacaagaatataataagcagaaaaaaaaattggcagtcctagaagacgaaaaatctggaaaggatggaatcaaacaatatgcaaatacttcagtgcctgctatcaaaactgctttactcagtgattccttcctaggcctccaaccatatggccgacagccaacctggtgctactcaaagtatatagaagccttagaacaggagagaattcttcttaagatccaagaagaactagaaaaaaagttgtttgcaggcttgcaacctctcacaaattttaaggctagctcttcaactatgtctttgaaaaagaatatgtctgcccacagcagccagaagtgacagcattcttgtgaatgtttacatcctgctgctgataggttcaaggaattctttaaaccagattctgctgacatgagaagctccagtgatttgtttttttgaaggtctgtatcagagcaagcctaacatctaaataaagtttgattctggattttccaggtgggaaataaaaaaaaaaatttggcttgtcttaaaaaa

SEQ ID NO: 50112 - DNA, 332 bp, Homo sapiens
ggaagggtgaaaaaaagcatttacattttgtccttggttctcacccatttatgctttgggaaaatcattccctgtcccttgcttgccaagtgtgtacacggtaaaaccaggacagggtaagagccctgctagtataaggttttgtttggttttttgaggcaggttctatcacccaggctggaagtgaaacgccgtctcgaaaaaaaaaaaaattctcaacaattagacaatatatagaactctgtacacagcaaagataaagaaggaagtcttttcaagtacacgtttacagccataaagcaagcctcaataaaatccaaataaccagtatc

SEQ ID NO: 50113 - DNA, 306 bp, Homo sapiens
ggagatcgagaccatcctggctaacatggtgaaaccccgtctctactaaaaatacaaaaaagtagctgggcgtggtggcaggcacctgtagtcccagctactcgggaggctgaggcaggagaatcgcttgaaccctggaggcggaggttgcagtgagctgagtttgcgccactgcactccagcctgggtgacagagcgagactcagtttcaaaaaaaaaaagttcttaacgctatcaaaaaataacttggaaaccactgtggtgtacataaaagtggattttccttgcagtaccttctgcaagtgg

SEQ ID NO: 50114 - DNA, 629 bp, Homo sapiens
ttcctccattttaaaattttattctagttaccacattgttcttgcaattgcttggatttttcagaatagtaataaataataacgggaatcctaggcattcgtgtttttctatgtttttaacaggattttctctaatgtttcgctattaaataccatgcaggaaattgggaaataatatcacaacccaaggtaaatggagctaacagcatagatgggacaagctaagacatgaggaccagcttgcgactccagacctgggaagaccccatgagaagcaggggagagggtgggggcagtcatgggcaggctgggaaactccctctgctcactgagcctgtgggagcaggcccctggagaccccaggtttcacatagtagccacacgaagcagaaaagtcagaagcacagaaggcttcttcccaaggtggtgtggcaggcccaggaagcaggtggcagggccctggcatgaaggccagccagagagcagaacgccaaacaccagcccctggggttccactggcatcaccagtcccgccgtgctaagtggaattttcaggtggaggagagttgggaaaggatagaagtgatatgctatggaaatccttacattgtatgcctctgtgccgaaat

SEQ ID NO: 50115 - DNA, 627 bp, Homo sapiens
tgttttcatcagaaattagaatttaactttggtcaatatacaaagctgttgataaagtaaggcatacccatgtagagtatttattgacagctatccaaacaatcttacattttttccttcatgtttttcttttcaaagaggcagttttattttgctgcattgttactgtaatttcaaactttatagtttaaacctgttttttcatgtctttccatatccctttaagtctaaattttatgtccttacctgatttccctctgaaaaatgttttccagagatgtagtgatattgtgatattaatgctaacccaaatgttaatatgccattcatttgagaaatatatttgagagtcttctgtgtgctagtgtgtctggaattggtgggttcttggtcttgctgacttcaagaatgaagccgcagaccctcgtggtgagtgttacaattcttaaagatggcgtgtccggagtttgttccttctgatgttcggacgtgtccaaagcttcttccttctggtgggttcctggtctcgctggcttcaggagtgaagctgcagaccttcgcagtgagtgttacagctcttaaaggcggcgggtctggagttgttcattccttccatctggagttgtt

SEQ ID NO: 50116 - DNA, 929 bp, Homo sapiens
tttttttttttgagatagtcttgctctgttgcttaagccagagtgcagtggcgcaatctcagctcactgcaacctccgcctcctgggttcaagtgattcttgtgcctcagcctcccacgtagctgagattacaggcttgcaccaccatgttcagctaatttttgtatggtaaagacggagtttcaccatgttggccaggttggtctcgaactcctggcctcaagtgatcctccccctgcgctcgcttcagcctcccaaagtgctgggattacaggtgtgagccaccacgcctggccaagagcctcactcctgtctttagtgattgcactgaagcaggcctcatttttttgcagtcatgctaaccacaagttagtcaacattcactaattgacattcattagaataggtctccaaggtgaggcataacgttggggtgtaatctggatttcgcagtcatctttttggggaaactgaaagtaccatctcatttgcatgaagtgactccacactggccctgtatatggactctggtaaaatgtgagtgtggtacagaggaaataggtaagacccccttatctagccctctcggcagcagcgggggggtgttacaaaggactagctgttcaaatatcttttgtattgtattgattcccctattgaatataaatatttaaagtataataactatactgtaggtgggcttatgagtgttctaaatatctaatagctaaattgaaataagtagaaatataaacaatttagcagctttctgtaatacatttacactcaaattataagcagctaattctaaaaaagatgtcactgtaaactattgagaactatagtattttatatataattatatgttcatgtatttgaacccaaaataattttaactgaaatgctttgaataaagtatactgtaaata

SEQ ID NO: 50117 - DNA, 1193 bp, Homo sapiens
tagtgattttagtaagagtaagttcagtgcagtgatgacaatagaatgcagattgcagttgctagaatataaacaggaaataagaagataaagacaactcgtggaataccttttcatagagcttaggtaaactgtaggaattattctccttgtactctaatacttattatgggttttatttataattatagtgtaatataatggatgagtgcatgggcttccccacttagcatttgttaagcattaacttaacattaagcattagactttgggcaagttgcttaatctttctaaacctcagttattttatctataaaatggcgataaaataatacctacctcacgaaggtgtggtaaggattaaagtgaaaatgtagagagcaggtagcatgctttgaacacagttcttggcacagaaagtgcccaataaattgttagtttcttgtagctattacatgccaggtcctgtgctaactaagcgctttatatgcattgtctcttggactcattggaagacctactgttttaattttggctgctgataaaactgcatcacagagaggttacctaatttgccccaaggtcacaggacaggactagtaagtggtcttggttcattattgtcaaatttactaatcaccttgagaaaaattaagattggatggttgccttattttacaacttagaagatgattgaagacattttggtgcaggtggggagccagattgcaagtagcctcagtgagttgtgtgggtgagttaagcaaccttttttattctttttttttgagacggagttttgctgttggtgcccaggctagagtgcagtcacagcttactgaaacctccacctcctcatttcaagcgattcacctgaactcctgaccttaggtgatctgcccgcatcagcctccccaaggtgctgggattacaggcgtgagccaccatgcccagctgagttaagcaatctttatgtagagctctcctttgagaaagaagttggttggttcaaagaaagataaatgggacagtggcttggaagaggtaatggaggctaggaaggtgtttatcaacaaaggaagatgtaggctgggcgcagtggctcacacctataatccccacactttgggaggctgagatgggaggattacttgagcctaggagtttaagaccagtctgggcaacatagggtg

SEQ ID NO: 50118 - DNA, 336 bp, Homo sapiens
gtgcgtaagtacggcgcagtggctcacacctgtaatccccacactttgggaggctgagatgggaggattacttgagcctaggagtttaagaccagtctgggcacacattatggagatgtagagctctcctttgagaaagaagttggttggttcaaagaaagataaatgggacagtggcttggaagaggtaatggaggctaggaaggtgtttatcaacaaaggaagatgtaggctgggcgcagtggctcacacctataatccccacactttgggaggctgagatgggaggattacttgagcctaggagtttaagaccagtctgggcaacatagggtg

SEQ ID NO: 50119 - DNA, 310 bp, Homo sapiens
ggcaaatgtgaaagtgcttgagacacagagagcaggctgccactcatgttatcagggctgttagcttcagcagcaccactggggagccctgtgcactactgagcctgtcctaccactcaactcggccagatactaagtctatggtcaggacagcactttcagcaacatcagatggggtgtgggcctggacatggaaaagggagaagtcagaacaaagctgtgtctcagagaactagatttgtttttgtttttaaaaaggctaagtaggaagagttggagggacatgcagactcctttttggctagaactc

SEQ ID NO: 50120 - DNA, 477 bp, Homo sapiens
ctgatgattaatatatgcttctatgttaacagtcttggactttattaatggtgggtggaagttaacttaatgtatgtatgcaaactaaaaagtggcatccttttcattaatgacccaaccattattcaagagctatgtctagttagggacttcagacttttgaaagaaatgaagaaataatgccagatacatgggctcgcacttggaatcccagctacttgggggaccgaggtgggaggaccgcttgagcccaggagttcgagaccagcctgggcaacatagcgaaaccctgcctcagttttaaaaaagaaaaaaagaagtagtgaagaaattggaaaggattctgagaagaaatatgcaaggtggaaaagagcctagaaagaaaggtgacagatgctgggatttggtcgtcagaagagatatctaggaaatagcatggcagccctcaagtactagctccacttaaagaaaaaaaga

SEQ ID NO: 50121 - DNA, 521 bp, Homo sapiens
tgctggggactatttggtcacgtgaaactctgcctggttcattcgcacatccggaagccacttcacggggggccgtcgcaaccggaaccacacacttggcatcggcggttgagccaaatggggactcgcggtgcaagcaacgctccccacgtgttagcgtgcgtgagattcagttggcggaattttactaggtgcgtgttggtagagtggggctgaggttctctttctcctgtggatgtatacgaagtcaaaggtcctgcccagccgtgcggtcccctcagtcaactctgtttcggagacataacgatttggattgctaacaagtcaagaaatgttcaagcccttggatgtagggaaaagaaagagagatcagactgtcactgtgtctatgtcgaaagggaagacataagagactccattttggaaaagacctgtactttaaacaattgctttgctgagatgttgttcatttgtagctttgccccaggcactttgccccagccgctttgacccaacttgga

SEQ ID NO: 50122 - DNA, 804 bp, Homo sapiens
cctcattaaacaaaaccaatgcaaggaccgctcctcagtggagcagattgctttttgaggtagagaacattcaagcagctgctagattgatttttgtactgggttagttggcattttcactaggagtgaaaactgtgagactaaacagtttaatttacttagaatgtccctctttctctctgtgtgtgtgtgtgtgtgtgtgtgtgtgtgtgcccgtgcgtcgggggggggggcagtggtgattctcaactttctaggaatttattaagtaaagtgtttagaaatggaaggaaacaattagataattctcagtgctccaggattttaggctcctacatttgaaaatacttgctgtcattaattgtcttgagatttaggcttttccacttttcaggaaatctagtagttttttgggggttttgttttgttttccttggttctgccctatgccaacctgctagtttccctttttattttagcctgatgaatcttcccttttgctttcagtactaaccattgctggtagttcttaacaggtctagcttttaccaatattgtcaagttagcaatattagctcctggggccctagtactctgtacttccacccctctccccaccagtaccatgctgcctgttcacatgatggacaccagctctgatattcaccctaagatataatccataagatgacaaacttgtattcaacaccgactcctactctggctaaaatgctgaagagaatactaagaaataggggatatggtcctggtcatcaagttgcttagtctgataggaaaaaaaaa

SEQ ID NO: 50123 - DNA, 747 bp, Homo sapiens
ccataaacaaccctgcttcaaagagtagaaatatgtttcataaaagccattacccaaagacgtataaaaggtaaaacttaaataaaaatagattaccatttacaacttggaaaagaaacccagaattttctgtagccactggtcaatgtgttcttacagccgtaaggcagaataaaaatctggaaattatcagagaaggttttaagaacaaaataagcaagttggtctctttttaaatataaatctgacattaacagaagccttatgatattaagggaaaactggtatgggaactaaggaagggagtgaaaacatgctcctcacctatgaattagacatccaagaggacaatcaagttcgatctcatgccatattgggtcactgatggcccatcatgcatggactgtaggactcacaaataaatctggacacaaaagttcttatgtatgggccaattctgcttatatggacacagtgcaaacaggtacgacaagatattttcttcctcaaggatgatacctagcagataaagactgatttctaattcagtattgttacaactgcaggtgtgtgacccgtagcgagccactaaaccattctgaatctcacttccttcactggtaaaatagggaaaaatattagttgcctcatagagttgtagtaaagattaaatgaatgatctatgtaaaatggaagtgcttgataaactttagtctattattaacaccaaatactaaaaaaaaaaaa

SEQ ID NO: 50124 - DNA, 541 bp, Homo sapiens
atttatgaaacaggctgaggggaaataaagtaccctagtttgtagataataaaagctaagagtggtgcatccagggagagaggtggggtgccaggggttcttaggaaggtagtggtaccacctactgccagagtctcttttgaattggctttatccaggagtcccaaaagccctttaaactacttcatggtagcctttgacagagaactctttggcagtgacttggagagggtttatgaagacagtgctcaggctttggtcatgacacaggcagattggggatggagtggtacatgtttgattacagtgtgtgttgaggggcaagggggcaggtcttggtacaatgacaactagcacgagaccttgaactcaacatggattttaaaagtgtttgtttaatgcatgaataaaacaatgctcatgatattttgtggtctttagtgaccaatcatagtagacgtcttagaattaccaagccctaaggaatactaaaacccagtctaataaactcagtaaaaccaagagtggactctaatgtaaa

SEQ ID NO: 50125 - DNA, 721 bp, Homo sapiens
  misc_feature (1)..(1): n is a, c, g, or t
nttcggcacagagctcaatgtcaggtgggctttctccttgtggtgggtgccacagctccaggctgtcatattcatagcttctagtccagtgaaaagaaatcactaagtgtgctgatgagggtcctagaactaattctcattggcttaactttgatcatgtggccatggcactgcataacccagttggattatgcctgaattatgtgctcacttttggagctagggagagagtcagctccatatagactacatagactgggttcacatgggtcacatgggctaatgaagaagccaggggtttgagtccaggactgtctgattgccacttgttcttaggccacttcttctacctgccttcagtgttagaaaacaaatggcataccgatccacagaatatttgaaaaatagagagcttgctttggcagcatgtatgctaaaatcggaaggatacagagaagattagcatggcccctgtgcaaggatgacatgcaaatttgtgaagtgttccatatttttgaatagataatgaatggatgctgggctaaatacctaggtgatgggatgatctgtgcagcaaatcaccagggcacacgtttacctatataataaacctgcatatcctgcacaggtacccctgaacttaaaataaaagttgaagaaaaactaaaagaaggatggaggagggactttatcattcaaaaatatcaatgtcatcagagaa

SEQ ID NO: 50126 - DNA, 1899 bp, Homo sapiens
aggctggtactggcccgagtggttatgatgactggcctggggcgggacgtgggcgcgggggcgcggcgtgcggcacgctgcagggctgaagcggcggcggcggtggggactgcacgtagcccggcgctcggcatggctctcctggtgctcggtctggtgagctgtaccttctttctggcagtgaatggtctgtattcctctagtgatgatgtgatcgaattaactccatcaaatttcaaccgagaagttattcagagtgatagtttgtggcttgtagaattctatgctccatggtgtggtcactgtcaaagattaacaccagaatggaagaaagcagcaactgcattaaaagatgttgtcaaagttggtgcagttgatgcagataagcatcattccctaggaggtcagtatggtgttcagggatttcctaccattaagatttttggatccaacaaaaacagaccagaagattaccaaggtggcagaactggtgaagccattgtagatgctgcgctgagtgctctgcgccagctcgtgaaggatcgcctcgggggacgaagcggaggatacagttctggaaaacaaggcagaagtgatagttcaagtaagaaggatgtgattgagctgacagacgacagctttgataagaatgttctggacagtgaagatgtttggatggttgagttctatgctccttggtgtggacactgcaaaaacctagagccagagtgggctgccgcagcttcagaagtaaaagagcagacgaaaggaagagtgaaactggcagctgtggatgctacagtcaatcaggttctggcctcccgatacgggattagaggatttcctacaatcaagatatttcagaaaggcgagtctcctgtggattatgacggtgggcggacaagatccgacatcgtgtcccgggcccttgatttgttttctgataacgccccacctcctgagctgcttgagattatcaacgaggacattgccaagaggacgtgtgaggagcacagctctgtgttgtggctgtgctgccccatatccttgatactggagctgcaggcagaaattcttatctggaagttcttctgaagttggcagacaaatacaaaaagaaaatgtgggggtggctgtggacagaagctggagcccagtctgaacttgagaccgcgttggggattggagggtttgggtaccccgccatggccgccatcaatgcacgcaagatgaaatttgctctgctaaaaggctccttcagtgagcaaggcatcaacgagtttctcagggagctctcttttgggcgtggctccacggcacctgtaggaggcggggctttccctaccatcgttgagagagagccttgggacggcagggatggcgagcttcccgtggaggatgacattgacctcagtgatgtggagcttgatgacttagggaaagatgagttgtgagagccacaacagaggcttcagaccattttcttttcttgggagccagtggatttttccagcagtgaagggacattctctactttcttttcttgggagccagtggatttttccagcagtgaagggacattctctacactcagatgactctaccagtggccttttaaccaagaagtagtacttgattggtcatttgaaaacactgcaacagtgaacttttgcatctcaagaaaacattgaaaaattctatgaattgttgtagccggtgaattgagtcgtattctgtcacataatattttgaagaaaacttggctgtcgaaacatttttctctctgactgctgcttgaatgttcttggaggctgtttcttatgtatgggttttttttaatgtgatcccttcatttgaatattaatggctttttccattaaagaataaattggtttggac

SEQ ID NO: 50127 - DNA, 2329 bp, Homo sapiens
tgctgaggactgtggcaagaccttccggtgcacatgcggctgtccctacgccagtagaacagcactgcagtctcacatctaccgaactgggcacgagatacctgcagaacacagggacccacctagtaagaaaaggaaaatggaaaactgtgcacaaaaccagaagttatccaacaagaccattgaatcattgaacaaccaaccaatccctagaccagacactcaagaactagaagcttcagaaataaagctagaaccatcttttgaagactcttgtggctctaacactgacaagcagactcttacaacaccaccgagatatcctcagaagttgcttttaccaaagcccaaagtggctttggttaaactacccgtgatgcagttttctgtcatgcctgtctttgtgcctacagccgactcctcagcccagcctgtggtgttaggtgttgatcagggctctgccacaggggctgtgcacttaatgtccttgtcagtaggaaccctgatcctcggcctagattcagaggcttgctctcttaaggagagcctacctcttttcaaaattagggctgaagcggcggcggcggtggggactgcacgtagcccggcgctcggcatggctctcctggtgctcggtctggtgagctgtaccttctttctggcagtgaatggtctgtattcctctagtgatgatgtgatcgaattaactccatcaaatttcaaccgagaagttattcagagtgatagtttgtggcttgtagaattctatgctccatggtgtggtcactgtcaaagattaacaccagaatggaagaaagcagcaactgcattaaaagatgttgtcaaagttggtgcagttgatgcagataagcatcattccctaggaggtcagtatggtgttcagggatttcctaccattaagatttttggatccaacaaaaacagaccagaagattaccaaggtggcagaactggtgaagccattgtagatgctgcgctgagtgctctgcgccagctcgtgaaggatcgcctcgggggacgaagcggaggatacagttctggaaaacaaggcagaagtgatagttcaagtaagaaggatgtgattgagctgacagacgacagctttgataagaatgttctggacagtgaagatgtttggatggttgagttctatgctccttggtgtggacactgcaaaaacctagagccagagtgggctgccgcagcttcagaagtaaaagagcagacgaaaggaagagtgaaactggcagctgtggatgctacagtcaatcaggttctggcctcccgatacgggattagaggatttcctacaatcaagatatttcagaaaggcgagtctcctgtggattatgacggtgggcggacaagatccgacatcgtgtcccgggcccttgatttgttttctgataacgccccacctcctgagctgcttgagattatcaacgaggacattgccaagaggacgtgtgaggagcacagctctgtgttgtggctgtgctgccccatatccttgatactggagctgcaggcagaaattcttatctggaagttcttctgaagttggcagacaaatacaaaaagaaaatgtgggggtggctgtggacagaagctggagcccagtctgaacttgagaccgcgttggggattggagggtttgggtaccccgccatggccgccatcaatgcacgcaagatgaaatttgctctgctaaaaggctccttcagtgagcaaggcatcaacgagtttctcagggagctctcttttgggcgtggctccacggcacctgtaggaggcggggctttccctaccatcgttgagagagagccttgggacggcagggatggcgagcttcccgtggaggatgacattgacctcagtgatgtggagcttgatgacttagggaaagatgagttgtgagagccacaacagaggcttcagaccattttcttttcttgggagccagtggatttttccagcagtgaagggacattctctacactcagatgactctaccagtggccttttaaccaagaagtagtacttgattggtcatttgaaaacactgcaacagtgaacttttgcatctcaagaaaacattgaaaaattctatgaattgttgtagccggtgaattgagtcgtattctgtcacataatattttgaagaaaacttggctgtcgaaacatttttctctctgactgctgcttgaatgttcttggaggctgtttcttatgtatgggttttttttaatgtgatcccttcatttgaatattaatggctttttccattaaagaataaattggtttggac

SEQ ID NO: 50128 - DNA, 790 bp, Homo sapiens
agcggcttctggcccgcccccgcgcggccgcccctcggaccaccggactggcctggggcgggacgtgggcgcgggggcgcggcgtgcggcacgctgcagggctgaagcggcggcggcggtggggactgcacgtagcccggcgctcggcatggctctcctggtgctcggtctggtgagctgtaccttctttctggcagtgaatggtctgtattcctctagtgatgatgtgatcgaattaactccatcaaatttcaaccgagaagttattcagagtgatagtttgtggcttgtagaattctatgctccatggtgtggtcactgtcaaagattaacaccagaatggaagaaagcagcaactgcattaaaagatgttgtcaaagttggtgcagttgatgcagataagcatcattccctaggaggtcagtatggtgttcagggatttcctaccattaagatttttggatccaacaaaaacagaccagaagattaccaaggtggcagaactggtgaagccattgtagatgctgcgctgagtgctctgcgccagctcgtgaaggatcgcctcgggggacgaagcggaggatacagttctggaaaacaaggcagaagtgatagttcaagtaagaaggatgtgattgagctgacagacgacagctttgataagaatgttctggacagtgaagatgtttggatggttgagttctatgctccttggtgtggacactgcacacaggaacagtgaaacttgcagcctgtgcgacgtttcagtctcggtctctgggttcccgcc

SEQ ID NO: 50129 - DNA, 1604 bp, Homo sapiens
aattgagaatcaaaggctttaatggttgctttgtgttgtcttcccccaaaaggtgtggtcactgtcaaagattaacaccagaatggaagaaagcagcaactgcattaaaagatgttgtcaaagttggtgcagttgatgcagataagcatcattccctaggaggtcagtatggtgttcagggatttcctaccattaagatttttggatccaacaaaaacagaccagaagattaccaaggtggcagaactggtgaagccattgtagatgctgcgctgagtgctctgcgccagctcgtgaaggatcgcctcgggggacgaagcggaggatacagttctggaaaacaaggcagaagtgatagttcaagtaagaaggatgtgattgagctgacagacgacagctttgataagaatgttctggacagtgaagatgtttggatggttgagttctatgctccttggtgtggacactgcaaaaacctagagccagagtgggctgccgcagcttcagaagtaaaagagcagacgaaaggaagagtgaaactggcagctgtggatgctacagtcaatcaggttctggcctcccgatacgggattagaggatttcctacaatcaagatatttcagaaaggcgagtctcctgtggattatgacggtgggcggacaagatccgacatcgtgtcccgggcccttgatttgttttctgataacgccccacctcctgagctgcttgagattatcaacgaggacattgccaagaggacgtgtgaggagcacagctctgtgttgtggctgtgctgccccatatccttgatactggagctgcaggcagaaattcttatctggaagttcttctgaagttggcagacaaatacaaaaagaaaatgtgggggtggctgtggacagaagctggagcccagtctgaacttgagaccgcgttggggattggagggtttgggtaccccgccatggccgccatcaatgcacgcaagatgaaatttgctctgctaaaaggctccttcagtgagcaaggcatcaacgagtttctcagggagctctcttttgggcgtggctccacggcacctgtaggaggcggggctttccctaccatcgttgagagagagccttgggacggcagggatggcgagcttcccgtggaggatgacattgacctcagtgatgtggagcttgatgacttagggaaagatgagttgtgagagccacaacagaggcttcagaccattttcttttcttgggagccagtggatttttccagcagtgaagggacattctctacactcagatgactctaccagtggccttttaaccaagaagtagtacttgattggtcatttgaaaacactgcaacagtgaacttttgcatctcaagaaaacattgaaaaattctatgaattgttgtagccggtgaattgagtcgtattctgtcacataatattttgaagaaaacttggctgtcgaaacatttttctctctgactgctgcttgaatgttcttggaggctgtttcttatgtatgggttttttttaatgtgatcccttcatttgaatattaatggctttttccattaaagaataaattggtttggac

SEQ ID NO: 50130 - DNA, 1915 bp, Homo sapiens
agcggcttctggcccgcccccgcgcggccgcccctcggaccaccggactggcctggggcgggacgtgggcgcgggggcgcggcgtgcggcacgctgcagggctgaagcggcggcggcggtggggactgcacgtagcccggcgctcggcatggctctcctggtgctcggtctggtgagctgtaccttctttctggcagtgaatggtctgtattcctctagtgatgatgtgatcgaattaactccatcaaatttcaaccgagaagttattcagagtgatagtttgtggcttgtagaattctatgctccatggtgtggtcactgtcaaagattaacaccagaatggaagaaagcagcaactgcattaaaagatgttgtcaaagttggtgcagttgatgcagataagcatcattccctaggaggtcagtatggtgttcagggatttcctaccattaagatttttggatccaacaaaaacagaccagaagattaccaaggtggcagaactggtgaagccattgtagatgctgcgctgagtgctctgcgccagctcgtgaaggatcgcctcgggggacgaagcggaggatacagttctggaaaacaaggcagaagtgatagttcaagtaagaaggatgtgattgagctgacagacgacagctttgataagaatgttctggacagtgaagatgtttggatggttgagttctatgctccttggtgtggacactgcaaaaacctagagccagagtgggctgccgcagcttcagaagtaaaagagcagacgaaaggaagagtgaaactggcagctgtggatgctacagtcaatcaggttctggcctcccgatacgggattagaggatttcctacaatcaagatatttcagaaaggcgagtctcctgtggattatgacggtgggcggacaagatccgacatcgtgtcccgggcccttgatttgttttctgataacgccccacctcctgagctgcttgagattatcaacgaggacattgccaagaggacgtgtgaggagcacagctctgtgttgtggctgtgctgccccatatccttgatactggagctgcaggcagaaattcttatctggaagttcttctgaagttggcagacaaatacaaaaagaaaatgtgggggtggctgtggacagaagctggagcccagtctgaacttgagaccgcgttggggattggagggtttgggtaccccgccatggccgccatcaatgcacgcaagatgaaatttgctctgctaaaaggctccttcagtgagcaaggcatcaacgagtttctcagggagctctcttttgggcgtggctccacggcacctgtaggaggcggggctttccctaccatcgttgagagagagccttgggacggcagggatggcgagcttcccgtggaggatgacattgacctcagtgatgtggagcttgatgacttagggaaagatgagttgtgagagccacaacagaggcttcagaccattttcttttcttgggagccagtggatttttccagcagtgaagggacattctctactttcttttcttgggagccagtggatttttccagcagtgaagggacattctctacactcagatgactctaccagtggccttttaaccaagaagtagtacttgattggtcatttgaaaacactgcaacagtgaacttttgcatctcaagaaaacattgaaaaattctatgaattgttgtagccggtgaattgagtcgtattctgtcacataatattttgaagaaaacttggctgtcgaaacatttttctctctgactgctgcttgaatgttcttggaggctgtttcttatgtatgggttttttttaatgtgatcccttcatttgaatattaatggctttttccattaaagaataaattggtttggac

SEQ ID NO: 50131 - DNA, 1861 bp, Homo sapiens
agcggcttctggcccgcccccgcgcggccgcccctcggaccaccggactggcctggggcgggacgtgggcgcgggggcgcggcgtgcggcacgctgcagggctgaagcggcggcggcggtggggactgcacgtagcccggcgctcggcatggctctcctggtgctcggtctggtgagctgtaccttctttctggcagtgaatggtctgtattcctctagtgatgatgtgatcgaattaactccatcaaatttcaaccgagaagttattcagagtgatagtttgtggcttgtagaattctatgctccatggtgtggtcactgtcaaagattaacaccagaatggaagaaagcagcaactgcattaaaagatgttgtcaaagttggtgcagttgatgcagataagcatcattccctaggaggtcagtatggtgttcagggatttcctaccattaagatttttggatccaacaaaaacagaccagaagattaccaaggtggcagaactggtgaagccattgtagatgctgcgctgagtgctctgcgccagctcgtgaaggatcgcctcgggggacgaagcggaggatacagttctggaaaacaaggcagaagtgatagttcaagtaagaaggatgtgattgagctgacagacgacagctttgataagaatgttctggacagtgaagatgtttggatggttgagttctatgctccttggtgtggacactgcaaaaacctagagccagagtgggctgccgcagcttcagaagtaaaagagcagacgaaaggaagagtgaaactggcagctgtggatgctacagtcaatcaggttctggcctcccgatacgggattagaggatttcctacaatcaagatatttcagaaaggcgagtctcctgtggattatgacggtgggcggacaagatccgacatcgtgtcccgggcccttgatttgttttctgataacgccccacctcctgagctgcttgagattatcaacgaggacattgccaagaggacgtgtgaggagcacagctctgtgttgtggctgtgctgccccatatccttgatactggagctgcaggcagaaattcttatctggaagttcttctgaagttggcagacaaatacaaaaagaaaatgtgggggtggctgtggacagaagctggagcccagtctgaacttgagaccgcgttggggattggagggtttgggtaccccgccatggccgccatcaatgcacgcaagatgaaatttgctctgctaaaaggctccttcagtgagcaaggcatcaacgagtttctcagggagctctcttttgggcgtggctccacggcacctgtaggaggcggggctttccctaccatcgttgagagagagccttgggacggcagggatggcgagcttcccgtggaggatgacattgacctcagtgatgtggagcttgatgacttagggaaagatgagttgtgagagccacaacagaggcttcagaccattttcttttcttgggagccagtggatttttccagcagtgaagggacattctctacactcagatgactctaccagtggccttttaaccaagaagtagtacttgattggtcatttgaaaacactgcaacagtgaacttttgcatctcaagaaaacattgaaaaattctatgaattgttgtagccggtgaattgagtcgtattctgtcacataatattttgaagaaaacttggctgtcgaaacatttttctctctgactgctgcttgaatgttcttggaggctgtttcttatgtatgggttttttttaatgtgatcccttcatttgaatattaatggctttttccattaaagaataaattggtttggac

SEQ ID NO: 50132 - DNA, 1792 bp, Homo sapiens
aggctggtactggcccgagtggttatgatgactggcctggggcgggacgtgggcgcgggggcgcggcgtgcggcacgctgcagggctgaagcggcggcggcggtggggactgcacgtagcccggcgctcggcatggctctcctggtgctcggtctggtgagctgtaccttctttctggcagtgaatggtctgtattcctctagtgatgatgtgatcgaattaactccatcaaatttcaaccgagaagttattcagagtgatagtttgtggcttgtagaattctatgctccatggtgtggtcactgtcaaagattaacaccagaatggaagaaagcagcaactgcattaaaagatgttgtcaaagttggtgcagttgatgcagataagcatcattccctaggaggtcagtatggtgttcagggatttcctaccattaagatttttggatccaacaaaaacagaccagaagattaccaaggtggcagaactggtgaagccattgtagatgctgcgctgagtgctctgcgccagctcgtgaagtgatagttcaagtaagaaggatgtgattgagctgacagacgacagctttgataagaatgttctggacagtgaagatgtttggatggttgagttctatgctccttggtgtggacactgcaaaaacctagagccagagtgggctgccgcagcttcagaagtaaaagagcagacgaaaggaagagtgaaactggcagctgtggatgctacagtcaatcaggttctggcctcccgatacgggattagaggatttcctacaatcaagatatttcagaaaggcgagtctcctgtggattatgacggtgggcggacaagatccgacatcgtgtcccgggcccttgatttgttttctgataacgccccacctcctgagctgcttgagattatcaacgaggacattgccaagaggacgtgtgaggagcacagctctgtgttgtggctgtgctgccccatatccttgatactggagctgcaggcagaaattcttatctggaagttcttctgaagttggcagacaaatacaaaaagaaaatgtgggggtggctgtggacagaagctggagcccagtctgaacttgagaccgcgttggggattggagggtttgggtaccccgccatggccgccatcaatgcacgcaagatgaaatttgctctgctaaaaggctccttcagtgagcaaggcatcaacgagtttctcagggagctctcttttgggcgtggctccacggcacctgtaggaggcggggctttccctaccatcgttgagagagagccttgggacggcagggatggcgagcttcccgtggaggatgacattgacctcagtgatgtggagcttgatgacttagggaaagatgagttgtgagagccacaacagaggcttcagaccattttcttttcttgggagccagtggatttttccagcagtgaagggacattctctacactcagatgactctaccagtggccttttaaccaagaagtagtacttgattggtcatttgaaaacactgcaacagtgaacttttgcatctcaagaaaacattgaaaaattctatgaattgttgtagccggtgaattgagtcgtattctgtcacataatattttgaagaaaacttggctgtcgaaacatttttctctctgactgctgcttgaatgttcttggaggctgtttcttatgtatgggttttttttaatgtgatcccttcatttgaatattaatggctttttccattaaagaataaattggtttggac

SEQ ID NO: 50133 - DNA, 291 bp, Homo sapiens
ttccagatgtacaaaaacatataatgattattatacccactaacaccacgtgcttactacccagtctaagaaatggagcagggccgggcgcggtggctcacctgtaatcccaacactttgggaggccgaggtgggtggatcacctgaggtcaggagtttgagatcagcctggccaacatggtgaaaccccgtctctgctaaaaatacaaaaaatgagctgagcgtggtgactcaaacctgtaatcccagcttcttgggagttgaggcataacaatcgctcaaaccctggag

SEQ ID NO: 50134 - DNA, 1986 bp, Homo sapiens
tattttcttttagagacagagtctcactatgttgcccaggctggtctcaaactcctgggctcaagcgatcctcccacctaggactcctaaagttacaggtgtgagccactgtgcttggcctagaactctgtttttggcatttctttctaaatgagtacattggaagaacatttaggtttccaggctcctcataatttctgaatgggacccgctctgctctgcctctgaaaggaggagaaaaggctgagggttcaaagacagaaaagtcaatgtagcagaaatttgatttccttcagatggacatagtctgaaagaaatctatccagctgttctctatggtgcttatatgatgggtgacagctgtccccatctacctgtccctggcactgtgccttcacactggtcactgtgaaaagcagatcacactggactcagaggccagaatccaggacaagatcccccttctcatcttgagcccatcacatctttgtatagctgttaatgtagcatttacttctctatgggaaactcttgggtttttaacccaagaagaaattgtaaagcatttaaactagtcagaaaataagattctgatggtagcgatcaaataaaggaaaatttcacttcctctcagttgatattgattgatagcaaggatcaactatgcccacctcttcctaagtttctaaaggctaccataatatttgtaaacaacaaatttatctaatattttttacaacttgctaatcaaggaggattcatattaaaacagacaatcagtttctaaaatgttatccctgaaagggaatggaatagagtatttttagctgtaagaacctaccagtctgttttttccctttgaaaaaaactaatgtttgagatttgtgtcttttcatctgaagcagttactccattaatagtaaagatgcctcgggaaagtcagtgaaccagaatagtgctcttgcaccactgagggtgctagactggctttgtgcatcttatttcctaagaatatcagtttttattatgaccttaattataaatacctatatataggagtaggattttctctcacccaaccctactttaatcattatcacttaagtgtaaacctccacctccccctctttccctttaccgaaaaaaaatgcactttaattcctaaggagagtggctgttcctggccctgaaaccagattacttcaggaggagagttaaggagggagagctcttaccagaccctgtgaaatgaaccaaatttcttaatgtaaacacacaagtaataacatccacttttaagtggcccccactccatgccaaagggaaaaagaaccgccaaattgaaaaagggttctaaatacctgtcctgattttggaagtttcactggggaaaaactacctaagattattttcacagctaccaatttgtcagaaactttggtggtgttttgtgggaggctgagattttttaaattaaaaatcaagtgaaaacacaaagactctaagacacgatcctgatttgtgtcatttctaagtatcagatttgttctcccttcatttgacaggtgttctcagtctctcctcctgtaagattctgtccttcccctgatgacaagccaatagttcttggtggggttgcatgtctcctagagccccaggacccctgtcgtgtcggggaaggggggagggcaggagggtgggcagagactcgggttgggggagggagttcaaagaaagagtgaaaatatgggtttatataaacatatttaaagcagtttagcaaaagctttctcgttgaacagctttaagaacaatgtgaatgaaatcttagcaacttggttagtaatctgaaaagtctattaatgtatacttgaaattctgtttgtataaaaatgcattttcccctttattttaacactgtgtaaaagaacattatgcatgtgagtggtttgagaattaaatggtttaatactcaaaaaaaaaaat

SEQ ID NO: 50135 - DNA, 833 bp, Homo sapiens
ccatcagggataggacagaattcttacaggaggagagagctgagaacacctgtcaaatgaagggaggacaatgctgatacttagaaatgacactaatcaggatcgtgtcgtagagtaagcacacaagtaataacatccacttttaagtggcccccactccatgccaaagggaaaaagaaccgccaaattgaaaaagggttctaaatacctgtcctgattttggaagtttcactggggaaaaactacctaagattattttcacagctaccaatttgtcagaaactttggtggtgttttgtgggaggctgagattttttaaattaaaaatcaagtgaaaacacaaagactctaagacacgatcctgatttgtgtcatttctaagtatcagatttgttctcccttcatttgacaggtgttctcagtctctcctcctgtaagattctgtccttcccctgatgacaagccaatagttcttggtggggttgcatgtctcctagagccccaggacccctgtcgtgtcggggaaggggggagggcaggagggtgggcagagactcgggttgggggagggagttcaaagaaagagtgaaaatatgggtttatataaacatatttaaagcagtttagcaaaagctttctcgttgaacagctttaagaacaatgtgaatgaaatcttagcaacttggttagtaatctgaaaagtctattaatgtatacttgaaattctgtttgtataaaaatgcattttcccctttattttaacactgtgtaaaagaacattatgcatgtgagtggtttgagaattaaatggtttaatactcaaaaaaaaaaat

SEQ ID NO: 50136 - DNA, 198 bp, Homo sapiens
ctttctgtagatcaattctgcctttaatgtggctgaactattaatagttgaaacatccatttgactcttatatttttcttttaatttttagagaaaattctaagaacatttcttgaagttgcctggcctttggtgaggggattcttaacctgtacttcaaggggtctgtggtgagagaaaccaatgtccaagtttaga

SEQ ID NO: 50137 - DNA, 349 bp, Homo sapiens
tttcttttttttcattactttactggtccataatatccaagcctgggaattgtgtttattatactaatcagtttcagttggctgcctccacttccgccccagctcaactcttctcaacactattttttttttttttggagacagtcttgctctgttgcccaggctgaagtgtggtggcataatcacagctcactgcagcctcaaacttcctgggttcaagttatcttcctacctcaagcttctgagtagcaggcactacaggtgtgcaccagcatgtccaacctaatttttgtattttttgtatagacagggtttcaccatgttgcccaagctggtcttgaacgccagg

SEQ ID NO: 50138 - DNA, 152 bp, Homo sapiens
tcagattaggtgcatgcttcctacttattcccaccaggtacatactaaatcctggacagttaacataagtaccagctactctctctctctctctctctctgtgtgtgtgtgtgtgtgtgtgtgtgtgtgtgtgtgtgtggtgtccttgaccc

SEQ ID NO: 50139 - DNA, 448 bp, Homo sapiens
ctaggagagaagggagttggcaggggctctctccgtgtagaagagtgtgcatagaggggtgtgtggaggggagctgctttgggttgggggccagatatagaagggaaacaccgtaacttattaaggaaagttagtcaaaatggttttatctcccactttgcaactttttttaatttttgtttttttaggcagggtcttactttgtcacccaggctggagtgcaatggcgccatcatggctcactgcagcctccacctcctgaactcaaacaatcctcccacctcagcctcccaagtagctgggactacaggtgcacaccaccacacctggctaatttctaaattttacatagcaacttttaagaactattagatacttcttgttgagttttgctgtagattcaaagaaaattgataattatctataaaggttagtagcgactccttcc

SEQ ID NO: 50140 - DNA, 260 bp, Homo sapiens
caaccatatcccttcttccctaagggacaaagttcgtaggggaagcacaagtgctagagaggaaaagccatgggtattttagatatatttagtgcttttatcaaataagtagggcatggtttttctcccaatatttcctgagttaaattatagatgttttgagccacatagagcgatgttagtggtagagctaaatcaggctttggcttctaatccagccctccaactaggcaacaggatctgcctagatcctaattaag

SEQ ID NO: 50141 - DNA, 9390 bp, Homo sapiens
ggcaatttcttttcctttctaactgtggcccgcgttgtgctgttgctgggcaggcgttgggcgccggcggtcttcgagcgtgggggcccgctggctttcccttctcagaaactgcgccgggggcgctcgcttgccccggattcggacgcggcgctccccgggctcgtctgaagtgcagatcgccgcagaggccccagtgcccggatgtccatcaggattagcgcgagccaatacgggccgagcccggggctgcgccgaggacgcccggggctcgagagcaggtagtcccgtaacatcggggcgccgcgccgggacgcgtccccgcccggctccgccaaatggtgagcgcggcgctggcagcagggcccgcggggtgaaggcgctcatggacggaagacccctggctctataagctgaattatggcagcccagtcaagtttgtacaatgacgacagaaacctgcttcgaattagagagaaggaaagacgcaaccaggaagcccaccaagagaaagaggcatttcctgaaaagattcccctttttggagagccctacaagacagcaaaaggtgatgagctgtctagtcgaatacagaacatgttgggaaactacgaagaagtgaaggagttccttagtactaagtctcacactcatcgcctggatgcttctgaaaataggttgggaaagccgaaatatcctttaattcctgacaaagggagcagcattccatccagctccttccacactagtgtccaccaccagtccattcacactcctgcgtctggaccactttctgttggcaacattagccacaatccaaagatggcgcagccaagaactgaaccaatgccaagtctccatgccaaaagctgcggcccaccggacagccagcacctgacccaggatcgccttggtcaggaggggttcggctctagtcatcacaagaaaggtgaccgaagagctgacggagaccactgtgcttcggtgacagattcggctccagagagggagctttctcccttaatctctttgccttccccagttccccctttgtcacctatacattccaaccagcaaactcttccccggacgcaaggaagcagcaaggttcatggcagcagcaataacagtaaaggctattgcccagccaaatctcccaaggacctagcagtgaaagtccatgataaagagacccctcaagacagtttggtggcccctgcccagccgccttctcagacatttccacctccctccctcccctcaaaaagtgttgcaatgcagcagaagcccacggcttatgtccggcccatggatggtcaagatcaggcccctagtgaatcccctgaactgaaaccactgccggaggactatcgacagcagacctttgaaaaaacagacttgaaagtgcctgccaaagccaagctcaccaaactgaagatgccttctcagtcagttgagcagacctactccaatgaagtccattgtgttgaagagattctgaaggaaatgacccattcatggccgcctcctttgacagcaatacatacgcctagtacagctgagccatccaagtttcctttccctacaaaggactctcagcatgtcagttctgtaacccaaaaccaaaaacaatatgatacatcttcaaaaactcactcaaattctcagcaaggaacgtcatccatgctcgaagacgaccttcagctcagtgacagtgaggacagtgacagtgaacaaaccccagagaagcctccctcctcatctgcacctccaagtgctccacagtcccttccagaaccagtggcatcagcacattccagcagtgcagagtcagaaagcaccagtgactcagacagttcctcagactcagagagcgagagcagttcaagtgacagcgaagaaaatgagcccctagaaaccccagctccggagcctgagcctccaacaacaaacaaatggcagctggacaactggctgaccaaagtcagccagccagctgcgccaccagagggccccaggagcacagagcccccacggcggcacccagagagtaagggcagcagcgacagtgccacgagtcaggagcattctgaatccaaagatcctccccctaaaagctccagcaaagccccccgggccccacccgaagccccccaccccggaaagaggagctgtcagaagtctccggcacagcaggagcccccacaaaggcaaaccgttggaaccaaacaacccaaaaaacctgtcaaggcctctgcccgggcaggttcacggaccagcctgcagggggaaagggagccagggcttcttccctatggctcccgagaccagacttccaaagacaagcccaaggtgaagacgaaaggacggccccgggccgcagcaagcaacgaacccaagccagcagtgcccccctccagtgagaagaagaagcacaagagctccctccctgccccctctaaggctctctcaggcccagaacccgcgaaggacaatgtggaggacaggacccctgagcactttgctcttgttcccctgactgagagccagggcccaccccacagtggcagcggcagcaggactagtggctgccgccaagccgtggtggtccaggaggacagccgcaaagacagactcccattgcctttgagagacaccaagctgctctcaccgctcagggacactcctcccccacaaagcttgatggtgaagatcaccctagacctgctctctcggataccccagcctcccgggaaggggagccgccagaggaaagcagaagataaacagccgcccgcagggaagaagcacagctctgagaagaggagctcagacagctcaagcaagttggccaaaaagagaaagggtgaagcagaaagagactgtgataacaagaaaatcagactggagaaggaaatcaaatcacagtcatcttcatcttcatcctcccacaaagaatcttctaaaacaaagccctccaggccctcctcacagtcctcaaagaaggaaatgctccccccgccacccgtgtcctcgtcctcccagaagccagccaagcctgcacttaagaggtcaaggcgggaagcagacacctgtggccaggaccctcccaaaagtgccagcagtaccaagagcaaccacaaagactcttccattcccaagcagagaagagtagaggggaagggctccagaagctcctcggagcacaagggttcttccggagatactgcaaatccttttccagtgccttctttgccaaatggtaactctaaaccagggaagcctcaagtgaagtttgacaaacaacaagcagaccttcacatgagggaggcaaaaaagatgaagcagaaagcagagttaatgacggacagggttggaaaggcttttaagtacctggaagccgtcttgtccttcattgagtgcggaattgccacagagtctgaaagccagtcatccaagtcagcttactctgtctactcagaaactgtagatctcattaaattcataatgtcattaaaatccttctcagatgccacagcgccaacacaagagaaaatatttgctgttttatgcatgcgttgccagtccattttgaacatggcgatgtttcgttgtaaaaaagacatagcaataaagtattctcgtactcttaataaacacttcgagagttcttccaaagtcgcccaggcaccttctccatgcattgcaagcacaggcacaccatcccctctttccccaatgccttctcctgccagctccgtagggtcccagtcaagtgctggcagtgtggggagcagtggggtggctgccactatcagcaccccagtcaccatccagaatatgacatcttcctatgtcaccatcacatcccatgttcttaccgcctttgacctttgggaacaggccgaggccctcacgaggaagaataaagaattctttgctcggctcagcacaaatgtgtgcaccttggccctcaacagcagtttggtggacctggtgcactatacacgacagggttttcagcagctacaagaattaaccaaaacaccttaatggagccccaggttgattcaatgccttgggaactatttttgcacattggaagcctcaaaaacagtccagacgtttgtttcatcaggacaccaaactctaaaaaagaagcaccacgagatggccaggacatttgtccacttaaactctcaacaacagtgtgatcattggttggacactgtggttatgcagaagcagagatgaggaggctggccccagagatgatcttgcccttcctaactaaaggacagaagtgcaatttagcttaaatgggtgtatgaatggtctagaaacatttctattttttttttaaaccagcaggatacaagttgcaaatgaaatgaggagaaacagtttcaactctgaaagtgaatttcacgtcatctcagtagccacgctagtccattcccagaaggaaatttttttttttaacaatgacttttggtaaagggttttgtggatgattttttttcttttgagttttgggagaaatatttgtttaataacttctaatggccatctgtaaaccataagtaatgaaggactccactgtgccccactttctgccaatgaacagtggcttgataataccaagtattgttgtaatttataaaattgaaggcaacccccgctcctgccgcccccaatctccccattgcctagagcgctgcacattgaccccagctctgacttctcattactgtgctgaaagtcagcccacgtcggagcggtgaggaggagccacagcacatggggtgccacctcgaggtctgcacaggaggacttggcgctgccatttcctacccctgccatttcccacccctgcttcagcgaaagggactctctaacagggcagtcactgttgactctattctgaatttcctcccttggggaagaagggaaccaacatttatacctgaccagatggctaaagtgcttttaaagttttgtttaagtagagctggaatttgaggtgctgatctgtggtctacagttatgtggtaactcatgttgtccagccaactcagagtttcgtcagtgaacaagaaacatgaaatctgcttcttagagaggctatatttttctgctacaaatattttatatttatagcaaaactagactttcagagtccttgattgtctaggggaagttaactccctgagaggatgtagagatttggggtggttgattagacttttgaaaaactcatcaccacatgccttcactccagagtgttctcagctagatttgatttggttgaggaggaactgtggccctccgtaagttattgccatagtgtatgcattaaaccaagtccattttgaatgacctaaaatgaagtaacacaatcagaaatcccatgtgcccataagcacagatttttctttttcattgaaactttaaaggttattattggaaacattactttgagtgcagtgtttttaaaagccaattcttttttatcccttttagaagtagaatttgcacacttactacaattgaggagtgtcatctctataactttttctccgcctttgtcccattctgcccctggacatgtttcctaccaagcatgtttcacattttcctattagtggaggagggagaaccatatttatttataatgaagacatctaagatccctatgatgaatgcaggaactctcttggtagtttgtaaatacacaaagggatgtgtcgagggatgggagcgatgcttatctctcacagtgtgagtggtctgtgtgaggctgttccttcagttcttctccagactgttctttggttgtcacttaagtcagaggtctggtccctcatgtttaggtgaaagccagagaatgacagctgtagtcatatctgagcataagaccttgatgtgtgattcctgatgaccggtttcatttattcatgtaataaagcaaaggccctggtcctttttaaactactagttttaaaaacctgtgttaaatgaacagtaattgcctggtaggtttggtgtgtgtgtagcattgtgtgtccatctgttatatgtaaaggacaaggcaccagaatcaggctttatttcgatattgaagatgttatttaacatctttcttttttccttactcccttagccatcccctccccttttgtcctatcattccctagaacaagccacctgtcaattgtgaagggttgtgttctttatggcaggttctatgcagattgtgccagagcatgtgcgtgttctgttggcaagccacagtgctcccttgactgaagacatttccaggtagatttctcagccagctctaaaacagattgctttttcagtggccttactctttgtgggtttttttttttctctgaacttgatataaagattttatttgtcccttgaaaaagtaacaaatgtgcatagatcaatttgtactactttggtcattggatatttctgatccttattgcattgtacctaaaggagagtaactaatggtaacctttttaatagagtatgtgaaaggtagtggctgatgaatccttaacgttcatagggtctttttgctgttacggttgtatatagaggtctgaaggatttttaaaatgatttgcactttttcactgcatgcttacaattcccaaaggcaaaatctgtactgaggtagatcatttgaaagggctagattataaaattaagccttagagtatggaaagttcttataacaataatagtacacacttcagagtaagacaaatgcaaagcatcttaaggagtgaaaatagagtctaaatcttgcctttggcactacaaggtgtgtgtgtgtgtgtgtgttgtgtgtctttagtaggaaatggaagaacactgttttattttttaaagtgtttaatgtttctgtcctttctgtgaattattgaatttaagagccctgctaaataatgaaaaaacactttactaaaatttatcaaattatactgggttcggattgtgaaaacattggccacctagtagcagtggtgaggagtgggagggcccagcaagcatttatcagaaatagaatcacaataggaggagaatttggctgtctgatattatgatttgattacaatactgaatgggaaaagtatctaatattttgtaacaaaaagaccttcatattatctgttttgaccaaaatatgtagctatttcccttacacagattggaccgcacttatctcccttgtcctgtatcctttaatttcaggtctcaggatgtttagaaagctaaaaccccctacccctttctggctgaaaacttgccttatttggtatcttacacattaatgttactagcatcaggagcttactgttttattatgattcatcttcagtaatttttagaagcaagaagaaagccattgtgtcctctacaattaacaaaacttatctctgatatacaaagggatataaatatatacacttaaatagagaaaaagaggttgattgaattgtgcctttgagtgaacccagtttttaaataccgctgtgtttgtttcgccatggcttcagggatgctacatggctcttgcaccttttactcctctgctttatgaagtttgagttgtatttgtgcatcttaaagtaggttgaggcttgaggctgggctttcgggtttttttgttttttgttttgttttgttttgttttgttttcttgtacttaaacctgcttgcttcctaccacagattctttattttcccaaacactacaaaaaaacttttaaaactttgccatttcatctgtttacactctttgccactgattagcagtatttaaatcttgcaagaatattttgtgctttctttagaaacacaagagtatagatttttctcactgaaaagtgagagttacgcattgcagccatgaagggatgctaggatcaattatggcagtaccttttttcccctcctgttcttgagccagttgtctcttttgttttgggtcccacttaggattaacggatgtaaggtattttcctgtgcctttattttgtgtcattctattggaaggaggtgtaacggcagaatagcatcgtgttgggggttttccttcaaacactgcaagtgatattgccaccatgtgaacctcaaatatgcaatccagttgtgttggtttctcggtgacttggagtgttcatctcttcatgaattgtgagcactgaccatgttcttcagttcttaattatggtgagttgacaaataccaactactgcttttctttaggtggctataaatttcttactgtcaggaggaaatgacattatattctgttccactgaacgtcagagatcagcaggcactgtactgggtagagaagtgcctatacttctctacctaagagggcaggagggaaaccctacagctccttgtgagcctatatattagtatatcggcctggagaggacaagggaataagaccactcatagtgaggctggccaagctgcactggtcggaccaggcagtggctgacctaaggaaggcaacttgctttgcttaaaagtagattttttaagcaatgcttaacacaggcagcattcacctttgttcaggccatcgacatgtattgttaaaattactgcatatccccctcagatatcaagtatacactgttcatgttggggttgtgtgtgtgtatgtgtgtatgtacgcacgcatgtgtcccaaatcttgttttaattttttttttctgaatgtgatcatgttttggataatacctgagcagggttgccttttttttatttattaccattatatattatattatattatatattttttgctttcttataactttggaggaaagtcaaatcttggtattattaaaattgttttaaaaaggagtaaattttccagttgataaatgaaaatcactggcctatgtttaataagtttttctttaattactgtggaataacgtgccagctatcatcaacacaatgattttgtacatagggtagggaagcagtgatgctctcaatgggaagatgtgcaacacaaattaaggggaactccatgtattttacctacttcagcaatggaactgcaacttggggctttgtgaataaaatttagctgccttgtatagtcgtttgaaagaatatgtgatctgtgagagaattatagtttttttttagaagaaaaatctgcaaaagatctttccaaagacaatgtgccacagatcttttgttctctgtaatgaggattaattgctgtttaaacaaaaatgtaattgttcatctttaaattctttccttttcataagaggatcaagctgtaaaaaaacaaaaaaattaataaaaatttcgagaaatcaaaaaaaaaaa

SEQ ID NO: 50142 - DNA, 787 bp, Homo sapiens
agaggaccaagcctccctgtgtagcacaaagaaagtttctctgaatatatttaaagaaccatcaagaaatggggacctggattttgtttgcctgccttgtgggagcagcttttgccatgcctctaccacctcatcctgggcaccctggttatatcaacttcagctatgaggtgctcacccctttgaagtggtaccagagcatgataagaccaccatactcttcctatggttacgagcccatgggtggatggctgcaccaccaaatcatccccgtggtgtcccaacagcaccccctgactcacaccctgcagtctcatcaccacatcccagtggtgccagctcagcagcccagggtccgccagcaagcactgatgcctgttcctggccagcaatccatgactccaacccaacaccatcagccaaacctccctctgcctgcccagcagcccttccagccccagcctgttcagccacagcctcaccagcccatgcagccccagccacctgtgcaacccatgcagcccctgctgccacagccacctctgcctccaatgttccccctgcggcccctgccccccatacttcctgatctgcatctggaagcttggccagcaacagacaagaccaagcaggaggaagtggattaaaagaccagaatatgagacaggaactgaagtaaacactttagttgctttcagggatgacacaagcacacaatgatttttgcttacaatcacttaacttagcaaattctgtaactaaaaatgtaccaatagtagacaataaa

SEQ ID NO: 50143 - DNA, 287 bp, Homo sapiens
tacattctcactttttcagtctttccttatgcagtttctggcgtttccttcatttccccagattctttcaaatcctgattctcttctctgaggagtctgtgccgtccccttcagggcagtgtggtcggcgggttcaacactcatgcttccctgtcctttggcctccaagttgttaaaacagtcaatcacttctagctcagggtagctcattcttagccccatagggtccaccacagcatgtgtccccttgggctgacattgggctatggataaagcttctttttaaa

SEQ ID NO: 50144 - DNA, 2667 bp, Homo sapiens
ggtggtaacggtcgcggaggcggggcctgacgtagctgatcccagcctaacctggcccggctggctgctggtgggaggccggcgactgagtaagatgaagatccagtttcagacatgagactcgttgggtgatcatttcattgagatcaacctgaatgaccaggtgtaaagtgcaagagtaatatgctatgactgagtaactatgtttccggtagcccctaaaccccaggattccagtcaaccatcagacagactcatgactgaaaaacagcaggaagaagcagaatgggaaagcataaatgtgctattgatgatgcatggcttaaaacctttgtctctagtcaaaagaacagatctcaaagatctcatcatttttgacaaacagtcatcacaaaggatgagacagaatttgaaattgttggtggaagaaacatcatgtcaacagaacatgatacaggagcttatagaaactaatcaacagcttagaaatgaacttcagctagagcaaagccgagcagccaatcaagaacaacgagctaatgacttggaacaaattatggaaagtgtgaaatccaaaattggtgaattggaggatgaatcactaaatagggcttgccaccaacagaataaaataaaagatcttcaaaaggagcagaaaactttgcaggtgaagtgccagcattataagaaaaaacgaacggagcaagaagaaactattgcttctttgcaaatggaagtctgtagattaaaaaaggaggaagaagatcgcattgtcactcaaaacagagtgtttgcctatctgtgcaaaagagttcctcataccgtcttggatagacagttgctttgtctaattgattactatgaatctaaaattagaaaaattcatacacaaaggcaatataaagaagatgaaagtcagtcagaagaagaaaacgactacagaaatctggatgcctcaccaacttataaaggccttttaatgtcattacagaatcaactcaaggaatcaaaatctaagattgatgcactttcaagtgaaaagctgaacctccaaaaagatttggaaaccaggcctacgcagcatgaattaagactttataaacagcaggtgaagaagctggaaaaagcccttaagaaaaacgtcaaattacaggagcttattaatcataagaaggctgaggacacagagaagaaagatgagcccagcaaatataatcagcaacaggccctaattgaccagagatactttcaggtgctgtgtagcatcaattcaattatccacaatccaagagctccagtaataatttataaacagaccaaagggggagtccaaaattttaataaagatcttgttcaagattgtggatttgagcatcttgttcctgtaatagaaatgtgggcagatcaactgacatccttaaaggatttgtataagtccttgaaaacactatctgcagaactggtaccttggcttaatttgaagaagcaggatgaaaatgaaggtatcaaagttgaagatttgttgtttatagtagatactatgctggaagaagttgaaaataaggaaaaggacagcaatatgccacactttcaaactttgcaagctattgttcctcacttccaaaagttatttggtgtgccttctttaaatggagtctatccccgaatgaatgaagtttatactaggcttggagaaatgaacaatgctgtgagaaacctccaagaactcttagaattagatagttcatcctcattgtgtgtgctagtaagcactgttggaaaactctgtaggctgattaatgaagatgtgaatgagcaggttatgcaggtattaggacctgaagacctccagagcattatctacaaattggaagaacacgaggaatttttcccagcatttcaggcatttactaatgatctacttgaaatcttagaaattgatgacttggatgccattgtacctgcagtaaagaaattaaaagtactttcatactgaaaacaaatcaaatcatttttactgtgtaaattgtattcttaacattttgtattttgtaggattgatcttattttgagacaagggttgtaaaatgtatttgctctcagaattcatccccttcttagtattaggtcattcttcatctgtgtaatttttattaactttgagattcttatacagaaaatagttgcaagggtaaggtaattaactttagatcccttcatttctaaagcaattattgagtgcttaaaatttaaggttgttttagagtggagtttgtgagtaaaagaggagcccagggagacagattgcaagtagtaggttgcaatcttttagattcagcttgtaataatctttgagccacaccaaaaggaatgccaagggctctctaaatttagccagtaggaagctactgctctcctggcaaggattaattggcacattctgttaagatatccctcatgacagttgccctttcaaagcaggaggaagaaaaggaagaaagaaaaactgtttcatcatttctgttagggtaggaaatgaatcatagggtaaaatggatgagtagatagaagtctctcatttaaaaagtgtcttttgcaatcttgatgtaatgcactttttataaggacttgagatctcaaataaaatttctgtaaagaatttccaaa

SEQ ID NO: 50145 - DNA, 2009 bp, Homo sapiens
ggtggtaacggtcgcggaggcggggcctgacgtagctgatcccagcctaacctggcccggctggctgctggtgggaggccggcgactgagtaagatgaagatccagtttcagacatgagactcgttgggtgatcatttcattgagatcaacctgaatgaccaggtgtaaagtgcaagagtaatatgctatgactgagtaactatgtttccggtagcccctaaaccccaggattccagtcaaccatcagacagactcatgactgaaaaacagcaggaagaagcagaatgggaaagcataaatgtgctattgatgatgcatggcttaaaacctttgtctctagtcaaaagaacagatctcaaagatctcatcatttttgacaaacagtcatcacaaaggatgagacagaatttgaaattgttggtggaagaaacatcatgtcaacagaacatgatacaggagcttatagaaactaatcaacagcttagaaatgaacttcagctagagcaaagccgagcagccaatcaagaacaacgagctaatgacttggaacaaattatggaaagtgtgaaatccaaaattggtgaattggaggatgaatcactaaatagggcttgccaccaacagaataaaataaaagatcttcaaaaggagcagaaaactttgcaggtgaagtgccagcattataagaaaaaacgaacggagcaagaagaaactattgcttctttgcaaatggaagtctgtagattaaaaaaggaggaagaagatcgcattgtcactcaaaacagagtgtttgcctatctgtgcaaaagagttcctcataccgtcttggatagacagtttgctacataaattgatatgtagctagattcatgcaatataaagaagatgaaagtcagtcagaagaagaaaacgactacagaaatctggatgcctcaccaacttataaaggccttttaatgtcattacagaatcaactcaaggaatcaaaatctaagattgatgcactttcaagtgaaaagctgaacctccaaaaagatttggaaaccaggcctacgcagcatgaattaagactttataaacagcaggtgaagaagctggaaaaagcccttaagaaaaacgtcaaattacaggagcttattaatcataagaaggctgaggacacagagaagaaagatgagcccagcaaatataatcagcaacaggccctaattgaccagagatactttcaggtgctgtgtagcatcaattcaattatccacaatccaagagctccagtaataatttataaacagaccaaagggggagtccaaaattttaataaagatcttgttcaagattgtggatttgagcatcttgttcctgtaatagaaatgtgggcagatcaactgacatccttaaaggatttgtataagtccttgaaaacactatctgcagaactggtaccttggcttaatttgaagaagcaggatgaaaatgaaggtatcaaagttgaagatttgttgtttatagtagatactatgctggaagaagttgaaaataaggaaaaggacagcaatatgccacactttcaaactttgcaagctattgttcctcacttccaaaagttatttggtgtgccttctttaaatggagtctatccccgaatgaatgaagtttatactaggcttggagaaatgaacaatgctgtgagaaacctccaagaactcttagaattagatagttcatcctcattgtgtgtgctagtaagcactgttggaaaactctgtaggctgattaatgaagatgtgaatgagcaggttatgcaggtattaggacctgaagacctccagaggtatttgttttaaaagtttacaaagtatcatccagaatggctgggtgtggtggcacacgcctgtagtcccagctacttgggaggctgatgtgggaggatcacttgaacccaggagtttaagtccagtctgagcaaggcagtgagaccctgtctctaaacaataaaaattaaaataag

SEQ ID NO: 50146 - DNA, 753 bp, Homo sapiens
ggtggtaacggtcgcggaggcggggcctgacgtagctgatcccagcctaacctggcccggctggctgctggtgggaggccggcgactgagtaagatgaagatccagtttcagacatgagactcgttgggtgatcatttcattgagatcaacctgaatgaccaggtgtaaagtgcaagagtaatatgctatgactgagtaactatgtttccggtagcccctaaaccccaggattccagtcaaccatcagacagactcatgactgaaaaacagcaggaagaagcagaatgggaaagcataaatgtgctattgatgatgcatggcttaaaacctttgtctctagtcaaaagaacagatctcaaagatctcatcatttttgacaaacagtcatcacaaaggatgagacagaatttgaaattgttggtggaagaaacatcatgtcaacagaacatgatacaggagcttatagaaactaatcaacagcttaggtgaagtgccagcattataagaaaaaacgaacggagcaagaagaaactattgcttctttgcaaatggaagtctgtagattaaaaaaggaggaagaagatcgcattgtcactcaaaacagagtgtttgcctatctgtgcaaaagagttcctcataccgtcttggatagacagttgctttgtctaattgattactatgaatctaaaattagaaaaattcatacacaaagggaatataaagaagatgaaagtccagtccagaagaagaaa

SEQ ID NO: 50147 - DNA, 2726 bp, Homo sapiens
ggtggtaacggtcgcggaggcggggcctgacgtagctgatcccagcctaacctggcccggctggctgctggtgggaggccggcgactgagtaagatgaagatccagtttcagacatgagactcgttgggtgatcatttcattgagatcaacctgaatgaccaggtgtaaagtgcaagagtaatatgctatgactgagtaactatgtttccggtagcccctaaaccccaggattccagtcaaccatcagacagactcatgactgaaaaacagcaggaagaagcagaatgggaaagcataaatgtgctattgatgatgcatggcttaaaacctttgtctctagtcaaaagaacagatctcaaagatctcatcatttttgacaaacagtcatcacaaaggatgagacagaatttgaaattgttggtggaagaaacatcatgtcaacagaacatgatacaggagcttatagaaactaatcaacagcttagaaatgaacttcagctagagcaaagccgagcagccaatcaagaacaacgagctaatgacttggaacaaattatggaaagtgtgaaatccaaaattggtgaattggaggatgaatcactaaatagggcttgccaccaacagaataaaataaaagatcttcaaaaggagcagaaaactttgcaggtgaagtgccagcattataagaaaaaacgaacggagcaagaagaaactattgcttctttgcaaatggaagtctgtagattaaaaaaggaggaagaagatcgcattgtcactcaaaacagagtgtttgcctatctgtgcaaaagagttcctcataccgtcttggatagacagttgctttgtctaattgattactatgaatctaaaattagaaaaattcatacacaaaggcaatataaagaagatgaaagtcagtcagaagaagaaaacgactacagaaatctggatgcctcaccaacttataaaggccttttaatgtcattacagaatcaactcaaggaatcaaaatctaagattgatgcactttcaagtgaaaagctgaacctccaaaaagatttggaaaccaggcctacgcagcatgaattaagactttataaacagcaggtgaagaagctggaaaaagcccttaagaaaaacgtcaaattacaggagcttattaatcataagaaggctgaggacacagagaagaaagatgagcccagcaaatataatcagcaacaggccctaattgaccagagatactttcaggtgctgtgtagcatcaattcaattatccacaatccaagagctccagtaataatttataaacagaccaaagggggagtccaaaattttaataaagatcttgttcaagattgtggatttgagcatcttgttcctgtaatagaaatgtgggcagatcaactgacatccttaaagagtctggaggagaaagagaacactctgattgtagccccaagaagggctttgccatggtggatttgtataagtccttgaaaacactatctgcagaactggtaccttggcttaatttgaagaagcaggatgaaaatgaaggtatcaaagttgaagatttgttgtttatagtagatactatgctggaagaagttgaaaataaggaaaaggacagcaatatgccacactttcaaactttgcaagctattgttcctcacttccaaaagttatttggtgtgccttctttaaatggagtctatccccgaatgaatgaagtttatactaggcttggagaaatgaacaatgctgtgagaaacctccaagaactcttagaattagatagttcatcctcattgtgtgtgctagtaagcactgttggaaaactctgtaggctgattaatgaagatgtgaatgagcaggttatgcaggtattaggacctgaagacctccagagcattatctacaaattggaagaacacgaggaatttttcccagcatttcaggcatttactaatgatctacttgaaatcttagaaattgatgacttggatgccattgtacctgcagtaaagaaattaaaagtactttcatactgaaaacaaatcaaatcatttttactgtgtaaattgtattcttaacattttgtattttgtaggattgatcttattttgagacaagggttgtaaaatgtatttgctctcagaattcatccccttcttagtattaggtcattcttcatctgtgtaatttttattaactttgagattcttatacagaaaatagttgcaagggtaaggtaattaactttagatcccttcatttctaaagcaattattgagtgcttaaaatttaaggttgttttagagtggagtttgtgagtaaaagaggagcccagggagacagattgcaagtagtaggttgcaatcttttagattcagcttgtaataatctttgagccacaccaaaaggaatgccaagggctctctaaatttagccagtaggaagctactgctctcctggcaaggattaattggcacattctgttaagatatccctcatgacagttgccctttcaaagcaggaggaagaaaaggaagaaagaaaaactgtttcatcatttctgttagggtaggaaatgaatcatagggtaaaatggatgagtagatagaagtctctcatttaaaaagtgtcttttgcaatcttgatgtaatgcactttttataaggacttgagatctcaaataaaatttctgtaaagaatttccaaa

SEQ ID NO: 50148 - DNA, 2756 bp, Homo sapiens
ggtggtaacggtcgcggaggcggggcctgacgtagctgatcccagcctaacctggcccggctggctgctggtgggaggccggcgactgagtaagatgaagatccagtttcagacatgagactcgttgggtgatcatttcattgagatcaacctgaatgaccaggtgtaaagtgcaagagtaatatgctatgactgaggcaactcaaattttttaattgccaatttctgtttcttttgattctacaaaagtaactatgtttccggtagcccctaaaccccaggattccagtcaaccatcagacagactcatgactgaaaaacagcaggaagaagcagaatgggaaagcataaatgtgctattgatgatgcatggcttaaaacctttgtctctagtcaaaagaacagatctcaaagatctcatcatttttgacaaacagtcatcacaaaggatgagacagaatttgaaattgttggtggaagaaacatcatgtcaacagaacatgatacaggagcttatagaaactaatcaacagcttagaaatgaacttcagctagagcaaagccgagcagccaatcaagaacaacgagctaatgacttggaacaaattatggaaagtgtgaaatccaaaattggtgaattggaggatgaatcactaaatagggcttgccaccaacagaataaaataaaagatcttcaaaaggagcagaaaactttgcaggtgaagtgccagcattataagaaaaaacgaacggagcaagaagaaactattgcttctttgcaaatggaagtctgtagattaaaaaaggaggaagaagatcgcattgtcactcaaaacagagtgtttgcctatctgtgcaaaagagttcctcataccgtcttggatagacagtttgctacataaattgatatgtagctagattcatgcaatataaagaagatgaaagtcagtcagaagaagaaaacgactacagaaatctggatgcctcaccaacttataaaggccttttaatgtcattacagaatcaactcaaggaatcaaaatctaagattgatgcactttcaagtgaaaagctgaacctccaaaaagatttggaaaccaggcctacgcagcatgaattaagactttataaacagcaggtgaagaagctggaaaaagcccttaagaaaaacgtcaaattacaggagcttattaatcataagaaggctgaggacacagagaagaaagatgagcccagcaaatataatcagcaacaggccctaattgaccagagatactttcaggtgctgtgtagcatcaattcaattatccacaatccaagagctccagtaataatttataaacagaccaaagggggagtccaaaattttaataaagatcttgttcaagattgtggatttgagcatcttgttcctgtaatagaaatgtgggcagatcaactgacatccttaaagagtctggaggagaaagagaacactctgattgtagccccaagaagggctttgccatggtggatttgtataagtccttgaaaacactatctgcagaactggtaccttggcttaatttgaagaagcaggatgaaaatgaaggtatcaaagttgaagatttgttgtttatagtagatactatgctggaagaagttgaaaataaggaaaaggacagcaatatgccacactttcaaactttgcaagctattgttcctcacttccaaaagttatttggtgtgccttctttaaatggagtctatccccgaatgaatgaagtttatactaggcttggagaaatgaacaatgctgtgagaaacctccaagaactcttagaattagatagttcatcctcattgtgtgtgctagtaagcactgttggaaaactctgtaggctgattaatgaagatgtgaatgagcaggttatgcaggtattaggacctgaagacctccagagcattatctacaaattggaagaacacgaggaatttttcccagcatttcaggcatttactaatgatctacttgaaatcttagaaattgatgacttggatgccattgtacctgcagtaaagaaattaaaagtactttcatactgaaaacaaatcaaatcatttttactgtgtaaattgtattcttaacattttgtattttgtaggattgatcttattttgagacaagggttgtaaaatgtatttgctctcagaattcatccccttcttagtattaggtcattcttcatctgtgtaatttttattaactttgagattcttatacagaaaatagttgcaagggtaaggtaattaactttagatcccttcatttctaaagcaattattgagtgcttaaaatttaaggttgttttagagtggagtttgtgagtaaaagaggagcccagggagacagattgcaagtagtaggttgcaatcttttagattcagcttgtaataatctttgagccacaccaaaaggaatgccaagggctctctaaatttagccagtaggaagctactgctctcctggcaaggattaattggcacattctgttaagatatccctcatgacagttgccctttcaaagcaggaggaagaaaaggaagaaagaaaaactgtttcatcatttctgttagggtaggaaatgaatcatagggtaaaatggatgagtagatagaagtctctcatttaaaaagtgtcttttgcaatcttgatgtaatgcactttttataaggacttgagatctcaaataaaatttctgtaaagaatttccaaa

SEQ ID NO: 50149 - DNA, 2652 bp, Homo sapiens
ggtggtaacggtcgcggaggcggggcctgacgtagctgatcccagcctaacctggcccggctggctgctggtgggaggccggcgactgagtaagatgaagatccagtttcagacatgagactcgttgggtgatcatttcattgagatcaacctgaatgaccaggtgtaaagtgcaagagtaatatgctatgactgagcaggaagaagcagaatgggaaagcataaatgtgctattgatgatgcatggcttaaaacctttgtctctagtcaaaagaacagatctcaaagatctcatcatttttgacaaacagtcatcacaaaggatgagacagaatttgaaattgttggtggaagaaacatcatgtcaacagaacatgatacaggagcttatagaaactaatcaacagcttagaaatgaacttcagctagagcaaagccgagcagccaatcaagaacaacgagctaatgacttggaacaaattatggaaagtgtgaaatccaaaattggtgaattggaggatgaatcactaaatagggcttgccaccaacagaataaaataaaagatcttcaaaaggagcagaaaactttgcaggtgaagtgccagcattataagaaaaaacgaacggagcaagaagaaactattgcttctttgcaaatggaagtctgtagattaaaaaaggaggaagaagatcgcattgtcactcaaaacagagtgtttgcctatctgtgcaaaagagttcctcataccgtcttggatagacagttgctttgtctaattgattactatgaatctaaaattagaaaaattcatacacaaaggcaatataaagaagatgaaagtcagtcagaagaagaaaacgactacagaaatctggatgcctcaccaacttataaaggccttttaatgtcattacagaatcaactcaaggaatcaaaatctaagattgatgcactttcaagtgaaaagctgaacctccaaaaagatttggaaaccaggcctacgcagcatgaattaagactttataaacagcaggtgaagaagctggaaaaagcccttaagaaaaacgtcaaattacaggagcttattaatcataagaaggctgaggacacagagaagaaagatgagcccagcaaatataatcagcaacaggccctaattgaccagagatactttcaggtgctgtgtagcatcaattcaattatccacaatccaagagctccagtaataatttataaacagaccaaagggggagtccaaaattttaataaagatcttgttcaagattgtggatttgagcatcttgttcctgtaatagaaatgtgggcagatcaactgacatccttaaagagtctggaggagaaagagaacactctgattgtagccccaagaagggctttgccatggtggatttgtataagtccttgaaaacactatctgcagaactggtaccttggcttaatttgaagaagcaggatgaaaatgaaggtatcaaagttgaagatttgttgtttatagtagatactatgctggaagaagttgaaaataaggaaaaggacagcaatatgccacactttcaaactttgcaagctattgttcctcacttccaaaagttatttggtgtgccttctttaaatggagtctatccccgaatgaatgaagtttatactaggcttggagaaatgaacaatgctgtgagaaacctccaagaactcttagaattagatagttcatcctcattgtgtgtgctagtaagcactgttggaaaactctgtaggctgattaatgaagatgtgaatgagcaggttatgcaggtattaggacctgaagacctccagagcattatctacaaattggaagaacacgaggaatttttcccagcatttcaggcatttactaatgatctacttgaaatcttagaaattgatgacttggatgccattgtacctgcagtaaagaaattaaaagtactttcatactgaaaacaaatcaaatcatttttactgtgtaaattgtattcttaacattttgtattttgtaggattgatcttattttgagacaagggttgtaaaatgtatttgctctcagaattcatccccttcttagtattaggtcattcttcatctgtgtaatttttattaactttgagattcttatacagaaaatagttgcaagggtaaggtaattaactttagatcccttcatttctaaagcaattattgagtgcttaaaatttaaggttgttttagagtggagtttgtgagtaaaagaggagcccagggagacagattgcaagtagtaggttgcaatcttttagattcagcttgtaataatctttgagccacaccaaaaggaatgccaagggctctctaaatttagccagtaggaagctactgctctcctggcaaggattaattggcacattctgttaagatatccctcatgacagttgccctttcaaagcaggaggaagaaaaggaagaaagaaaaactgtttcatcatttctgttagggtaggaaatgaatcatagggtaaaatggatgagtagatagaagtctctcatttaaaaagtgtcttttgcaatcttgatgtaatgcactttttataaggacttgagatctcaaataaaatttctgtaaagaatttccaaa

SEQ ID NO: 50150 - DNA, 1328 bp, Homo sapiens
cgtgttgcacaggctggtcttaaactcctgacctcagatgatcttcgcgtctcggcctcccaaagtgctgggattataggcatgagccactgcacccagctggcagatacctttcatcttagagtgatccactactaagaaatcttcccaagaaaattaaagagggacaagactgttctatgagaagaaattcctaagtcctcacgtggagacctagggaggagacgcctctacctgggatttcatcatgtagatgcacccgtgtagtgatacagatctaatgagacactaacatatcacacatgtgggcagttggatctgttaataaggacatgctgctaatgaagttaatactagaatcagagggtacttgtgggtatgtggtaacttatataaacagagcccctgtgaagcatctgtatccgaatcagtgataatctatcatcactatcggagaaaaacttcatgtgcacaaaagcaccagtattattgcctttatgtttggggtttgcctttgcatataggttcttgtttcatgtgagtttaccactagaaaaagttactctcttttattattactgtttttgtattacagaaattgatgacttggatgccattgtacctgcagtaaagaaattaaaagtactttcatactgaaaacaaatcaaatcatttttactgtgtaaattgtattcttaacattttgtattttgtaggattgatcttattttgagacaagggttgtaaaatgtatttgctctcagaattcatccccttcttagtattaggtcattcttcatctgtgtaatttttattaactttgagattcttatacagaaaatagttgcaagggtaaggtaattaactttagatcccttcatttctaaagcaattattgagtgcttaaaatttaaggttgttttagagtggagtttgtgagtaaaagaggagcccagggagacagattgcaagtagtaggttgcaatcttttagattcagcttgtaataatctttgagccacaccaaaaggaatgccaagggctctctaaatttagccagtaggaagctactgctctcctggcaaggattaattggcacattctgttaagatatccctcatgacagttgccctttcaaagcaggaggaagaaaaggaagaaagaaaaactgtttcatcatttctgttagggtaggaaatgaatcatagggtaaaatggatgagtagatagaagtctctcatttaaaaagtgtcttttgcaatcttgatgtaatgcactttttataaggacttgagatctcaaataaaatttctgtaaagaatttccaaa

SEQ ID NO: 50151 - DNA, 320 bp, Homo sapiens
acgagctaatgacttggaacaaattatggaaagtgtgaaatccaaaattggtgaattggaggatgaatcactaaatagggcttgccaccaacagaataaaataaaagatcttcaaaaggagcagaaaactttgcaggtactgagttatgaattcttagatgatggttagttagtactaaaacagctcattatggtcccaggtgacttccatgttgtttgattcagtggtttttaccttttttggcttatcactgctaccttgaaattctcttcacttggtttctagaatgtcctttatttccctctgacctcactgatca

SEQ ID NO: 50152 - DNA, 2601 bp, Homo sapiens
aagcggaggaggccggcgactgagtaagatgaagatccagtttcagacatgagactcgttgggtgatcatttcattgagatcaacctgaatgaccaggtgtaaagtgcaagagtaatatgctatgactgagtaactatgtttccggtagcccctaaaccccaggattccagtcaaccatcagacagactcatgactgaaaaacagcaggaagaagcagaatgggaaagcataaatgtgctattgatgatgcatggcttaaaacctttgtctctagtcaaaagaacagatctcaaagatctcatcatttttgacaaacagtcatcacaaaggatgagacagaatttgaaattgttggtggaagaaacatcatgtcaacagaacatgatacaggagcttatagaaactaatcaacagcttagaaatgaacttcagctagagcaaagccgagcagccaatcaagaacaacgagctaatgacttggaacaaattatggaaagtgtgaaatccaaaattggtgaattggaggatgaatcactaaatagggcttgccaccaacagaataaaataaaagatcttcaaaaggagcagaaaactttgcaggtgaagtgccagcattataagaaaaaacgaacggagcaagaagaaactattgcttctttgcaaatggaagtctgtagattaaaaaaggaggaagaagatcgcattgtcactcaaaacagagtgtttgcctatctgtgcaaaagagttcctcataccgtcttggatagacagttgctttgtctaattgattactatgaatctaaaattagaaaaattcatacacaaaggcaatataaagaagatgaaagtcagtcagaagaagaaaacgactacagaaatctggatgcctcaccaacttataaaggccttttaatgtcattacagaatcaactcaaggaatcaaaatctaagattgatgcactttcaagtgaaaagctgaacctccaaaaagatttggaaaccaggcctacgcagcatgaattaagactttataaacagcaggtgaagaagctggaaaaagcccttaagaaaaacgtcaaattacaggagcttattaatcataagaaggctgaggacacagagaagaaagatgagcccagcaaatataatcagcaacaggccctaattgaccagagatactttcaggtgctgtgtagcatcaattcaattatccacaatccaagagctccagtaataatttataaacagaccaaagggggagtccaaaattttaataaagatcttgttcaagattgtggatttgagcatcttgttcctgtaatagaaatgtgggcagatcaactgacatccttaaaggatttgtataagtccttgaaaacactatctgcagaactggtaccttggcttaatttgaagaagcaggatgaaaatgaaggtatcaaagttgaagatttgttgtttatagtagatactatgctggaagaagttgaaaataaggaaaaggacagcaatatgccacactttcaaactttgcaagctattgttcctcacttccaaaagttatttggtgtgccttctttaaatggagtctatccccgaatgaatgaagtttatactaggcttggagaaatgaacaatgctgtgagaaacctccaagaactcttagaattagatagttcatcctcattgtgtgtgctagtaagcactgttggaaaactctgtaggctgattaatgaagatgtgaatgagcaggttatgcaggtattaggacctgaagacctccagagcattatctacaaattggaagaacacgaggaatttttcccagcatttcaggcatttactaatgatctacttgaaatcttagaaattgatgacttggatgccattgtacctgcagtaaagaaattaaaagtactttcatactgaaaacaaatcaaatcatttttactgtgtaaattgtattcttaacattttgtattttgtaggattgatcttattttgagacaagggttgtaaaatgtatttgctctcagaattcatccccttcttagtattaggtcattcttcatctgtgtaatttttattaactttgagattcttatacagaaaatagttgcaagggtaaggtaattaactttagatcccttcatttctaaagcaattattgagtgcttaaaatttaaggttgttttagagtggagtttgtgagtaaaagaggagcccagggagacagattgcaagtagtaggttgcaatcttttagattcagcttgtaataatctttgagccacaccaaaaggaatgccaagggctctctaaatttagccagtaggaagctactgctctcctggcaaggattaattggcacattctgttaagatatccctcatgacagttgccctttcaaagcaggaggaagaaaaggaagaaagaaaaactgtttcatcatttctgttagggtaggaaatgaatcatagggtaaaatggatgagtagatagaagtctctcatttaaaaagtgtcttttgcaatcttgatgtaatgcactttttataaggacttgagatctcaaataaaatttctgtaaagaatttccaaa

SEQ ID NO: 50153 - DNA, 2778 bp, Homo sapiens
ggtggtaacggtcgcggaggcggggcctgacgtagctgatcccagcctaacctggcccggctggctgctggtgggaggccggcgactgagtaagatgaagatccagtttcagacatgagactcgttgggtgatcatttcattgagatcaacctgaatgaccaggtgtaaagtgcaagagtaatatgctatgactgaggcaactcaaattttttaattgccaatttctgtttcttttgattctacaaaagtaactatgtttccggtagcccctaaaccccaggattccagtcaaccatcagacagactcatgactgaaaaacagcaggaagaagcagaatgggaaagcataaatgtgctattgatgatgcatggcttaaaacctttgtctctagtcaaaagaacagatctcaaagatctcatcatttttgacaaacagtcatcacaaaggatgagacagaatttgaaattgttggtggaagaaacatcatgtcaacagaacatgatacaggagcttatagaaactaatcaacagcttagaaatgaacttcagctagagcaaagccgagcagccaatcaagaacaacgagctaatgacttggaacaaattatggaaagtgtgaaatccaaaattggtgaattggaggatgaatcactaaatagggcttgccaccaacagaataaaataaaagatcttcaaaaggagcagaaaactttgcaggtgaagtgccagcattataagaaaaaacgaacggagcaagaagaaactattgcttctttgcaaatggaagtctgtagattaaaaaaggaggaagaagatcgcattgtcactcaaaacagagtgtttgcctatctgtgcaaaagagttcctcataccgtcttggatagacagttgctttgtctaattgattactatgaatctaaaattagaaaaattcatacacaaaggcaatataaagaagatgaaagtcagtcagaagaagaaaacgactacagaaatctggatgcctcaccaacttataaaggccttttaatgtcattacagaatcaactcaaggaatcaaaatctaagattgatgcactttcaagtgaaaagctgaacctccaaaaagatttggaaaccaggcctacgcagcatgaattaagactttataaacagcaggtgaagaagctggaaaaagcccttaagaaaaacgtcaaattacaggagcttattaatcataagaaggctgaggacacagagaagaaagatgagcccagcaaatataatcagcaacaggccctaattgaccagagatactttcaggtgctgtgtagcatcaattcaattatccacaatccaagagctccagtaataatttataaacagaccaaagggggagtccaaaattttaataaagatcttgttcaagattgtggatttgagcatcttgttcctgtaatagaaatgtgggcagatcaactgacatccttaaagagtctggaggagaaagagaacactctgattgtagccccaagaagggctttgccatggtggatttgtataagtccttgaaaacactatctgcagaactggtaccttggcttaatttgaagaagcaggatgaaaatgaaggtatcaaagttgaagatttgttgtttatagtagatactatgctggaagaagttgaaaataaggaaaaggacagcaatatgccacactttcaaactttgcaagctattgttcctcacttccaaaagttatttggtgtgccttctttaaatggagtctatccccgaatgaatgaagtttatactaggcttggagaaatgaacaatgctgtgagaaacctccaagaactcttagaattagatagttcatcctcattgtgtgtgctagtaagcactgttggaaaactctgtaggctgattaatgaagatgtgaatgagcaggttatgcaggtattaggacctgaagacctccagagcattatctacaaattggaagaacacgaggaatttttcccagcatttcaggcatttactaatgatctacttgaaatcttagaaattgatgacttggatgccattgtacctgcagtaaagaaattaaaagtactttcatactgaaaacaaatcaaatcatttttactgtgtaaattgtattcttaacattttgtattttgtaggattgatcttattttgagacaagggttgtaaaatgtatttgctctcagaattcatccccttcttagtattaggtcattcttcatctgtgtaatttttattaactttgagattcttatacagaaaatagttgcaagggtaaggtaattaactttagatcccttcatttctaaagcaattattgagtgcttaaaatttaaggttgttttagagtggagtttgtgagtaaaagaggagcccagggagacagattgcaagtagtaggttgcaatcttttagattcagcttgtaataatctttgagccacaccaaaaggaatgccaagggctctctaaatttagccagtaggaagctactgctctcctggcaaggattaattggcacattctgttaagatatccctcatgacagttgccctttcaaagcaggaggaagaaaaggaagaaagaaaaactgtttcatcatttctgttagggtaggaaatgaatcatagggtaaaatggatgagtagatagaagtctctcatttaaaaagtgtcttttgcaatcttgatgtaatgcactttttataaggacttgagatctcaaataaaatttctgtaaagaatttccaaa

SEQ ID NO: 50154 - DNA, 2908 bp, Homo sapiens
  misc_feature (577)..(577): n is a, c, g, or t
  misc_feature (936)..(936): n is a, c, g, or t
gaacattttaaacagtgaaatagatttgtgcatttagaagcattgctttggttataccataggggatggattggtgaagatgagaagagagtttgggagtaacagaaaaccctcaaggtctcagatgggtggcctgactatagtgttggcactgagattgaaaagcagaaaaagttattaggactaatcttttggcatattttaccttatagaatagaggttggcaagttttttgtaaagagccataatattttttaaaagcctaaatactagggctttgagggccattctgcttgtattgcagctattcacctgtgtcttgagcgcaaaagcagccatagactgtaggcaaacaaatgagtgtggttgtattctaataaagctttatttatgaaatcagttgggggtctagattttgctcacaggcccttctaggctagcgtatccagtggtgaagattaatagctcaagcaatggctagagtaagatgataatataggtgagggattgtagggataagaaggaaagaggagcaggggaggaaagaaccctgaggaaccaaatcatattaggagangaggtgaaaatggtactgagggagtctgtaggaagcttagcaggaaaatggtgtataagaacttagggaggagagtttcctgaaggaggggcagtaattgcagtatcaaatgctacagagaggagaggcatgatgagaccttacaataagccattcattgtatttgctctttgggggccagtgagaagggaaaactgagggtggtggaggctggaagctagatcatgatgagctaaggagtgagttggagttgagctatttagactagttagagctttgatttaaatatttggtagtcatgggaaggaggaatcacaggttagcttgaggaagacgtagggtggaaagaaggctgttcntttgttttttatttgttaagaagggtggtgttgactaggctaaactgaagaagccagagcaaaagagacctgaggacttggttagaaaaggaacaaacgactgagcctagatagagtaagtagggagttgttggggaagggaataagaaatataagagatgtgtgagatgtggagagatcttgaagcagcctcaggtggaaaggacttgaagtacaggcagaaatgaggatgggctgcattaggggtagggaaactggaacaaattatacttagtggcctctattttctttgacaacgttaactatagagaatgaagggtctaagaggtaatacttgaaggaaaggtgtttcagggtaagcaaaataggatttatataggaatgaaggcccagctgaggtaagtactgtactagattgttattttggtaacagtaatgaacaattttcagttaattatataagatttagctatgaatgcattctggattttagttagaattgttaaaccaaattcaaagtgtggaagtcattcagttgaattgttaaaaaaaaaaaatggaactagcaggaacgttggaatttaatgagtccaactcctttttcacagatgtgaaaatttaaggcgtagaaaaataatgaatgttgtccactcatctagttggtaaccaggttttctgatttcagaaaatcaaaaatcacttgtttttaattatgtgttttatcataacacacttaacaaaaattctggctgggcacagtggctcacacctgtaatcccagcactttggaagacagaggagggaggattgcttgagactaggagttcaagaccagcctaggcaatacagtgagacctcatctctacacaaaatttaaaaagtaggcaagcatggtggttcacaaccgtagtcccagcttgggaggctgaggtgggaggatctctttagtccatgaggtggaggccacagtgagctgagattgtactgtctcagaaaaaacaacaacaaaaaaacaaaagctctcttttataaaactttcaaacatatgtaaaagtagagagaataatatattgaactcccatgtggcattttaaaacaattataatttatggtcgtttgtgtaatttatatcttgttaaaagaaagtccttagtcaaattaaagagttcaactgagcaaagaatgattcgtgaatagggcagcctcctgagccacagtatgttcagagagactccagcacagccaggtggtggaagaagatgtatagacagaggtacagaaacagtcagattggttacagctcggcatttgccttatttgaacatggtttgaacagttggccccttttaactggccaaaacttggtgattggcacaaaagtaggttacagtctgtttacacctccatttagatacatttatagttcactatgtacagagaaacctttagactgaacttcaaatatgtaaggagactgctttagactaaacttgatttaacaatctctacccacttctactcttccctgcattattttgaagcgtcatctatcagtattatgtttcatctgccaaaattttaacatgtatgcctaaaaggtaagacatatggtagtttcagtgttttttctccttttaaaacataaaccacaatatgggttaatgtggattatgtgggctaagcaggttgatgtgggttaatgtgggttatgtgggctaagcaggttgatgtggttaatttttaacttccaaagatgtttataagttattatgagtagactttttggaataaaggtttcctcatattgcagtattttggaaagtgattttactaaaaaataatacgggccaggcatgtggctcatgcccgtaatctcagcactttgagaggcctaggtgggaggactgcttgaagccaggagttctagaccagcctgggcaacaaagtgagaccctacctctacaaaaaatac

SEQ ID NO: 50155 - DNA, 256 bp, Homo sapiens
cgctggggaacattttaaacagtgaaatagatttgtgcatttagaagcattgctttggttataccataggggatggattggtgaagatgagaagagagtttgggagtaacagaaaaccctcaaggtctcagatggggagtttgggagtaacagaaaaccctcaaggtctcagatgggtggcctgactatagtgttggcactgagattgaaaagcagaaaaagttattaggactaatcttttggcatattttacctt

SEQ ID NO: 50156 - DNA, 561 bp, Homo sapiens
aaattcaaaaattacttgcaaacatccaaaaaccaagtagaatttttaaaatctttattgattcttaagataaattatttttataaattttaggtattttctaaatgctttttagttgctttaagttgcttacaatcagttttttaatcgcttttttctttttaatggtatgggagcagtttcagccataagtcaaccatttttaggctgctttgcttatttagttttgatttagaaattgaaactcctgtgttcttgaacaaagtgttacactttttaagagacagggtcctgctctgtcacccagcttgtagtgtagttgagcaatcatgactcggcgcagccacaactttctgggcacaagcaatcctcctgcctcagcctcctgagtagctgggactacagatgcgcagccccctgccacacacacacacgtggctaattttttaaaaaatttttcttatagagatggggtcttgctgtgttgcccaggctggattcaaactcctggcctccagcagtactcccacctcagcctcccaaagtgatgggattacagac

SEQ ID NO: 50157 - DNA, 242 bp, Homo sapiens
ctgtttgatacattttgacacctttttcttttctttgagacaaggtctggttctgtcgccaggctggcgtgcagtagtgtgatcatggctcactgcagcctcgacctgctgacctcaagcaatcctcctgcctgggcctaccaaactgctataggcatgagctcccatgcttagcacaatttagagacttaattacattattgtcctttattctttcactcagccaaacaccttggagttgg

SEQ ID NO: 50158 - DNA, 864 bp, Homo sapiens
cccaaagtgctgggattacaggcgtgagccaccacgcctggccccagttttttttttaaacataattctgactctggaaataagtaggcacctttaaactctgtgtagacttgattttgttttttcttgaagtttgtgtgtatctcttaatatgtgtgctaacttaatttagggtctaggttcatgctgatgttggaagcatgccattctccaagctttttaaaaatatggatattcttaagtatctcacactgaggcacccagctataaagtaaccgtagtgtaggtaggtgcacactgcataaacacttcttctgtaagctggagaaatagctggaggagaaatctgttcttagaacaaggcacatgctgttggttccagacattctttttagtggaggatacaaaagtgtgtttaacggttgctggccccacgcctgctgtccagccctatggaatgtgctctgtctgggccacactgccagtcatcaaggcagttactgtgaggaaggaagaagccagctcttcagttccttgacctgagcttttctggccaaaagaaggaatctgttttgaagattaggtttcccacctggatcctgcccaccccacccacccccttctgtgaactgtccggcttatcgaagaagacccatttttccttcttacagttgctgtttcttcattgcaagtgattcaccctgaacgtaaagttaggaaacttagtttataaggaactttatttggtggagaaatgtcaccccattctctcgttaaaagatacgatgtctggattgattccaatatctgtggtttttggcacatgccatctttctgaaattgcttctctgtgttttatgtaag

SEQ ID NO: 50159 - DNA, 271 bp, Homo sapiens
gatgcatttctatatatggcaataattaagttaatagagcataaataagttgataaaaggaagtctgattatagcattattcctcaatacttccttagtttcgttttataaataatttaaaaattaccttcccaatgtttggggatgtcaggtatcagaccatacttgtaaacatacttgtaaaatgtcaggtatcagaccatacttgtaaacagttggttgtagcctggattatgaataatttgtttgcattttaatcagtttataagcc

SEQ ID NO: 50160 - DNA, 251 bp, Homo sapiens
cgcggccgctgtaggtctagctttttcctccatattgatgaactaaaactcactcatttcacaactcaaagccagggccttcagttcacagcccgttgcctcagacggccttccctgaccatctaacatagcatcccctgttactctccctcacttctgtgttttccttcattgcatttacctctccttaataggatactgtagctttccttatgatctttctcccccattcgaatgtaagccctaggagg

SEQ ID NO: 50161 - DNA, 642 bp, Homo sapiens
  misc_feature (1)..(1): n is a, c, g, or t
  misc_feature (29)..(29): n is a, c, g, or t
  misc_feature (52)..(52): n is a, c, g, or t
  misc_feature (55)..(56): n is a, c, g, or t
  misc_feature (73)..(74): n is a, c, g, or t
  misc_feature (138)..(138): n is a, c, g, or t
  misc_feature (142)..(142): n is a, c, g, or t
  misc_feature (180)..(180): n is a, c, g, or t
  misc_feature (226)..(226): n is a, c, g, or t
ngagctaagaatacaaacccacactttgngccagcctgaaggaagagtacgntanntcatcactcggaagttnnaatgatctaaccaggaacacactacatcaatcctttaaaagctataggattcatttgatgcttntaancacttgatttttgcattctgctaaaaaaaaaaaaactnatcttgctggctactaaaatgttgaactcactgaagagtgtttcangaagtgaaagctcattaaacctaacagtcaaaatgcaaacctaatagagtacttctcctgccaatactggtattagagccagatgctggtatttagacaataaaaatttaaatctttagttaatgacattaaattgaaataactcaaaactctgaaaggaaaaaaacctttcaaatctgataataaaagtacgtaatttcttaaattgtgacttctttttgtccaacagattcaggcaaattctcaaactgggggaagaagcaacaaacaaatattatcattgatttctattattttttcttttagaaacagggtcttgctctgtcacccaaactgaagtgcaatttctattttaagtttgtgttgggtaaaaaaattaaatgcactgtttggtcctttcacaactgtcagaagcc

SEQ ID NO: 50162 - DNA, 789 bp, Homo sapiens
cctgacctcaggtgatctgcccgcctcggcctcccaaagagctgggattacaggtgtaagccactattcctggccaattttttttcattggtatcatacatgagatattttttcttctattatatcttcttactgattattatttgtttataaaaaagcaaaagtgtttcattgcttttgttaccattcttattacttagagtttttactcaatttttagtttattttataaaaataatgttttttcctcttcctttccaatatttgtgactcttcttattcttgactagtcaaaatggctagtacttccagaacaatgctaaataatggtggtagctggcatctttgccctttagtgacgtctagtattttaacactaagtatcttcaaggtatagtcatgtgccactaaatgatggggatacattctggaaaatgcattgttagttgatgttcgttatgtgaacatcatagagtgtacttacataaacctagatggtagagcatactacacacctagctacatggtatagccttttgttcctaggcaacaaacttgttcatcatgctactgtactgaatgctgtagacaattgtaacacaatagtgagcatttgtatatctaaatttttctaaatatagaaaaggtacagtaaaaatatggcataaaaaataaaatgggccgtgtgcagtggcttatgcctgtaatcccagcctcccaaagtgctgggattacagcttcagccaccacgccaggcccatacgagtatatattttcttgtaaaagatt

SEQ ID NO: 50163 - DNA, 412 bp, Homo sapiens
ctcaggctggtcacaaacttctgggctcaagtgattctcctgtctcagcctccctaaagtgctgggattacaggcgtgagcccctgtgccctggcctgtcctctcttattgatggttatggtttaaaaatactgattccttatgttcctcatttgtagctaaaataatacatttaaaaggatactttattccaatattttataaatttccttttatagggtagattaaataattataatctggtactatttaagagcctcatatgttcactattccctgaaaaagtgaataaagtctctaagtctacttatgaagtttatggaaacacttaacttgaattatgtggctaggaacaaaattagaagtgtattgttaaaagataatttaaaaataaaattacagtacatgcaaa

SEQ ID NO: 50164 - DNA, 586 bp, Homo sapiens
tgttaattagctggaaagcaaagacagacaggatacaaatgttcctagaaagaaactagcatagtgtgacgtcagtactgttttcaacttttagctgctaccctttcctgtttcctgaggacatttcaacatgacttcgagcacagttaaagtgaactgccaaggttaagcgagctttccttccttacggaatctcccagcccctaattctataatactactcgcttagtttggctgtggtgaaacccaccttgtcctctactaaagatatggaacgaagacctcgtcagtcaatcttccatgatcccggccaccgcaattggctcaggtcgttgctgccatgaagtaagagtctgtctggaaatgaaggcgagcagaggccacaaagctgagacatggagacagagagagtcctgatgttattatttgaaccattgagtccagctgtgcctgaaactcttcagtgagccaagaaattcctttttggcttaagccaattggagtcgtgtttgtgatacttgcaaatgaaaggagttattgactaataaaactgccatttctatctctccaagaattaggaaatact

SEQ ID NO: 50165 - DNA, 445 bp, Homo sapiens
tgttaattagctggaaagcaaagacagacaggatacaaatgttcctagaaagaaactagcatagtgtgacgtcagtactgttttcaacttttagctgctaccctttcctgtttcctgaggacatttcaacatgacttcgagcacagttaaagtgaactgccaaggttaagcgaggtatgggcctcagagccacaatgcactgatttttctcttggtttctcaaagggaaggtatgtgaaaccacaatgggaaatacagatttccaagttttatttttatttgcatgcaacatatatttgcatgatcctttattcttgacatttttgcattcataatttcatttgaagttttaccagaatcattttaggtaaggtgggcatttatctttccctatctcatcagaatgagatatttgagcttagagagctactacaggtagtagtga

SEQ ID NO: 50166 - DNA, 796 bp, Homo sapiens
tgttaattagctggaaagcaaagacagacaggatacaaatgttcctagaaagaaactagcatagtgtgacgtcagtactgttttcaacttttagctgctaccctttcctgtttcctgaggacatttcaacatgacttcgagcacagttaaagtgaactgccaaggttaagcgagctttccttccttacggaatctcccagcccctaattctataatactactcgcttagtttggctgtggtgaaacccaccttgtcctctactaaagatatggaacgaagacctcgtcagtcaatcttccatgatcccggccaccgcaattggctcaggtcgttgctgccatgaagtaagagtctgtctggaaatgaaggcgagcagaggccacaaagctgagacatggagacagagagagtcctgatgttattatttgaaccattgagtccagctgtgcctgaaactcttcagcacacagaagacaagctttcccagccctttttggttagatggggcttggtgactccataccaatgggatgtgagcaaaagtgacaccgatcactcctactgaagcactgaagcgcaggagagaggtccaggctgccgaggagaccgaaggagtcctgtgttgtagatgtcctagctgttgccggtactgatggtagagcctccatcagcctggatccttgagttactgatggagcagaattccctcaacacatacatgcccaacttggacttgcaatggacatatagcatatgcaagaaataaactttttttgttttcggctttgggatcca

SEQ ID NO: 50167 - DNA, 702 bp, Homo sapiens
aatcagagggtgcattcaaatcttgctctgttgccccggctggagtgcagtggcacaatctcagctcactgcaacctccacctcctgagttcaagtgattctgctgcctcagtcacctgagtagctgggattacaggcacatgccaccacacctggctaatttttgtatttttagtagagaaggggtttcaccattttggtcaggctggtctagaactcccgacctcatgatcctccccgctcagcctcccaaagtgctgggattacaggcgtgagccaccgcacccagccctcaatgtcttttgcccttgaacgttcatctgatctggagttttaagtggttttgccaaaaagcgtgtcttttgacatattctcgatggtctgccatattcagggaaacgttaaaatataccacacttgaaagagtagtccggcgacactctcaataataaccaaacgctccccaccatgtctgccatccttcctccctggggcagagggcctgacaagtgacaaccccgctctctcttcctcaggccctggaccctcagggccccctcagttctggctgtggacagcagggacatgttgggttggtaggggtggagggaattgataaaatgtaccatattgacttatgagtggataatggttgtaaaaaaacctaaataattccaaataaaagctaactgttactgagca

SEQ ID NO: 50168 - DNA, 419 bp, Homo sapiens
aaataaaaagtagggaagagcttctccatgggatcagatcacagctttggggagtgggatggggcctctatgctttgatctatgcatgagctggggtgagaagttcccacctgcacctgactgcaatgactgtaatggctggaattgtcacctcttctccctgataggctcttcctcacctggaggatcggggctggtgggagggcagggaaggggaggccatcagccagaatgtattttctttcagttccatttcctgaggaagaacttgcttttaaaggaggaaagggacagaatcagacctaaataaaattcctgagtatgcaatatttctctttagtgtctcttcacctccctttctgagtttctttcctacatcctggctcttcattttcccaatgcccaatataatcatggtt

SEQ ID NO: 50169 - DNA, 629 bp, Homo sapiens
ctgggtcccaaccctcggtgccaggtgtgaaaggagcagcatggctggccccaccccctcaggccagggatggtatggtttcagggctcaagggcgagcctcctgcccaggcaggattgattccaatggtgggttggcttgagcttcagggtgaaggtctggagctaatcttgttggtgaagcctgaatgactggaggaggagctgcagaaccgacccctcagctgctgtccttcaggagcctctcttgtcccaatccagggccaggtgcctttcacacagttaattttcacaacaatcttaaatggcagatacttttgttatccccctttaacagatggggaaactgagcagctgagagaggactgagggggacctacccaaggtcacatagacaataaatgcagaattgggttctggacccagacttcttgggcttcagagcctgattctctccaggacacttactgctggggagacaggcacagacgtggagagaagtgcctcatgcttggcacgataagatagaatgaggctactgtaggaataaacgtgggcacactgggtgttacaggaacctggccacagagaaactgacctaggagggcttcctggagagagcaaccatct

SEQ ID NO: 50170 - DNA, 346 bp, Homo sapiens
tccagagtctacttggtcacccaggctggagtgcagtggtgtgatctcagctcactgcaaccttcgcctcccaagttcaagcgattctcatgccctagcctcccaagtagctggaattacaggtgcacagcaccacaaccagctaatttttttttgtatttctagtagagacagggattcaccatgttggtcaggctcgtctcaaactcctgatctcaagtgactggcctgcctcagcctctcaaagtgctgggattacaggcgtgagccactgaacccagcctcttagtttgacatacggttttagcggttactttttccatgaagctttcttcaactattccag

SEQ ID NO: 50171 - DNA, 386 bp, Homo sapiens
tctccactcgatagataaaggcaggagttcggggatccccaataggtagggactgcacctcaagtcagggtgacgcagttacagaagaaagaccatcagtcactctgtctcccataaagatttctggggatcatgtctctcgggggaaatgaggcaggagaatagggtctggaggcagggaacctaagttcgatgcatgctgactggatatcagaggctactccctttcaacccctcctttttctgcatggcagttgctgcctggcagttggaaatgaaagtacctcggattggttccctcccgcaaccaatcagactggttgcgggccactactttatgtgcatagagtgaacagatgggaaacccctggagggtatttaaaccc

SEQ ID NO: 50172 - DNA, 392 bp, Homo sapiens
agttgtacccctccatagaaaagacaaacttccatttaaacccagctttccaatcttggttaaatttgatgagtgccacacagaagaaataacaccgaggaggacattttcattccaatttgaagattctaaatgataagagcaataaaggcatttagtaaccaccaatttatacatatttctcctacttgaagaaccctaaactcattaaatcatttttagtttaattgtgagttataaatgaactcacataaagttgtttaaatgatttgctcaacagaaccaaaatgtgattctacataaaattttattagaatatacttattacaaaaatatggcatacttggccaggagcagtggctcacacctgtaatcccagcacttaaggaggc

SEQ ID NO: 50173 - DNA, 313 bp, Homo sapiens
aatggagcccctataactattcttatgggggatggtgagcaaaggccttactgagacctctttgtgagaacttaaaaactatgtgaagttaaaaactatgtgtattcatctagatcaaaatcttttttctttttggttagttatggaaataaaactttatttttcagtttaagtttacaattaagtaatatcataaaatagatattttagtttcttaaatcagcatttttctattacctgggagtttattagaatttttaccttttgagtttatgtagagatgagaagaacctgaactaaggcagagtcaagg

SEQ ID NO: 50174 - DNA, 244 bp, Homo sapiens
gggaggctatccctgcattttcccactacaatctttaatagttaggggaagattttcatttagttaaattctcttctttggtattcattcatttaaaatgtgccaggacgtaagcacactgtgacctcttcctataaggcggagcttcctagaggtgctgtgtggtcttgggggcacctggaacggcctacaggggtgccctgagttcttcatgattgcatgctttttgtagtggtagagtatg

SEQ ID NO: 50175 - DNA, 558 bp, Homo sapiens
tttttgtttcccatttctgagcattctctctgaattacagccgtgaccgccgtatcgcagcgtgtttgcccagcccggtttgagttgtaagctggtgaaatagaagaatccttgtgaaaatatgaacacacttttatttaccaaaggtaaatgaaacctttcactgttctgaagggtttccatttttctgtcttttgtctcctccctttgattacccataacattaaccttcaaacaacctggcaaatccaagtctgatttcccggcagcctcctccttcagccaggcagggcacctgttgcaggccctcttgggatcaccaggcagagaagcttccctgtgcttcacacccactcacgcctgtccccccgtcctgggggaaggcagttccaggctggcccatggtcactgtgaagcgctcctacttaacaatgcaagtagccatccctctgtccagctggctttgacagaggctctgccgccgcagcttcttgcccgtggctctgtgatggggaaaaaaggaaggaaaaatgcgttccacgccgagccctatgcagt

SEQ ID NO: 50176 - DNA, 277 bp, Homo sapiens
cctgggagcctcctggattgtgtctagtccccagataggggataacacgctcctcccagcctgaaggccatcctcctaagtactcacttggcaggcatcctggaaaatggttgtgttgtaaaggctaagttactcttctcagagatctctatttgacatgataaagaaaaaaaaagctcaaagcgcaaactgtatacaatccaacgtacattttaaaagatgtactagtgagtattttatatagtgggtcagattttcattctgtgagattcaaaag

SEQ ID NO: 50177 - DNA, 293 bp, Homo sapiens
gatttcaacctaagatcaaggtgacttatacgaacaatcccttttccctgttattcgaataagataattcttcattttgagatattactctgacttattttaacattgtgagcagtttttctcagatggagccctgccatgaggcataatcttgtaggcaattcttattgcctgaacaatcaccattttttataaacaagaagatgagccaagagagaagaaagtcatacaagtgtatttcttgcactggatttctaagtagcttgccccagtgccaccataacaggaccatt

SEQ ID NO: 50178 - DNA, 338 bp, Homo sapiens
aatacttgtactaatgaagaattgtgagctatcttaaaacatctggtattaatccagatatttcagtactacataatttccaaggttatacttctttcttagtaggaatgttaaatatacaatttcttgtcctctgtctgctagtttaaggtttctttcagtttgttcagtttgataaagaatcagtaaacttaattgagaagatgaatgttcaaaagaaagatgtatattaaacccagagaatgtctgaagtgagagctacataaccaattctggtagatgttagttttatattttcagatactcagaactgaattttacattttattattaatagc

SEQ ID NO: 50179 - DNA, 505 bp, Homo sapiens
gtctgtgtgagtccactttcttttttgttccctgctaggtagcacacagctgtgaggagcccaggactgctgcctgccgcagcccacctgtgcgctcagattcctaccagcttgatgagttagctgatgggccatttgtgcataccaactacccacagacatttctattacccaccctctggatgccagtgcattaatgattctagaattaggagaaaccaaagatcccttctctctccctcccacaaccagtgtcgtcgtgttcctagaaataagagtagaaacccctctatctgggttaaaacagcaaacctgccttctgtaactgtgcatgaggttcctctgtctcccacttacttcggattaacaccttcctctttccccttccctgtttgcagggtagcatttctaggtttaaggcaatatgcaaaaagacccaaagttaggccctggctcaaacactgtgggtagcagatttgaaataaatttaaattgcatgtttgtc

SEQ ID NO: 50180 - DNA, 1321 bp, Homo sapiens
  misc_feature (149)..(149): n is a, c, g, or t
  misc_feature (256)..(256): n is a, c, g, or t
  misc_feature (324)..(324): n is a, c, g, or t
  misc_feature (430)..(430): n is a, c, g, or t
  misc_feature (449)..(449): n is a, c, g, or t
tgtacatacattgattaataaaaacaagataattcttgactcacttattccagttcaggttcactggtgaccagagcttatcccggcagctcagggcacaaggcaggagccaaccctgcacaggccgccatcccatctcagggcacacncacacatatccacactcatactgggaccatgtagacacaccagttcacctaacatgcacatctttggatgtggaagaacagaatagttggagaaacccacacagatntggggagaacgtgcaaactccacacagacagtagccctggctggcaatcctttttttcctcatcagcnttataacaaagtaacattgaacaaaacagcactatctgtggacctgctgtaactcaacctagcctgataagtgaaatccaaaaatttaatcaatgaatgtgacacntagcttgtgtgcctatggntcctgctctgccatccaagtctgtttagtccacagcaggtgtggtttggtgcacctgctgtgatgtgtagaatgcagatgggaattagaactatgaatgcatgtgtcctcagagtcaaatgaagaaaatatttcaagtggattgatcatgtgtcaaatgctgctgctgattcaagtaagatgagaattagatttatcagtatgagtttggagcctcacagcatgatttaaaagagaatgaaaaacgaggaattgagatatgaatatcgaaaactcaagagttttccttaaagagaaacagagaaatggggctataggtagaaaggaatataggatttgagtttttgtttttttttaatgggaggatgtttatacattaatgggaatgcagtcaggagggaaaaaagactgaagagggagagttgctgaaacaacacttgataggccgtaagaagggatctgatgaacaaatggagaggctggctttaagtaggaatagaaacagtccaattccagtactaggaaggcagagtaatgggcaatgggggcaaagtagtggtggtggtggatggaaacaagtggaagttttctaattgctcccattttcccagcaaaataggaaacggggtcacataggacaatctctagtgcttgtaaatctaaggaaataaaaagacaaagatggtgataacataataatttgtgctgttgctcttcctaaaatgtgctctaatttttcagaatccgacctatccactaaagtccagctccagtctagcctgcttcaaagcatgatctctttttttcagttaaattcagattgtgtgaactattcatctggctcttggcatgttgattatctttaaaaaaaaa

SEQ ID NO: 50181 - DNA, 238 bp, Homo sapiens
taggtgagattacaggccagtgtcaccatgcccgtcatttttattttttatagagaggaggtcttgttatgttgcccaggctgttcttgaactcctgggcccaagcggtcctttcaccttggcatcccaagtgctgggatgacagatgtgagccaccacgcctgggggatttcgttttgttttgttttttgccctcattggatttaattcccgccgccaccctcttccccacacacac

SEQ ID NO: 50182 - DNA, 342 bp, Homo sapiens
gtaaaatgtacgtaacaaaacttaataatttttcagtgtacagttcagtggcattaagtacattcacattgttaaccatcaccactatctatctgcagaactttttcatcatcccaaactgaatgtgtactcataaaattttatgagtggcagctcttcaatttttcttttcttttcttctgcttcagataaccaccattctactttgtctgtctagaaacttgactattgcaggtacctcatatgagtggaatcatgtagtatttgtccttttttgtctgggttatttcagtaagcataaaatcttcaagattcatttatgaagcatgtgatagaattccc

SEQ ID NO: 50183 - DNA, 383 bp, Homo sapiens
tttcttttattctttcccagatcatgtgtagtatatgtgtagtatgtttgtcagatctgtgttctgttgggtgacttgaaatggaattccagggcttaaccttgagaatattatcagggaaaagaaatgggggtggggagaaccaactctcctattatggcttcagaaaaatgaatatagtttcccaagaaagttagtagataaattggggaattacaaagattcaccaaaacatcaatttctcttgcaaggtggagaatttgtgacggtgaataactgttctgtttcctgttattggaacttagcagattctaaatcttagggaacaggacctggcaacaactaggaatcctctaataggatttttgtttactaaatgattt

SEQ ID NO: 50184 - DNA, 439 bp, Homo sapiens
ttgagaattttatgcaattctgttttctctccattcttagcatatcaattatataacttttttttgactattttaatggttgccctatggaataaaactttcatttttcatattcttaatttagtctcacagataatggtttctggaaaataatagtagcaccaatctatttgattaggcatgcttatgtctatatgttatatgtatataaatatacatgtatatgtgcatgtgtactcatgtataagtgaaaggaatgacagcactaatagggagaacaaaagagttaagattattttgttattctaagatattcacactacctgtgagtgatacagtgttttttcaaaaaacactttttgagaagtatcttggattcattttaaatgtaatattgcaaactctgggtaagggttttggaccaagggcctcagttctt

SEQ ID NO: 50185 - DNA, 249 bp, Homo sapiens
cttgctcggtgtcatgcacgtggcttctaatattatgtttaaaatgctagtgaaattataatcctgttgtagtgcctttggaggctcgttcatcaacctgggcagtacgtgtgtctggcaaggagccagcgtcatcccctgcccccacctccatatgactcagcacacatcagacactttaatagcttctgattccaagtttgaacttgccccccaaatgaaaacctccctccccctctcccttctcct

SEQ ID NO: 50186 - DNA, 451 bp, Homo sapiens
ggaacccagcctcctccccctgccacacattgcccacattgaagaaccaaatcttctcctttacccacattgataaaaccaaatcctgggacagaagtgcttcaaggccgaaacagagagcccatctcttgtccacacagcatgggtagtcctggctgggtgcagaaagcacagtctaggggttttgagaaaagggagctctacctggaagagacatcctaaagaccctctcaccacactctggtttttcttcagatcgtgtaaatctttcaccttttactaaagaacccctgtgtccatcctcccaattccccctgccttctgctaccagcaaaaatttcactccaaactaaacctcaggaaaagctctctcatcctcctgcaggccagagaagcacctttccccacacagatttaggtatgcttatcaagatagctcctagacaagtac

SEQ ID NO: 50187 - DNA, 650 bp, Homo sapiens
aaggaggaaaaaataaaaaagtacagctggccctcatgagttctagctcctggaatcagaaactagaaaggggacaggacgcaaaacagttaccgtttcaaactgtgaagcagcaaggcctctggcttctgcatctgtctttcactctatgcatgctccccctgctccattactactttggcatatcctaaatatggccactccagccccagctttaagtggcttccttaagtcaaattgtgcccaacagaaagtgtctctctgtgtaactatattcctagacaatagagcaagccttcaaaattctgtgggaaaaaaaaaatttacctagaattatatattcagccaaactataaaccaaatgtaaggaaagaaaaaagacactatcatgagatgcaatgactcaaaaaaatttgccttccatgtgatcttttcaaagaagctaccagaggatgtgcttcagtaaaacaagaaagtgaatccataaaggggataaaatgacatacaggaaacaaggagtctaacaaggaagttctaggctggacacagtggctcatgccagcacttttggaggccaaggtgggaggatcacttgagcccaggagttagagataagcctgggcaacacagggagacaccatctctagtgg

SEQ ID NO: 50188 - DNA, 807 bp, Homo sapiens
gccataggcatatggtttgctttcatattcccagaaaaggacttaagagtcagaaaaggatgtgcatttcccataacccttatctctccctctttattaacagtatgataaagtactacaaatttttaagttctcaaggaatttaagaacatattctacataaattctaaaaacttaacaaattcagaatacaaccattattttgtgaactgttcattacagaatcccaaccccttaacctatctactatcagctccacctaaaacaattaaccaaaatgtacaattagaactgaaaatatttactagcaatctataaattcaataagataaccaaatttaatagaattagaaatttaaaataagggattctcctaaattaaaaaaaaaaaaaaccaaccatctcagtagtcagaattttcataagactctctatttttattcatacttcagttttaacaattaatttatgaaaatccttataggtcacaaatattttcacaaacattaggtcacctaacctccctcaaaagaaagtattaccaggccccttttatgagagactgagatatttaatttttacatgtcacacttacctaacagcatgaattaagaggtataggagggtctaaaacagcattcttcccacttcacattttgagcacttactgtaagaggtaatctacaaggtatgtattttgatttgatgtttcagaaatattgaagagtgacattcccatttattccacctatgaaatccatcccaagattaatccatgaatgttcccaagacaggagttagggaaac

SEQ ID NO: 50189 - DNA, 317 bp, Homo sapiens
caaattccctttctttgcatccacaatgtggggtcggagcttgggggcaggtcctgggagtgggaagcctcttccttgtgtctttcgctccacttttagctcatcgcaccaatattgcagacttggaaggaagcataagcttcccatttcacaaaggggaaactgaggtgcgggtgcgcgggcctggggacggccgtcccatggcttccatctgagccacctcgggaccccagcactcctggcgccctcttctcatcgcttggcctatgacaggtcaccgtgtgtaaatctttcccaataaagtgttgcacaaaaca

SEQ ID NO: 50190 - DNA, 428 bp, Homo sapiens
ggattccagtataggtttttagtccattactaaacttaaagactctttgaagtttgaatcttcgtcagagatttctttttatttttaaaaccttcagaacagtgtctggcacatggtacataattagtggagagaagtgcattagaaagctccaatccagaaatctgtaggatgatggggaagctggacagccctttgttgtagtctagtctttcatcaagcgtctatcaggacccacttgttgagttgtgaaagaaattgagtgagccaatgctgggaatttttaaataatagaatagaaaatatctgccaggcatgatgatggctcacgactgtaatcccagcactttgggaagccgaagtgggagaatcctttgagctcaggagtttgagaccagcctgggtagcatagggagaccccctctctt

SEQ ID NO: 50191 - DNA, 481 bp, Homo sapiens
acagttttgttttcatactactggaaatttatccgttacatatgcttgctttttaccgtttccacacttttcttcctcatgctcttttctcagatacctttacatcttattctgtggaaacattgtttctgattacatttttatgttcagaagtagacttttctgttcatattctgagagtcatctcatttattcataagttcttaattttgaaaggttagaaaataaaatatttaatatcgtaacatacttgctatgttgctgtaagtcacatagaagaaaacttattgtctttttttttcacattgtcatggatcaaggttgttagataaaatataacagaaaaaggataaaaaatgaaaaagactgcttacgccgtagtttgtcctatcttgtttatcacatgaatttcgtttagtgaaatggatctgttctaaaatgatatatttagaaccgtatctccttccctattgggtcaaaa

SEQ ID NO: 50192 - DNA, 393 bp, Homo sapiens
gtgactgaattcccacaaaatatgaagcattaatgcaacctgctttcctcatgtccatagttaatgtgtgaagaaggaatgtgcactcttttaaacccatttcatgccatcctggatttgggaaggatggccagtcatgtggggactttgtggcctcttcccttgtgcacctcgggttcaagccccagttctgcgcaattgcagccagagagtggaaagagccagcctgatgatgatggtgatgctaacgtgcttgctctgcggcaggcattgtgctcagtggttctgcgtgttattttaatcgaatcctcacaacaggcctgagccgtcggtatgttaataaccctgttttgtagattaaaaaattaaaacctggtaataatgaaagctccc

SEQ ID NO: 50193 - DNA, 2633 bp, Homo sapiens
tataggttttgagtagaaactattaccctcacacctggaaagagtaagttagatctactcttacttcactttcttatcctcattgtcgtcattatcactgaagatgcataacgctgtttaaagtctgaaggatgatacagaactgacggtaaacctctctgaaccatgtttaactgcctaaggctagacacgcagtgatatcagaattaatattgttttctttcaaatgaaggattctgagctgtggaccagagtgaggatgtgtatttatgggcttctaggtggtaactgttcttgtgtctaaaccttaattaacataacactctttcacacgaataaaactttcattcattatggttttggcccataaaagttgaagttttttgtttttgtttttatttttttcaccaaatcagccctacagcgattcctccacccccattagcaaataccgtaatatatgtctctagtaatcatcctctcacaattctgcttttcctaattttgccgtgagtcaagtttcttgaccacaatgttatgctgaggaagatctaatgttttccatggagcagaaattgttagtcctcaactccaaggtctgccttgtcaagccctgttttccgtgtcttcataaaccttgtcaggcatttatttattcagcacatatctactgttctctgcacaagaattcataaggatctgatgaattatgtcccttctgagtggaatttattcccttctacatttctgcaaaacaggaaattggtagtaagtcaatttgaaggtactatttagctggcacttctgccctttcttttttaacagctgcctctatagacagaacgttgaaatgaaaagatagggaaaattggcagaaacactctgcatgtaattcctatttagacagttttaaacctattttacaaatgataaacctggaatatagtagggagagatttggtgatgaaagaatctagatttcttaactccttattaatacgtactttaagtattggactacaaacttgcatatgtcactggtaatcattgaacacatgttatcatgtaggcactatcaaattggagcctataattgatgaatgagggatatcactactcatctacagtaaagggtcctgaaatgcagaaatatggaactggtgtgactgtatctttggatatttcaagagaagccagaatacatgaattggattcgtgtgtgtgtgtgtgtgtgtgtgtgtgtgtgtgtgtgtgtgtgtgtattgggcatgtatttgacttttaaactttttttttttgagagagtttcattctgtcactcaagctggagtgccgtggtgcaatcttggctcactgtatcctccacatcttgagttcaagtgattctctcacctcagccactagagtagctggaatacaggcacacatcaccatgcccagttaatttttgcgttttttttttttttgtagagacagagttttaccatgttgaccaggctggtctcaaactcctgggctcaagcaatctgctcacctcagcatcccaaaatgctgggattacaggcatgaggcactgcacctggccaaaatattaacaactatttttaaaggcagtactagccaaagaaaacgtgacctgatagagattgtgacttcagaagtttaaggttttacctcctaaaccacatgcttcatttcatattgcattttaactgatgcccttttgttttattctgtagcctcttccccttactctttcttcctcagtgtcttcatctgtgaaataggaataagaacatttattttttgccttcaaacgaccaaggattgtggtgcatgtgaagattaatgaggtcatctggttaagctcttctccctgggtggaagaacaatggcttgtgaatactaagtggcatttgaatcatgtgtgctttcatggaaagagagctggtccatttagctccccgtctgcagggagttataaaagaagaaactagggaggaagaagctgaaaatatttcttcatgactatttcctctggtgaagcataaagtagcaatgagaattctgagatttgtttgcgtgatactttagtcatgcaccacataaagatgtttcggttaaggacaagttacatatgtgacggtggtctcataagattataatagaaattaaaaattcctattcctaagtgacatcatagttgccataacatcacagcacaatgtgttactcacatgtgcgtgatgatgctggtataaacaaatctattgtgctgccagtcatatgaaagtatagcacatacaattgtgtatggtacataatgctaatcatgataataaagattatgttattggttgacatacttactatcctatatttgttattttagaatgtaccacttctacttataaaaataagttaactataaaacaacctcaggcaggtccttcatgagatattccagatgaaggcattattacagagatgatagctccatgtatgttattgcccctaaagacttctcgtggagcaggatgtgaatgtggaggacagtgatactgaacctgaccctgtatatgcgtggattaatgtgtgtgtttgtgtctttttaacaaaacagcttaaaaagc

SEQ ID NO: 50194 - DNA, 333 bp, Homo sapiens
agtcaggaatgacccctccccatcagtagtatgttgaccaccactatcatccctaacctcagtcactcatccttcatgtttctgatgggcagttaccatactctgattagtggtatagatcattgtaccttctttagcctggttgtttcctgaagatggaaccgaggccgggcgcggtggctcatgcctgtaatcccagcactttgggaagccaaggcgggtggatcacctgaggtcaggagttcgaggccagcctggccaacatggtgaaaccccgtctctactaaaaataaaaaaaattagccaggtgtggtgatgcacgcctataatctc

SEQ ID NO: 50195 - DNA, 444 bp, Homo sapiens
gggtgaccaaaaaactttactgacaacttctcaagatggctttgtaagaagaccctcttgacctcctccctggagtatccatttatgagaacaccaggcatcccagatgcctcgtaatgagagtggtccggaagggatactagatgcccgtgatgatccctggagcaagttattactaacttgaaactaagtaatctactcctgcacttttaacaagcctcagagtgcttcattcattaagagttcagtggcatcggttaattagtggtttcctgaaagcctactgaacaaaaaactaataataattacaccaggcatctccccaggagttcaaagtgccctcagaagagtttctcatttactcacttgcattggctttaattttttttttcttgaaacaatgtgtaaataaatattcaaagcattaaaatttcattatagttc

SEQ ID NO: 50196 - DNA, 255 bp, Homo sapiens
ttaaaatctagtttaggagcatctaacttcacatgctgaaattttcttttgaaatttcctttgaaacccccacactgcttgctctgtagctcatggaaatcacttacttcataccatgcttcattgcaaacctgctttggtttgcttataagtccctccatgaattcagtggaaatgtctctcccagagaatgtttttctcttaaggtctggtccatggtactttatttgatgtccttattagaagacatctaga

SEQ ID NO: 50197 - DNA, 1017 bp, Homo sapiens
ctcatcctcgagccccactactcagaggagctgggaagaatttccacccttcctagtggcaagtctcactgtgagagcggagtgccaccaggcaaacagggcagaaagactgctttaaggagaatccttatattgggggttatgaagtgcaatacaccctcatcctcacgctaacactggtaccatgtagcccaagcttgtctaacctgcagcccgcgggctgtgtatggcccaggacagctctgaatgtggcccaacgcaaatttgtaaactttctaaaacattatgagatttttttttctcatcagctatcatcagtgtgagtgtatgttatttgtgactcaagacaatccttcttttccaatgtggcccagagaagccaaaagactggacacccctgatgtggccctttcatccatagtagcctattttgtcctaaagacggtcttgtgcagtgagtaggccaggcctccccactaccacagtttacaggcaaggaatgtgatatttcataggatgaccctgactggcacctacattgctagccaaagaatggcacaaagatgtggacagaagagacaaccttaagcagctgactgctggctcctgcaacagtatcatcatggcatttgtcctggggtcccaaggaaagaaaacaaatctgtggctgaggaacagactgagttgacaaagcagcttccacagtaacacaaggacaaagggtgtatgtagatatgcacgtggtagcaggttctactaaaggaacctggaccgaccattctcactcacattctttgggagctgtattctaatactttcagaaaagccatgggaacacaccagagtgactgctcgagtaaataagtagcataaacagcaagccaaaccattgatgtacacatcactgggcccaatactatgaaatcccacataagaaacttgaaagtgaaagctggaattctgaggatactggttttgcttaataaacagcatttcaacaggtgagtcaacttagta

SEQ ID NO: 50198 - DNA, 271 bp, Homo sapiens
tcaagcgactcccttgctttggcctcccaaaatgctgggattataagtgtgagtcaccgtgcctagccaaattcttaaaactacttatccaggtccacaaacaactcaagcaccatattttggatttttcaaatccgattaaattcattgtttatccattggaagtacactgactttgctaatatcaaaatggctaaattttaccatattttccctgttcattccaagcacactgaattcatcaactatcagaattctcaaaatttacatg

SEQ ID NO: 50199 - DNA, 337 bp, Homo sapiens
  misc_feature (7)..(7): n is a, c, g, or t
gactctncagacagtgggcccatcccatgcccgagcccatcgctgtggcagttttcagaaagggaagattaagtgttggtagagaccacaaattgtgtctactctaatcctctattaatagaacatcatgatgataatagtagttactaattattaagccataatatgcctagacactgtgccaagtacattgtatgtgtggtctcatttattccttaagtcaagcttgcaagggatttattacatctattctacatatgagaaactggagaggcagagagattaagaaatgtacccaagttcacgtagcttgtaagtggcagagggtaggattcaa

SEQ ID NO: 50200 - DNA, 697 bp, Homo sapiens
agtactaggattacaagcatgagccatcatgcctggcctggctttcttgattataagtgtgtttgtatagaaaatcacaaaacaggcatttgtaggtatatgctagacttagttctgcttccttctccccttccccatctctcctctgatggaaaggcagatcagagctagagggaaaatgaggggtagcgttcaatctcagaattactctgtcaccaaggttcctcttccaatcttttaagagccagtaatcaagtaaagatatactgtgtatatataaccatataaagatatacacaatgtttagagatacgctgcatatccagctttgctggcaccaaagtgaagaagagatgaacagaggaaggtctattccctaaggccacccatccacctgcctgacaagaactgggaaataagaaactgctatcaaggcatgtccctgttacatgtcagacccctccacacactcccacacttccgcagcacttggcacctgctgcagcaagaaaaatgcccaaaagccaactaaacaagcagtagcatttgaaggataaggggcccaatggctgggaaactgctgatgtgagaaagaccgcacagttacactcacatttgcagcaggtagtagagcgccatgagcagcttaataatgaaattttcctatagccttaagggagaaaataaaaacctgcag

SEQ ID NO: 50201 - DNA, 481 bp, Homo sapiens
ccgtacatttccaaacacctgctggggaagtggtaacacctctaatgtgagccaatccatgagtacaaaggcttaagagttttcctactagctttctcacgatgatgggcaagttgggtacaggagacacacttctcttcctaaagtcattatcatcttcaatatatttccttccttcatctttactttcatttttatgaaaatatggccatcagtgttatggctacctaaaatatggaactgaccatgttactccttcatgtcaaacccttcttcgaatgcttcccaccaaagatttccaagatagaccactatgtaggagagaggaaaaaaagcaaaagcaaaaacttgagcacacgataaagtacagcaaagtgtatatgattccacctttttaaaaagtaaatatccttacagtggtatagacagtttcgaagaatacacaagaaatccatcctagaaagattgggggtccagggtt

SEQ ID NO: 50202 - DNA, 286 bp, Homo sapiens
ggcagtcagggctcaggcaggcctggctcaggactgtgctgagacggtgacctaacttgtgatgggaagtggtgaggatgggagaggctggctgaggtcaatctgtaaggtgaggagagaggagccagtggtcagtgcacaatgtttaaaatacacaacggccgggcacaatggctcacacctgtaatcccagcactttgggaggccaaggtgggcagattgcccgagaccagcctgggcaacatggtgaaaccccgtctctactaaaatacaaaaattagccagg

SEQ ID NO: 50203 - DNA, 475 bp, Homo sapiens
gtgtttgccctggggttcttcttcctattactcccctacttatcttacctccattgtgacgatccaccctcaccatcgcctgggaagagaaagtgtcatcttgtctcctcgcgtcatcttgtctcccagtgtccagtagggcagagggggatgcccagaggcaggatgaaaaaccacagtcttcagagcttgtagagagtgcctgagaggcctggaggagacttgggacctgctttcacaactgcagagatgtggcttaccagtggattctagagaagaaagtagacaggagcaagtgcccaacacagcaaaagctggaaagaaaaagaaaggattatgttctctacccaaaacatttcagttaactaagtgtgagtttaaaatctaaagagaacgttatcagagttattaagaatgagaaatatgtacgtacaattacaatacaaaattactattaaataattaacacatggca

SEQ ID NO: 50204 - DNA, 411 bp, Homo sapiens
gttattcctcaactaaatatttctaaatgagtctgaggtctgttggccttcaatctctaccaaaacccagagaacttgatgatgcctttgttttcagagaatccttccagtgtgctggctgacagttccatgaggatggcaaaagtgaagaaattgtagcgccagtaaaaaagagatggatacacttcttgggaattttttaagctatgggacatgatgaattaatggtgcatgagtatactcttcactgtgaaagtttttgttttcacatctttcattagatgtgtgtaagaaaaagatactgaacgtagtatctactaacccaataatgaaaaggaatgccatttgctatttacactttattactaaaataaacctaaatttaattaataaattttggaaacatacttt

SEQ ID NO: 50205 - DNA, 563 bp, Homo sapiens
gtgtttgccctggggttcttcttcctattactcccctacttatcttacctccattgtgacgatccaccctcaccatcgcctgggaagagaaagtgtcatcttgtctcctcgcgtcatcttgtctcccagtgtccagtagggcagagggggatgcccagaggcaggatgaaaaaccacagtcttcagagcttgtagagagtgcctgagaggcctggaggagacttgggacctgctttcacaactgcagagagaatccttccagtgtgctggctgacagttccatgaggatggcaaaagtgaagaaattgtagcgccagtaaaaaagagatggatacacttcttgggaattttttaagctatgggacatgatgaattaatggtgcatgagtatactcttcactgtgaaagtttttgttttcacatctttcattagatgtgtgtaagaaaaagatactgaacgtagtatctactaacccaataatgaaaaggaatgccatttgctatttacactttattactaaaataaacctaaatttaattaataaattttggaaacatacttt

SEQ ID NO: 50206 - DNA, 1029 bp, Homo sapiens
cccagtcttagtgggggtttcctgcaatttcttgggtttaccccacaaaatttctaacttccagaaactccacaaggttcttatggtgaagatgcaagaaaaattccctcctttttctggtaggagtagagggaaggtaaaatttggaaatacgtagcagagtgttcacaacaaaaggcctgccctgtaaggaaaactaattcaacaggcccttatgtgacctgggggaaaggcaaatagaggattctagcccttccttagccttcttgtctcatttctgaaagtcacagcccagggattcagacccactaaaaaaaactgagatttaatcataaagattaaaaaacaattcccctccccctccccaacaccttaccaccatataaacagggctccaggataaaataacagtggattacaactgagagagctgcaagacacaagctgtttaaggagctcttaggaaacccaaaaacaacagaagaaaaagtaaataaaaacaaggaaactagaggaaactgaagcctccagtacctacaattatggcaaacattaaatacagcccagctcctagccagattagcatgaaacctcacactaaaagtctaattacttcagttttgatatatcaatcatgtccagctttcagcaaaaaaactacaaggcatgctaaaaggcaagaaaaacccacggtctgaagagacaaaacaagcatcagaagcagtcctcagatatgacacaaatatttcaattatcagatagggaatttacaatacctatgattagtaggttaaaggctccaatggaaaaaagtagacaacatgcaagaagtgatgtacgcagagagatggaaactctaaaaataaatgctaaggaatgctgtaaggaaatgcagaatgatgttgatgggctcatcagtagactgagcacagccaagcaaagagtcagtgagcttgaagatagataggtcaaaggaaattcccccaaactcaaatgcaatataaacatagtagacattaatccagctgt

SEQ ID NO: 50207 - DNA, 379 bp, Homo sapiens
tggggcagcatgaacggtgtccatgtaagatggtgaacttagtccagttgtctgtgttctgactgctgtactgactggccattcccacaactctctccttttcctcagacctccctattccctaagacaacagtattgaaattaggctagttaataaccctacactgctctctaattgttcaagtgagaaagaattacacatctttaattttaaatcagaagttagaaatgatgaagcttattgaggaaggtgtgtcaaaagcccagataggccaaaagctaggcctcctgtgccacacaattagccaagacatgaatgcaaaggaaaagttcttaaaggaaattaatagtgctaactccagtgaacaaacgaatgata

SEQ ID NO: 50208 - DNA, 318 bp, Homo sapiens
attatttttatttttttctgattttaaaagaaatttaaatattttatgagtccctaaaagtgtcttgggcccaggcacggggccttctcggcctgatgggcgggctggtcctagttcttcctttcaggcctcattactcctttccctcctggaaaggaggaattccctcttctctctcccctccttgcctctcctggcacccctttctgcagcgagcagagatgaaggcagagagaggatagagaacttgccttgaagcctgaagactcgagactcaacacagacctctcccatttccatggtgaggaactttgagaa

SEQ ID NO: 50209 - DNA, 320 bp, Homo sapiens
taaaaatatgataaatttgataatttttatcacatttgataaatatgatgtctcaaatagagcattatgaatttaagtattatgtgcaggtatggtgtctgtgctaataagaaatttgcaatgaataacctgatggaacaagattcttaaaatttattgaactgaagtagaatgtatcttctggcagttatacatttatgatataatgccatcatgaatggtatggtgaacatcaggctaagtgttccctgggtacagaaaaaaatcaaaccagaataacaaaggctggttaattatagtagtttctttcaaaactgaga

SEQ ID NO: 50210 - DNA, 320 bp, Homo sapiens
attagcctgttgatgtggtggattagggttacattagtagattttagaaccagccttgcatacctgggataaatctctcctggttatggtgaataattccttttctacattattggattcaatttactaatattttgttgaggatttttgttacctgtgttcatgaaagatactggtctgtagctttcttttcttaccatctctttgttttattattattagagtaaggctgctcttttagaataagtcaggaaatgttccttctgtttttattttctgcaagagattgtagagaattggtatcacttttttccttaaat

SEQ ID NO: 50211 - DNA, 374 bp, Homo sapiens
gcactcggatttttttcactcactcctttactcacacaaatatattgggcatctataactatgatagatagatacagtaggaagttggagtgatgagacggaattgtcattgacaccagctgtcccctttggaaacatctgttgaattagccaaacaagacatctgtgtcagaacagatgaataacaagggcagttgatgtgcctgagttagtggtaaagctattaagctaagtaggacttcagaatgggagatgataactggagattccttaatgagatgagactggaattgtacctccaggcatatgtgatatttgtctagacataaagacattaacatgtacggtgggaatggagtgaacacttattgact

SEQ ID NO: 50212 - DNA, 303 bp, Homo sapiens
aaaaaatcaacctggtatggtaacacgtgcagtgataaactcattatcactgtataggatgttgtcagttaggcttacttagtactcccagctactcaggaggctgaggcaggtggattgcttgagctgtgatcacaccactgccatccagcctgggggacagagtgagaccctgtctccaaaaaaaaaaaaatgaagttctgattctacaatgtggatgaaccttgaaaatacatgttaagtgaaataagccagtcacgaaaggacaaatattgtattttttccacttaggtatctagaatg

SEQ ID NO: 50213 - DNA, 350 bp, Homo sapiens
cccgaccatcttttattttttttaacctattctttgttattgctctaaaatgcaggcaaaatcagttaaagaattcttactgccttttttgagaagcttgaataaggcagtatccattttttgttgactcctaaaagtaaactgaaaagtgaaaaagcgtatatatgttatatcattattacagtcacaggaggaccgctcatggtggtccagcagacgtgcatgcaccatcagcagtccttcgagtgcttgaagaactcttggttgtttagtgctgttcagcttttggtgattacttgcttgtattgttaatcttagacctgatggcacagtatcctctgtggtctctt

SEQ ID NO: 50214 - DNA, 1283 bp, Homo sapiens
cgtatttttaactattccaagaaggaagaggtagctaaatgtaatcccctcttcctatccccccagaaaactgaactgtaagttctaggtagactaattgggagcagacacggagttttagatgccttagccaaacccagcagaaacctttcacacagccactcatcgtaagaaacgcagatttttctcttctcatgcttgtctctggttccctgcatttgtagtgacagaactttcactagcaggatataaagaaagtaattatgcttggagtccctctttactgggtttgagttaggtgcataacatggaaaggagtggtgccttcaaatgaatgtgaccactccgtattgtggagtgacttccctagggcatcctatacatcctaccacagaaggccaagggacagagcaccaacttcagtatccaagaaattagatccacaactcttgattttccacactgaggactgtcgcgagtaagttgtaagtttgccgtcttccttctggcttagcaggtgctgcagctgtactctcgactcctgtctgtgagcgtgagctcaggaaatgagagtggagtctattccaaaaaaaaaatgtgatgaagtttttcataaaagtgcattcatatgccaaatccttttgggaggattctggatgctattgttcatttctctactagtaaaatgatcaagccttcatttattttaggctttgttttttgatccattttgttttccctgctgtaatgagaataattgtttggaaatgtcatattctgtatttatgattctctgagaaatgcttttgtataagtcttaggtttgacattgcagtagttgacatacacggtaaaggataacctagtgacaaatcactgaagatgcttcctttgttacctcaaaaaaaaaaatccagacaaaatagcatttataaatatagaaaacaggattggctgttttccaagaacttcaagttaacaattcttatgcaaggaaaagttcttaatgctaaagacttgttctgcatgaaggagacattctttaataatggaagaggtggttttatttttactacaagccgactcatatttccaaacctataaccaattgctgatctcctgtgtaaagcatttttttccttttatctgaaacagtgatttatatgaactgttggaataatggaacctcaaactacagatgtgtatgtaaaattgcataaatgcactgacttccttctccctgactatatttttaataaacagcattatcctaaaaaaaaaaa

SEQ ID NO: 50215 - DNA, 1035 bp, Homo sapiens
ggtactggctcgtatgacaaggtcgctgactgggactgggtttgagttaggtgcataacatggaaaggagtggtgccttcaaatgaatgtgaccactccgtattgtggagtgacttccctagggcatcctatacatcctaccacagaaggccaagggacagagcaccaacttcagtatccaagaaattagatccacaactcttgattttccacactgaggactgtcgcgagtaagttgtaagtttgccgtcttccttctggcttagcaggtgctgcagctgtactctcgactcctgtctgtgagcgtgagctcaggaaatgagagtggagtctattccaaaaaaaaaatgtgatgaagtttttcataaaagtgcattcatatgccaaatccttttgggaggattctggatgctattgttcatttctctactagtaaaatgatcaagccttcatttattttaggctttgttttttgatccattttgttttccctgctgtaatgagaataattgtttggaaatgtcatattctgtatttatgattctctgagaaatgcttttgtataagtcttaggtttgacattgcagtagttgacatacacggtaaaggataacctagtgacaaatcactgaagatgcttcctttgttacctcaaaaaaaaaaatccagacaaaatagcatttataaatatagaaaacaggattggctgttttccaagaacttcaagttaacaattcttatgcaaggaaaagttcttaatgctaaagacttgttctgcatgaaggagacattctttaataatggaagaggtggttttatttttactacaagccgactcatatttccaaacctataaccaattgctgatctcctgtgtaaagcatttttttccttttatctgaaacagtgatttatatgaactgttggaataatggaacctcaaactacagatgtgtatgtaaaattgcataaatgcactgacttccttctccctgactatatttttaataaacagcattatcctaaaaaaaaaaa

SEQ ID NO: 50216 - DNA, 1225 bp, Homo sapiens
cgtatttttaactattccaagaaggaagaggtagctaaatgtaatcccctcttcctatccccccagaaaactgaactgtaagttctaggtagactaattgggagcagacacggagttttagatgccttagccaaacccagcagaaacctttcacacagccactcatcgtaagaaacgcagatttttctcttctcatgcttgtctctggttccctgcatttgtagtgacagaactttcactagcaggatataaagaaagtaattatgcttggagtccctctttactgggtttgagttaggtgcataacatggaaaggagtggtgccttcaaatgaatgtgaccactccgtattgtggagtgacttccctagggcatcctatacatcctaccacagaaggccaagggacagagcaccaacttcagtatccaagaaattagatccacaactcttgattttccacactgaggactgtcgcgagtaagttgtaagtttgccgtcttccttctggcttagcaggtgctgcagctgtactctcgactcctgtctgtgagcgtgagctcaggaaatgagagtggagtctattccaaaagattctggatgctattgttcatttctctactagtaaaatgatcaagccttcatttattttaggctttgttttttgatccattttgttttccctgctgtaatgagaataattgtttggaaatgtcatattctgtatttatgattctctgagaaatgcttttgtataagtcttaggtttgacattgcagtagttgacatacacggtaaaggataacctagtgacaaatcactgaagatgcttcctttgttacctcaaaaaaaaaaatccagacaaaatagcatttataaatatagaaaacaggattggctgttttccaagaacttcaagttaacaattcttatgcaaggaaaagttcttaatgctaaagacttgttctgcatgaaggagacattctttaataatggaagaggtggttttatttttactacaagccgactcatatttccaaacctataaccaattgctgatctcctgtgtaaagcatttttttccttttatctgaaacagtgatttatatgaactgttggaataatggaacctcaaactacagatgtgtatgtaaaattgcataaatgcactgacttccttctccctgactatatttttaataaacagcattatcctaaaaaaaaaaa

SEQ ID NO: 50217 - DNA, 1545 bp, Homo sapiens
atatagacaaatatatagaccagtggaatagaacagagagtccagagataaaccctcaaatatatggtcaagtaattttcagaaaggatgccaaggccattcaatggggaaaggacagccttttcagagtggtgatgggggatctggatagccacatgcagaagagtgacattggacccttataacatattcaaaaattaactcaaatggacaaaaatataaacataagagctaaaactttgaaattcagccttagtttgactgctagaacaaagtaccgtagaccgggtggcttataaacagcaaacactgatttctcattctggaggtcagacatgagagaccacagtgccagcacggttgggttcggatgaggccactcttcccggtggcaaactgccaccttctcttgtggaaagagcttgctagcctccagcctcttcttataagggtactggtcccattcatgaggactccaccctcattacctaattacctagcaaagattccacctccaaataccataacattggagtatttcccatctccccccaaaaaagtgccaaatggtctgatgtaaaaggaaaaaaattcagtcactgtgctccagatctgcaaattgcacatcttgattttcagcaccataaagacaatcatttggaagatccggtgatattttttctctttaatgcaaatgttttggtgtcaagcagattgaatttgtggggagttttcctgttagtgtggctgttcactgaccattcagaaggaagaaaatgtgaaacagattgctcaagtgtaaaggagtctgaaaatgtctgtcctcaagcctgcaagatttggaaccgttctgcgtcccttttccatagatataggaataataagtctggattcagtagagtcatttgaccagccagcccctcagggtggtccctgggtctgggcagccatgctctccggagctgcccttgggggcaacttccagggccaagccagagaggccagagctctagactaacgttagagttccaagtgtacgcagcagagaagacagctatgctgttgttgtgtgtgtgtgtgtgtgtgtggattgtgccttctgtggatatcggctagggactgtctcaggaaagcctctgcctttggcgtgtttactgctgtcaaaaccctgcccacagccttatagaccccaaagaaaaatgttctcatcctactcagagatgttcaaacaggagtgattgtctgacagtgactacactcacaggagaatgacaaacagcaaggcccagctgtcccttggtaccctcaggggattggttctaggacctccaaataacaccacagtcccagcatgctcaagtcccgcagtctgtcctgctgaacccatggacaaaaaaggtcggcccctccgtatgagaggcttttccatctcatgaatacacattgggttgaaaaaaatctgcgttttagtggaacagccaggtttaaacacatgttgttcaacggtccactgtattcattcacaatacagatttcattttagaa

SEQ ID NO: 50218 - DNA, 801 bp, Homo sapiens
agggctcctggagggcacttcctaaatttgacaggtttctttataacagcaattttgcagttgttttctagagctttatcaaatttgacttctaaagctcacttttctactttagagaatgatattaagaatccctgattaaggacaataatcttcacaaactaaaaagccatccttatattcaaacatgctttaaaatgtgagcagtattctaaacttgctgcagacaacccatacaatcacatgagttattttaagaaaaagactcagttagacacatctacagaagctaatactaacgtgctgttcttccaatgaaaaggttactgacctattcagtaggagttgtcttttcctggcagagatggacagatttgccttgtccttatctcccacccccctgctgtgtccccataatgagcccatagctacatgtgcaagacagctggcaagggggagtcagggtctggtgccatgggccagagcaaagcttaccagtcaacccagagcctggacctatgaccgatgtctcattaacaccttgctctaagcaactgagctgccacaaaaatcaacagtggcttaagcattttgtttacaagtgaaacaaatcaggtcaatctgacaaccaatagttcaagcagccactagaaaattgccaaaaggacacaaaaaccaatagtaagcaggagtgataagggtcttgcagtcctagcttgggaggtagccacacaagcaaggatgagtatggaagggaatgagactgtaataggcaggtctgtttctaacatagccaggcag

SEQ ID NO: 50219 - DNA, 231 bp, Homo sapiens
gccaaaagtgactttggaaaacttttctgtcattacatattcaaaagaagtatacacttttaaccccaagtaaatagctgacctaaaatgaaataaaggcagatgaaacacattccccttaatgtaattagtaatagtaattgatatgtttcatctcctcaatattgctgtcaggggacaagggatccatttacaaagttacattccgttttgacatctgacataaatggg

SEQ ID NO: 50220 - DNA, 320 bp, Homo sapiens
gctcagagagccaaggattgtaggcacaaaagcataccaactggcttttatgttttcaaactcagcagagccaatgggaccagaaaagtagagaattgttcacattcatcaaaagttgactcatgtcttttgcaccaattctgttctccagttaaaatcataaagagtcaaaggcaaaagaaatgaagctcatcattttacagttgtgggaactgagaccaagttagattaaaatgagttgctgaagtttgtgtgtttgacaaatatttattgagccccaacatgcttggagctgggcactgtgctggagcctggaattt

SEQ ID NO: 50221 - DNA, 325 bp, Homo sapiens
ccgaggtggacagatcgcttgaggtcaggagttcgagaccattctggtcaacatggtgaaatctcatctctactaaaaatacaaaaattagctaggcatgatggtgcatgcctgtagtcccagctgctctagaagctgaggtagaattgcttgaacctaggaggcaaaagttgcagtgagctgagattgagccactgcactccagcctgagtgaaagagcgagactccgtctcaaagaaaaaacaaagttttcaacattgttgatcttcagaagctcaggctcctagaataccagattgctaaagacttcttagtcttgggcacc

SEQ ID NO: 50222 - DNA, 683 bp, Homo sapiens
ggcaagctgctgaagctctctgtgccttaggtttctctcctttatgaaactggcaagtttggaaggttgtggcaacatttacatgagataatgcttgacaaggaccttgagccacactgggacatccagggtaatgacccagtatctccctaggagctgcctgcccagtagtagcagtcagaaagttttcctataatggcaagatttgaagcaggaaaacctgtgaggaagttgttggcttcaatagaaattataaaattattttgctgaaagtttcatttaaaggtgtcactttatggaaaaaggctaccgattcaaaacaaagtttcacttccaattataatccacatttaatactgaaagaatattgtctaaaggtaattttgcaataggtttgaatgtagcctgtctcccctatttaagtatatctccttccttggataaactaattttttttttcttttcaatgtggtctaggcaggttaatggagaaactaattttattagctctctctggccttgttcttcacagcagtatccattaatgcacataaaagtagttgtaaaattcccaatactgcttttctcttcgggcctgtttgaagcaacactttccccaggacctgaagcaattggttgagaatccctgaaaattctcttgggcctatcccacatcaaaaaaa

SEQ ID NO: 50223 - DNA, 357 bp, Homo sapiens
catgtctatcatctggattctacaactaacattttattgtatttgctttatcacatacctgtccatgcagccattctttgcccatccctagcccatcttttcttaggtgtatttcaaagtcagttgcagacatcggcatacttccccctcacctactttagaatacatgttaaccagagagcaatgttgtttgtggttctgtttttcctttttgaggcaaaatttgccttcgatgaagcacacagatctttggcgtactatctgatgagtttaggaacatgcacacacctgtgtaactcacagccttatcaagataggaaaatgccaggcatggtggctcacgcttgtaattccagc

SEQ ID NO: 50224 - DNA, 606 bp, Homo sapiens
ttaaaccatcactttttcaccatttcatactacttgctaatggtttatacttgtcctgaaattttatatgcttatccaacaattcttgccagtgtccatatgcaagcagacaacagtatccatgcagtcaggatatggatttaatgcataatctgaatttcatctctgtgtttattgtcttctaagtacccatgggtagaagggacctctagaggatgataggaggtttgttcttcccagttgaaaggttttcggtgttattgaaaaattcagtgtgttttccttagtattttctggatgactattattattttatctttctaattcactagttatcattgaattttttccactgaactatggaaacaggtgcagcaagtgggtcctttgagcctttaccttccttttgagacatttcggaaccagtctctcaaggctgggtctgcaggaacactttgaatctacaagtgcagattgtctgtattgggattagagtggaaggaaggcatttggaagagggaacttagaaaatggaatgaaggaaataatcaataaaacaatttaagaaaatttctcagaaccgaagattctgtaatgaaagggcct

SEQ ID NO: 50225 - DNA, 211 bp, Homo sapiens
gtttccatcctaagtggatttatgttccatcccttcatgatgcttgcctacaaggaaggctgtattatttggaatgtattatttgggtcctggactgtattatttgggtcctagagttttttcaacatgttcatgttgatggttatgtcctttgatttcactgaggtcattacaagaagcgtctagatgaagatgattaagaagcttctgc

SEQ ID NO: 50226 - DNA, 460 bp, Homo sapiens
aagaaagcagagaccattttgcgaagtcagttgagaggcatggactagtaaatttgaagaaattgtggtgacatgctatgctgtcttacactgtgtggtaagttggaggttccatagagctcaaagctttcactgcattccactacctatctgacacactgggtcattttaacagacaaaggtgacccaggctacttttggggaattaaaaaaaaaaaaaagatactaactaacagaatttgaagtttgatctgagaaaagttccagatcaaattgagatgtgtggaatattcatattccgtaatcttcattgtgcagtcatttttatctccagttaaattcataatactcttctgttttcagaagtatttcttgtgatagggtttggctgtgtccccacccaaatctcagcttgaattgtatctcccagaattcccacactttgtgggaggaacccaca

SEQ ID NO: 50227 - DNA, 832 bp, Homo sapiens
gcggccgcgccccccaacgctccgggaggccccccgggcccgcagccggcgccaagcgccgcagccccgccgccgcccgcgcacgccctgggcggcatggacgccgaactcatcgacgaggaggcgctgacgtcgctggagctggagctcgggctgcaccgcgtgcgcgagctgcccgagctcttcctgggccagagcgagttcgactgcttctcggacttggggtccgcgccgcccgccggctccgtgagctgctgagggcggccggcgcccgcccggcgtgccggagaggagaaagggcccgactgcccgccggaccctgcacccagcgactgggccccgcgcgcgccctccgcgagggtggaggcggcggctgtgtgcgcagggcccggcaccggactgggaccctggcgtccctccaggccttgcctcctgcgggaggacagtttggcttcacttctctgaccccagcctcggccgtaaagtgaaagagaccggaccagcttcagctttcggactctggttcttggatcgtgtcctctccccctcgccgccctcttcccccaatctgagccattgcaggcctctgcctgctgccccctctctcctcgggatcgggtccccagagccaccatctcctgagcctcccaccccgctgcctgggccctgtggttgctgggcctcccacctcaaggaggggaaggttgtacagcccgaacccgtggagcaatgccctgtctggcctccaaaaccaaaataaaactgggtcactttacaaacagaacaagacaaccgggggacacacaagacagaggggaaaaagaggcaagaa

SEQ ID NO: 50228 - DNA, 507 bp, Homo sapiens
  misc_feature (4)..(4): n is a, c, g, or t
  misc_feature (18)..(18): n is a, c, g, or t
  misc_feature (32)..(32): n is a, c, g, or t
  misc_feature (40)..(40): n is a, c, g, or t
  misc_feature (42)..(42): n is a, c, g, or t
ttgnccaaagtcgccctntaaaacgactcacnataggganancgaattcgcggccgcgtcgactgggccccgcgcgcgccctccgcgagggtggaggcggcggctgtgtgcgcagggcccggcaccggactgggaccctggcgtccctccaggccttgcctcctgcgggaggacagtttggcttcacttctctgaccccagcctcggccgtaaagtgaaagagaccggaccagcttcagctttcggactctggttcttggatcgtgtcctctccccctcgccgccctcttcccccaatctgagccattgcaggcctctgcctgctgccccctctctcctcgggatcgggtccccagagccaccatctcctgagcctcccaccccgctgcctgggccctgtggttgctgggcctcccacctcaaggaggggaaggttgtacagcccgaacccgtggagcaatgccctgtctggcctccaaaaccaaaataaaactgggtcactttaca

SEQ ID NO: 50229 - DNA, 503 bp, Homo sapiens
gaacatccataccagttcctactaaaatatgcaaagcaactcaaaggtgataaaaacaaaattcaaaagttggttcaaatggcatggacatttgtaaatgacagtctctgcaccaccttgtcactgcagtgggaaccagagatcatagcagtagcagtgatgtatctcgcaggacgtttgtgcaaatttgaaatacaagaatggacctccaaacccatgtataggagatggtgggagcagtttgttcaagatgtcccggtcgacgttttggaagacatctgccaccaaatcctggatctttactcacaaggaaaacaacagatgcctcatcacaccccccatcagctgcaacagccaccatctcctgagcctcccaccccgctgcctgggccctgtggttgctgggcctcccacctcaaggaggggaaggttgtacagcccgaacccgtggagcaatgccctgtctggcctccaaaaccaaaataaaactgggtcactttaca

SEQ ID NO: 50230 - DNA, 777 bp, Homo sapiens
gcggccgcgccccccaacgctccgggaggccccccgggcccgcagccggcgccaagcgccgcagccccgccgccgcccgcgcacgccctgggcggcatggacgccgaactcatcgacgaggaggcgctgacgtcgctggagctggagctcgggctgcaccgcgtgcgcgagctgcccgagctcttcctgggccagagcgagttcgactgcttctcggacttggggtccgcgccgcccgccggctccgtgagctgctgagggcggccggcgcccgcccggcgtgccggagaggagaaagggcccgactgcccgccggaccctgcacccagcgactgggccccgcgcgcgccctccgcgagggtggaggcggcggctgtgtgcgcagggcccggcaccggactgggaccctggcgtccctccaggccttgcctcctgcgggaggacagtttggcttcacttctctgaccccagcctcggccgtaaagtgaaagagaccggaccagcttcagctttcggactctggttcttggatcgtgtcctctccccctcgccgccctcttcccccaatctgagccattgcaggcctctgcctgctgccccctctctcctcgggatcgggtccccagagccaccatctcctgagcctcccaccccgctgcctgggccctgtggttgctgggcctcccacctcaaggaggggaaggttgtacagcccgaacccgtggagcaatgccctgtctggcctccaaaaccaaaataaaactgggtcactttaca

SEQ ID NO: 50231 - DNA, 2319 bp, Homo sapiens
  misc_feature (835)..(835): n is a, c, g, or t
tccgtaatggctatactagtttacattctcatcaatggtatgcaggggtttccttttctccatattcttgccaacatttgttatctatcttttttaatatagtagccattctaacaggtgtgacatggtatttcattgtgattttaatttgcatttccctgatgataagtgatattgagcattttctcatatactgagccatttttatgtgttcttttgagaaatatctattcaggtcctttgcccatttttaaatcagattatttgttttcttgctgttggattgtttaagttccttatatattttcagtattaaccttttatgagatgtatggcttgcagatatgttctcccactctgtagattgtctcttcactctgttgattgtttccttagccatgcagaagcctttttgtttgatgtaatcttactttttttgcttttgttgcctatgctttggggcacataacctgattttttcaactgtcacactgattgtacctaacattgaaatgttagaaatgtatttcagattatattctatatatatcaagcataccacttgtgaaatctgttctgatttttttcctgaatctacctggagtgtacttaatgaatgactctacttagacttcccccagagaaatgattacataataatactttgtataggacatcttataaaaagcttaaagtattttgtatatagactcattaatcattgaagtatacttagggaaatctaggtgggctgccatagtcactttatactggtgtacaaatagttaattttggtagaacagattttgttcttaatttcttctgtcagcttttngtcattagattttagagtctcatgtgctatgattactgataagaacatatatttcatcctcacatcttaaaaagaaatgagtcatgactctaaaatttttgaggtagcatttactagtttaccatgtatatgttgaaacgtttaactgttgtaagtagagataaaatagaaggtaactcttgaaagctatgccagttcccttttatctctctgtcaagaaatctattttttcactttcaaaactcagtacaggaggttagcagcagtgatggcatagttttttaatatctccaaatgcccacataaaaacagatagagtaatagatagcaaagctaaaaacctatgtactagttctggagattggagttacacaacaatgtgaatatacttaacactactaaacagttaaaacatggttaagatggtaaattttatgttatgtgtgttttaccacaatttaaaaatcagaacctgtgaacaaaatttaacacaaaactaagggaaagaatatcctcacaaactccaaaacacaaacgggcaaagacaaactaccattagccacaagacctgcatgatattagtatcttcaggagaaatcagaaagaagcaattggatgtctgacagatctaagaacaaaagaacctcaaactagctaacacgtagtaaatagaaagcacaaggggaaaatttatcagcaactgaaactagaaacagttttgtccactgccatagagtgtaagtgcaagaccctcaataagatctaaagggcttagaagagggtttctcaacctcaacactactggcgttttgggtcagacaattctttgttgtgggggactgtcctgtgcattgtaggatgtttaacagcatccatagcctctaccaactaagtgccagaagcatgtgcctggttgtgacaaccaaaaacagtctctaaacattgccagatgttacttaggggatgagaaaggggggatgaaggggaataaaataacacctggttgggaaccagctgagttagagccatctagtccctgggaactctcaaaactgaccagccaggataatcttccaggtcaggaccctacactgaggagaatcaaaattaagcaggacgagggcaacagatgcccttgttttccttgaaaagagaaagccaagacaaaagtaaggcagtgaataaagtcaataaatctctggactaggcgctgtggctcacacccataatcccaacactttgggaggcctaggtgggaggattgcttgagtccaggatttcaaaccagcctgggcaacatagcgagacgttgtctctccaaaaaataaaaaaattagccaggcttggtggcatacacctgtggtcccagttactcaggaggctgaggtgagaggattgctgggaggtcaaggctgcagtgagccatgattgctccactgcactctagccagggtaatagagtgagaccctgtctcaaaaaaaaa

SEQ ID NO: 50232 - DNA, 1031 bp, Homo sapiens
ctgagaaaatcaaatacttacagtcaactgagcattgacaaagcaaacaaaaacataaagtggggaaagggcactctattcaacacatggtgttgggataactggcaagccacatgtaggagaatgaaactggatcctcatctctcaccttagacaaaaatcaactcaagatggatcaaggaggctgggcatggtggctcacgcctgtaatcccagcactttgggaggcccaggcaggcggatcatgaggtcaggagatcgagattgtcctggctaacgccgtgaaaccctgtctctattaaaattcaaaaaatgcataggctgggcgtggttgcaggggcctgtagtctcagctacttaggaggctgaggcaagagaatggctcattaaaaaaaaagtctcaataaaaaaaaaatggatcaaggatttaaatctaagacctgaaactataaaaattctagaagataacatcagaaaaacccttctacatataagatataataaattcctcttcaaaggtttagcttgttaacttccttattctttgttctcaaactcaactttcttgttctccatgcctccttgcccctaattagtgtaaacaaccttcctatcagttctaatcaataactcacatctgttcccttggttgctaactctggcacccattccacccttcgaaaccacacgtcccaccactgtaactcacatcccccttcccttccttatttgggaaaatatccacaaatagcccaatcaggtcaacttagaatgtgcagtctgacccgcctaccccccgcccatgggagattgacacagatgtaggggccacattaggaataaccctttctctcctttgttcagtgtgctcttgtgatcgtgaatgacacgagcagcacccttctgcagaagtaaattgccttgctgggaaaacttttgcccgagtgctggtttcactttgcgaaccgagcatttatctccaacatagacattgacttaggcaaggatttcatgaccaaaaacccaaaagc

SEQ ID NO: 50233 - DNA, 468 bp, Homo sapiens
aggtgtgagccaccgtgcccagccccattgcaaataatttttgtcctgtagagttgtaatttatttttgtctggttggaaacaacaaacccaagtatccctgaaagatattaatcattaaaaatactaacattaagatagtattccagctttctttctgtcactgtgtataatgctagtctcttgcattttttatttcaagaaggtttattgtgttgcttgtttcctaattacataactaaacagaattttcacaactgctcattacatattagttttagggacctatgcttcatctttttgaaaattatgctttgacataacatgttgaaaagcttttttttaaaagcgttaaaacaattagttcttgtaataggtggatttgtgtgtggggggcagtgatagaaactcacattcacttaaatccctttaaaaagtgagtggggaaattattggatcacatgatcac

SEQ ID NO: 50234 - DNA, 389 bp, Homo sapiens
tgacccattcataacacctggggctcctgtccacaggaggctcatcactgctcttcctctggctgaggaggtcccacctgccccgcattatccccaagacctagtcttcccggggcaatggtgagcacattacctggggcagagatttgatctaaaccataaaccatttcccagaatgaactgcacccgtgtgccaagcttcaaatcaaatgttctgctgtctgtatcctgccattctttctgagaatttggtgtcacaggattgctttgtcacaaaacaatgtcaattaccacaaatgcattttgcattttgtcatgaccgtacttttcttacttataggatcataattgccatcatttacaaagtgcttaccatgtagcaggtgttt

SEQ ID NO: 50235 - DNA, 182 bp, Homo sapiens
ccagggaacagttgtatggtctctacaacattttagtatatgttttagaaattaatctatcaaatttttaagttaacatttcagaatattccccactcctctttttaagtcaaagtccacagaagtagcttggaacagtcagtcttagcatgaacaacaatgacaataacaaaaagacctgg

SEQ ID NO: 50236 - DNA, 392 bp, Homo sapiens
cagtaaacatttcccccattatcatacctagaatattactacagaattatttttatacactaggtaacatgctagtcttatagtgtattggtagaaactaaggcttgttggtgacagcttggtaatagtattctacagattaaagattctctttttcccagtttttggaggggccttttaccatcattttggtgcctttcttatatttccagtttctgaatattaaacgacagttaagattctaaagctctattgtccaatacagcagttaccagcccctgaaaaatcaggtttttaatcacactagttacatttcaagtgctcagtagtgatcactgtaagaagttgtactgggcaatgctgctctaaagggtagctgtggtattatgagt

SEQ ID NO: 50237 - DNA, 347 bp, Homo sapiens
gtctcttggagttgccatttttagtggattatctgccacaaggtttgagcttcaacctggtgcttactgagaaattggttaattccagccaaccttttccctcctccatgggggaagtgatgcaggagcagaggctggttcagtggaagggtggccgtgcagcctggtctccacttccacccttgccctgctgctgactttgttgcctctggcttcacctgcccatctcacaggacagccgtggttctcaagtgggggcacttggggtcctgacagatgcattcaagtatacagccagtttattattattaacagcatgttataatgcaaacaaaactgggcagttg

SEQ ID NO: 50238 - DNA, 836 bp, Homo sapiens
tagacttcttacgtggcgtcttgaggctgcaaagatgcatgtgccaagatagatagcactaagcagctgcagcctcacctgttatgacttagcctccaaagtcatgcagcatcacttcaccacattgtattgatggaggcagttacaaaggtgtgcgccattcagagggcaggacatcaactccatctgtctatggaggcgtgtcagctttacattgagcatgtaggatgggatatatcttgatgtggccatctttggaaaacaagggccaccataccatcagtgtgcccatcaatctgtctgactagctatctacctttccatgcatctctctctctacccactcacccattccatctttccacccttcagacgtctgtccttctgtgtgactgtctgttcttctgtctatcccaatcacctaacacattttgaggacctgtgtgccaggcacagctatgtgcattcaataatgagctcggagggagaatgagactaatgttgattgagaacctagtgaatgttagtcccttgatcttcaaaacaactccatgacttagaattatcatctttattttcctgggaagaaaccaagacacaagctaaataacttgcccagggtcattcagccaactaatgtcagggtcaggacttgaactccaggacttcctgactaccctgtctctgcataggatacaggctctcttttggtttctgagtgttaaatgtctactaagagttagttctccacttccatttttttcccaagcgaaaatagtttttcttccctgactataaaaataacatgttcattacaaaaacattcaagcagtaca

SEQ ID NO: 50239 - DNA, 504 bp, Homo sapiens
gatcacctgaagtcagtagtttgagatcagcgtggccaacaaggtgaaacgtcatctctactaaaaatacaaaaattagctggcgagtgtctgtaatcccagctactcaggagggtgaggatgagaattgcatgagcacgggagtgtaggttgcagccagctgagattccaccactgtactccaacctgggcaacagagcgagactcagtctaagaaaaaaaaaaggtaaaaaaggcatttgtgaacacggttgcatctcttttggggaaaatagttttgccccattgttaaacagaaataagaaagaaaccaaatggttataaagtgaatactctgtgcctggcattgttacaaggtcttgcttatctttttggtttatattgctaaatacaaacaatgagctagaaagactctgtgtgcttttttcctttagacgctttcaaactcagtttcaggggtcagaattattttgtctcgtagccctgactgcagtagtggctgtt

SEQ ID NO: 50240 - DNA, 212 bp, Homo sapiens
gaacaattaattaaaaaggaggttaattcacagtttacagacttagcatctgcttgtttagcatatgcaataaaaggcgaagttgtggtagatttgtaaaaatgtcagttagataattgattatatatataggaatcattttttgcataatccaaatcctctttttcttttgatgatcctaagatatcattttagaacggaatgtggtattt

SEQ ID NO: 50241 - DNA, 524 bp, Homo sapiens
ctgtgaattatagaactctcattttagctttaagaaatgcttaccccaacccttattatgaatgtttccctcctgcttggtttactctgtatgtttataaaactacttcctatgggccgggcaccgtggctcacacctgtaatcccagcactttgggacgctgaggcaggcggattaccagatcaggagatcgagaccatcctggttaacacggtgaaaccccgtctctactaaaactacaaaaagttacccaggcgtggtggcaggcgcctgtagtcccagctactcgggaggctgaggcaggagaatggcgtgaaccccagaggcggaggttgcagtgagctgagatcacgccactgcactccagcctgggtgacagagcaagactccatctcaaaaaccaaaaaacaaaaaacaaaaaaacctacttcctatgaaagatactcaaatacaaaggaaagaaaaagccttggtcttgttaccatggcagtagcctgagttcaagaaatgatagtggccggcct

SEQ ID NO: 50242 - DNA, 313 bp, Homo sapiens
aaaattttgaggaaatacagttttattccacgtatgaagacatgactcctcctctctgttctataactgacccacagtaagatttggagcaagtcatttatctctccacatctcacttttctttctttcttttttgagatggaattttgcttccagcctgggtgacagagcaagactccatctcaaaaaccaaaaaacaaaaaacaaaaaaacctacttcctatgaaagatactcaaatacaaaggaaagaaaaagccttggtcttgttaccatggcagtagcctgagttcaagaaatgatagtggccggcct

SEQ ID NO: 50243 - DNA, 800 bp, Homo sapiens
gcttgcgtgaatgatcacttgctgattcgaggtaggcatgatgaaggagggtttagaggagacacagacacaatgaactgacctagatagaaagccttagtatactcagctaggaatagtgattctgaggacacactgtgacatgattatgccattacatgtatggtagtgatggggatgatagaaggaagaacttatggcatattttcacccccccaaaaatcagttaaatattgggacactaaccatccaggtctagaaaagtcacatgccatagccatggtattgcacatcattcatcttgcattctttgagaataagaagatcagtaaatagttcagaagtgggaagctttgtccaggcctctgtgtgaacccaatattttgtttcgaaatagaacaagtaagttcattgctatagcataacacaaaatttgcttaagtggtggtcagcaaatccttgaatgctgcttaatgtgacgaggttggtaaaatcctttgtgcaacactcttactccctgaatgttttgctgtgctggggcctgtgcatgccaggcaaggccaagatggctcaaagagcaaccagccacctctgcagcctgccacctcctgctggcaagatttgtttttgcatcctgtgaagagccaaggaggcaccagggcataagtctactcacttatatctgtctggaacataacgcttgtttgtttttacaacaaataaaattgatcttgaataaaaacagatgcggccggacatcctcatctatattttcgttcgacataaatatgggtgtattc

SEQ ID NO: 50244 - DNA, 545 bp, Homo sapiens
tctttcattagtttttcattcagttgtatttatttaatttttatttcattttccagacctaagtcagtgttagtctaccactgtacatctggtaacctcaatccctgcaaccggggcaaaatgggtttccaggtcttggcaacctttgaaattccaattccatttgagagagctttgacgaggccatatgctgatttcaccaccagcaacttcagaacccagtactggaatgccatcagccagcaggcccctgccatcatctatgacttctatctgtggctcactggaaggaaacccaggcaaggccaagatggctcaaagagcaaccagccacctctgcagcctgccacctcctgctggcaagatttgtttttgcatcctgtgaagagccaaggaggcaccagggcataagtctactcacttatatctgtctggaacataacgcttgtttgtttttacaacaaataaaattgatcttgaataaaaacagatgcggccggacatcctcatctatattttcgttcgacataaatatgggtgtattc

SEQ ID NO: 50245 - DNA, 635 bp, Homo sapiens
tctttcattagtttttcattcagttgtatttatttaatttttatttcattttccagacctaagtcagtgttagtctaccactgtacatctggtaacctcaatccctgcaaccggggcaaaatgggtttccaggtcttggcaacctttgaaattccaattccatttgagagagctttgacgaggccatatgctgatttcaccaccagcaacttcagaacccagtactggaatgccatcagccagcaggcccctgccatcatctatgacttctatctgtggctcactggaaggaaacccagtttttctcaaaatctgaggagctgctacggaaagcacaccagatctcatgtgttgaaacgtgaacatgctcaccacagaccaaggacgttcaacctgtcaatccccaggatttccaagccaggggtttcatctcttacttgtggaaaatttgttcatttgattatgaaccaatcagcttttcattgtgtcaaaatcaaatctagatagtgaaactgatattttatctttattgttatcttaaatatatcttggcttaaagagacataagtggctcttccccactataccagataacaagttgcaaataaatcattcagtagtaaagttcaaagaaa

SEQ ID NO: 50246 - DNA, 609 bp, Homo sapiens
tctttcattagtttttcattcagttgtatttatttaatttttatttcattttccagacctaagtcagtgttagtctaccactgtacatctggtaacctcaatccctgcaaccggggcaaaatgggtttccaggtcttggcaacctttgaaattccaattccatttgagagagctttgacgaggccatatgctgatttcaccaccagcaacttcagaacccagtactggaatgccatcagccagcaggcccctgccatcatctatgacttctatctgtggctcactggaaggaaacccaggtgagaagctgagtcaatggctttgagaatgtcactgcatatgggagattgaggccccaaagtctttagggcttccttcagccaaagattaaaggagacaactgaatctgacccatatatacagattgaacacacctactctgaaaatccaaaatctgaaattctccaaaatccaaaagttttgagtgctgacatgatgccacaagtggaaaattccgcacatcttacctcatgtgatgggtcacagtcaaaacacattcaaaactttgtttcatgcataaaattatttaaaatattgtataagattacc

SEQ ID NO: 50247 - DNA, 374 bp, Homo sapiens
gatagtgcttacatgggctctgtcacatctggatttataacacattctcccactctcatgtgaatttttctttttgcataaatcaggagcaactaattaaaaaagaaatatttaattctgacatgttctttgaactggagtcccatctggttctgtttgaatagtaaaatctgctgtagttgttaaaactggcaagtagcattgtccaaaagaaacaaaagggactcgatgcagcaggttaacactccagcatttcagctagagacttttccagaatccagctacccaaatcactccaatctggaaaccataaagatcaaatgtgaaggtgaagaatgccattttcaggtggagtcactaccattgctctgcat

SEQ ID NO: 50248 - DNA, 456 bp, Homo sapiens
tcactgctaggggatattcaaaagtaagaatttggaagatcttactaaaaggctttagacagaacctggaaatagattctctgcatttgtatgcaagttaatttttgaattctctacatatgctgagggaaaagattaggatgtctagatgggcctggatagcaaagtcagggcctgatttttttctggttagtgccttggggagattaagtgtggctatcactgaataaaatttaacccaaatgctgaaacttttagaggaaactggatacatcaaacaggaacctgttctaacatcaaatgagtgacttattttcttgcttaaccagggtaggtaacactaagctggctatcaatagccccctgtttcttagggaatttctaatacggtgtgaccatgtttattcgtagatgggacagagctgctgatggcattctaagacagagtagaagtaa

SEQ ID NO: 50249 - DNA, 221 bp, Homo sapiens
ctggaattcaatgcaagatctgagagttaaatgcccacatgccctcgcccctgtttaaactagacctctcacttagctaactgtacacatgtggaaacatgaatcagtcaggattttgttatctgtgacaggtcaaaacagcagtggcttcagaaacgtagaaattttcttctctccagtgcagacgtagacaatctggggctcctagtgtccctctgagg

SEQ ID NO: 50250 - DNA, 454 bp, Homo sapiens
agcagacttttctggaatcaacaaaaccatgtttttattgctgcagccttggcgaggaatccagaagtttcgggttggctttgaggtagccattctgttgtctgcacatctaacgtgcattcccatgcctgtttaaggtggacttttaataatctaaatggccccagtagaagacatttcagtaaattggggaatgcctatacaatgtaacagcatgtagccatgtcaaagtcccgttgaggaagaatacttagtgactgacatggtttgcacctgttccctccaaacctcatgttgaaatgtggcctccagggttggaggtgggcctagcaggaatgtttaggtcatgggggcagatcccttatgaatggctttgtgtcgtcctcacagtagtgagtgacttctcactttgttagttcaggcagagttggttgtttaaagagcctgggaccac

SEQ ID NO: 50251 - DNA, 303 bp, Homo sapiens
cagcaacatatatagatctttaaaacagaatgctgaatatagaaagtgagaaataggtactttaaaaatacataatgttctttagtgggtatatattttaatttatacaactgtggtactgtgctgttgcttattctaacaaatacattagattcctatgggagaaggaaaatataagtgggaaatgagaataaagaggaatgattaaacaaacaaccaagggagaaatagtacacccactgataacaatagtgtgccatgaactgagcaacatgattacctcaattctcggcactgcaagta

SEQ ID NO: 50252 - DNA, 495 bp, Homo sapiens
gcaaacacacccgagagctggaggaacaggtcttggggcatttgctgttgccggatttactgtgtgctgcttttgtcttggaagagtcgggaaagaggttaaagaagacacgcaagtatgatatcatcaccactccagcagagcgagtggaaatggcgccactaaatgaagaggatgatgaagatgaggactccacagtattcgacatcaaatacaggcctgagtggtgactcacgggagcctggccacctcgcagctgttcgccccctcaacctttgaactggaactgctggctcacacagggttttcgacaactgcagctgaatctcatggaaaagctggattcctctgccttacgcagaaacacccgggctccatctgccaggtgcttgccactggtcctggcagaaatggcggctgctgaaagtgaccttccaaatccttggtggcacttcagcgccacaggctctccaataaaaaccctttacacacaaa

SEQ ID NO: 50253 - DNA, 2091 bp, Homo sapiens
ccgcaggatcccccggtgcaggcctccgtgctggtgcggatcctggagctcagccgcgcgcgccctgcccgatcctgtgccgacccaccgcactatgcgcgccgtgccgctgcccgccccgctcctgccgctgctgctgctcgcgctcctggccgctcccgccgcccgcgccagcagagccgagtccgtctccgcgccgcggcccgaacccgagcgcgagtcgcggccaccgcccggcccggggcccgggaacaccacccggtttgggtctggggcggcgggcggcagcggcagctccaacagcagcggcgacgccttggtgacccgcatttccatcctcctccgcgacctacccaccctcaaggcagccgtgatcgtggcgttcgcctttaccaccctcctcatcgcctgcctgctgctgcgcgtcttcaggtcgggaaagaggttaaagaagacacgcaagtatgatatcatcaccactccagcagagcgagtggaaatggcgccactaaatgaagaggatgatgaagatgaggactccacagtattcgacatcaaatacaggtaaaacctgtttcccagcctggtggcatcctgtggaaagttggtcagctgcaacctggggtgtgaaggactggacctggaagccctcttgcgtcggaggtgttgaaaccaaaacgaacgttatgtataaaaccccagctccatcgtgcgtgtcaggcatctgctcagactgtcactggcaagctcgtttccacgtcaccacaatggagttgcttctgccaccctttgggcatccctttaaagtgccccctacttctactccccatgtaagaggctttgtgccttgctaaggagcaaagggtagaaacatgttgattttaaagaagtttttttaagacaattgttgacaatagtaaaagagatcaggaggatcaagaatctaaaacaagcctgaaggatgtccaactgtgtatttagaatttccgacattcttctctactggatctacacattggaccccatctgatcctttgctgcttttttggcttggtcaggtcctggcctcattttggcgttacctgtgtcagagttcaaggtggatgtgcttagagctggtcagccccttccagacctggacacgtctgtggctccttttctttcttcctgtgacatgacccagggatctgctgctggcttctggagacagggccttgggctgacttctcaggttgattgaggcctcctgactagcggtgttcccaggctagaggtgattggctgcaacaaagatgcttctattagtctattagcagtgccttcgggaccctgggattttgctctctctagaaaggtgttttttatttttttattttttatctcccccttttttcctggctttgctccagggtttgtgtatttgcctgtttattgtcctgctctttttttttttggatgaaaactccagcctttcctgactcacctccatcttcggttcttcagttttctgagaagagttgggatatgtgggaaggggcatgggagctcggcagcctccgcctgccaggaaggcagtttcgcctctgcaggaaagagcagagcccgtgggaagccctgggtgagggtggcgcagccggcccagcacgcatggtattgccagccacggggggcctgcgtgtagtctctgctccctgcatttcaccttctttgttgactttccttctctgttttcccccatctgtttgccagaggggtgggactggcaacagaacagccgtggctgctttatctctcctctccacggtgtactcaggcctgagtggtgactcacgggagcctggccacctcgcagctgttcgccccctcaacctttgaactggaactgctggctcacacagggttttcgacaactgcagctgaatctcatggaaaagctggattcctctgccttacgcagaaacacccgggctccatctgccaggtgcttgccactggtcctggcagaaatggcggctgctgaaagtgaccttccaaatccttggtggcacttcagcgccacaggctctccaataaaaaccctttacacacaaa

SEQ ID NO: 50254 - DNA, 2335 bp, Homo sapiens
  misc_feature (2253)..(2253): n is a, c, g, or t
  misc_feature (2257)..(2257): n is a, c, g, or t
  misc_feature (2278)..(2278): n is a, c, g, or t
  misc_feature (2295)..(2295): n is a, c, g, or t
  misc_feature (2326)..(2326): n is a, c, g, or t
ccgcaggatcccccggtgcaggcctccgtgctggtgcggatcctggagctcagccgcgcgcgccctgcccgatcctgtgccgacccaccgcactatgcgcgccgtgccgctgcccgccccgctcctgccgctgctgctgctcgcgctcctggccgctcccgccgcccgcgccagcagagccgagtccgtctccgcgccgcggcccgaacccgagcgcgagtcgcggccaccgcccggcccggggcccgggaacaccacccggtttgggtctggggcggcgggcggcagcggcagctccaacagcagcggcgacgccttggtgacccgcatttccatcctcctccgcgacctacccaccctcaaggcagccgtgatcgtggcgttcgcctttaccaccctcctcatcgcctgcctgctgctgcgcgtcttcaggtcgggaaagaggttaaagaagacacgcaagtatgatatcatcaccactccagcagagcgagtggaaatggcgccactaaatgaagaggatgatgaagatgaggactccacagtattcgacatcaaatacaggtaaaacctgtttcccagcctggtggcatcctgtggaaagttggtcagctgcaacctggggtgtgaaggactggacctggaagccctcttgcgtcggaggtgttgaaaccaaaacgaacgttatgtataaaaccccagctccatcgtgcgtgtcaggcatctgctcagactgtcactggcaagctcgtttccacgtcaccacaatggagttgcttctgccaccctttgggcatccctttaaagtgccccctacttctactccccatgtaagaggctttgtgccttgctaaggagcaaagggtagaaacatgttgattttaaagaagtttttttaagacaattgttgacaatagtaaaagagatcaggaggatcaagaatctaaaacaagcctgaaggatgtccaactgtgtatttagaatttccgacattcttctctactggatctacacattggaccccatctgatcctttgctgcttttttggcttggtcaggtcctggcctcattttggcgttacctgtgtcagagttcaaggtggatgtgcttagagctggtcagccccttccagacctggacacgtctgtggctccttttctttcttcctttttttttttttttttaaaaaaaaaaaaggttcagcagaaatcagcgtggctagttcacaaagaatttccagtatcagggaaaaactgtgcgtgtgtgtgtgtgtgtgtgcacgtgtgtgcgtgtgcacgtgtgtgatacctataaaacagtttctccttctctgaagggaaaggaaagtgctaggcagcctgtgattagcaacattctttgtgcttttttgttgttcctctgctctgtcacagttctacgttgtttgccttagaaatgtaatttttaaaaaccattttaaaaatgaacggtgatttggctggctggaaaaaatcacactgtcaggggactatatttgaagtcagtctagacggggctggactaggaacccacctggacccaggagaccccacaggacccaggaggtccctgccggaaggcagaggttcaggtgagagtggctcacctctgagctggtgaagtgaggacttgcctgtgacatgacccagggatctgctgctggcttctggagacagggccttgggctgacttctcaggttgattgaggcctcctgactagcggtgttcccaggctagaggtgattggctgcaacaaagatgcttctattagtctattagcagtgccttcgggaccctgggattttgctctctctagaaaggtgttttttatttttttattttttatctcccccttttttcctggctttgctccagggtttgtgtatttgcctgtttattgtcctgctctttttttttttggatgaaaactccagcctttcctgactcacctccatcttcggttcttcagttttctgagaagagttgggatatgtgggaaggggcatgggagctcggcagcctccgcctgccaggaaggcagtttcgcctctgcaggaaagagcagagcccgtgggaagccctgggtgagggtggcgcagccggcccagcacgcatggtattgccagccacggggggcctgcgtgtagtctctgctccctgcatttcaccttctttgttgactttccttctctgttttcccccatctgtttgccagaggggtgggactggcaacnaagnaacaagcccggtggggtggcntaaaaaccccctccctnctcccaaaagggggggaaaccaaagggcccntaaaagtgg

SEQ ID NO: 50255 - DNA, 2576 bp, Homo sapiens
ccgcaggatcccccggtgcaggcctccgtgctggtgcggatcctggagctcagccgcgcgcgccctgcccgatcctgtgccgacccaccgcactatgcgcgccgtgccgctgcccgccccgctcctgccgctgctgctgctcgcgctcctggccgctcccgccgcccgcgccagcagagccgagtccgtctccgcgccgcggcccgaacccgagcgcgagtcgcggccaccgcccggcccggggcccgggaacaccacccggtttgggtctggggcggcgggcggcagcggcagctccaacagcagcggcgacgccttggtgacccgcatttccatcctcctccgcgacctacccaccctcaaggcagccgtgatcgtggcgttcgcctttaccaccctcctcatcgcctgcctgctgctgcgcgtcttcaggtcgggaaagaggttaaagaagacacgcaagtatgatatcatcaccactccagcagagcgagtggaaatggcgccactaaatgaagaggatgatgaagatgaggactccacagtattcgacatcaaatacaggtaaaacctgtttcccagcctggtggcatcctgtggaaagttggtcagctgcaacctggggtgtgaaggactggacctggaagccctcttgcgtcggaggtgttgaaaccaaaacgaacgttatgtataaaaccccagctccatcgtgcgtgtcaggcatctgctcagactgtcactggcaagctcgtttccacgtcaccacaatggagttgcttctgccaccctttgggcatccctttaaagtgccccctacttctactccccatgtaagaggctttgtgccttgctaaggagcaaagggtagaaacatgttgattttaaagaagtttttttaagacaattgttgacaatagtaaaagagatcaggaggatcaagaatctaaaacaagcctgaaggatgtccaactgtgtatttagaatttccgacattcttctctactggatctacacattggaccccatctgatcctttgctgcttttttggcttggtcaggtcctggcctcattttggcgttacctgtgtcagagttcaaggtggatgtgcttagagctggtcagccccttccagacctggacacgtctgtggctccttttctttcttcctttttttttttttttttaaaaaaaaaaaaggttcagcagaaatcagcgtggctagttcacaaagaatttccagtatcagggaaaaactgtgcgtgtgtgtgtgtgtgtgtgcacgtgtgtgcgtgtgcacgtgtgtgatacctataaaacagtttctccttctctgaagggaaaggaaagtgctaggcagcctgtgattagcaacattctttgtgcttttttgttgttcctctgctctgtcacagttctacgttgtttgccttagaaatgtaatttttaaaaaccattttaaaaatgaacggtgatttggctggctggaaaaaatcacactgtcaggggactatatttgaagtcagtctagacggggctggactaggaacccacctggacccaggagaccccacaggacccaggaggtccctgccggaaggcagaggttcaggtgagagtggctcacctctgagctggtgaagtgaggacttgcctgtgacatgacccagggatctgctgctggcttctggagacagggccttgggctgacttctcaggttgattgaggcctcctgactagcggtgttcccaggctagaggtgattggctgcaacaaagatgcttctattagtctattagcagtgccttcgggaccctgggattttgctctctctagaaaggtgttttttatttttttattttttatctcccccttttttcctggctttgctccagggtttgtgtatttgcctgtttattgtcctgctctttttttttttggatgaaaactccagcctttcctgactcacctccatcttcggttcttcagttttctgagaagagttgggatatgtgggaaggggcatgggagctcggcagcctccgcctgccaggaaggcagtttcgcctctgcaggaaagagcagagcccgtgggaagccctgggtgagggtggcgcagccggcccagcacgcatggtattgccagccacggggggcctgcgtgtagtctctgctccctgcatttcaccttctttgttgactttccttctctgttttcccccatctgtttgccagaggggtgggactggcaacagaacagccgtggctgctttatctctcctctccacggtgtactcaggcctgagtggtgactcacgggagcctggccacctcgcagctgttcgccccctcaacctttgaactggaactgctggctcacacagggttttcgacaactgcagctgaatctcatggaaaagctggattcctctgccttacgcagaaacacccgggctccatctgccaggtgcttgccactggtcctggcagaaatggcggctgctgaaagtgaccttccaaatccttggtggcacttcagcgccacaggctctccaataaaaaccctttacacacaaa

SEQ ID NO: 50256 - DNA, 2715 bp, Homo sapiens
ccgcaggatcccccggtgcaggcctccgtgctggtgcggatcctggagctcagccgcgcgcgccctgcccgatcctgtgccgacccaccgcactatgcgcgccgtgccgctgcccgccccgctcctgccgctgctgctgctcgcgctcctggccgctcccgccgcccgcgccagcagagccgagtccgtctccgcgccgcggcccgaacccgagcgcgagtcgcggccaccgcccggcccggggcccgggaacaccacccggtttgggtctggggcggcgggcggcagcggcagctccaacagcagcggcgacgccttggtgacccgcatttccatcctcctccgcgacctacccaccctcaaggcagccgtgatcgtggcgttcgcctttaccaccctcctcatcgcctgcctgctgctgcgcgtcttcaggtcgggaaagaggttaaagaagacacgcaagtatgatatcatcaccactccagcagagcgagtggaaatggcgccactaaatgaagaggatgatgaagatgaggactccacagtattcgacatcaaatacaggtaaaacctgtttcccagcctggtggcatcctgtggaaagttggtcagctgcaacctggggtgtgaaggactggacctggaagccctcttgcgtcggaggtgttgaaaccaaaacgaacgttatgtataaaaccccagctccatcgtgcgtgtcaggcatctgctcagactgtcactggcaagctcgtttccacgtcaccacaatggagttgcttctgccaccctttgggcatccctttaaagtgccccctacttctactccccatgtaagaggctttgtgccttgctaaggagcaaagggtagaaacatgttgattttaaagaagtttttttaagacaattgttgacaatagtaaaagagatcaggaggatcaagaatctaaaacaagcctgaaggatgtccaactgtgtatttagaatttccgacattcttctctactggatctacacattggaccccatctgatcctttgctgcttttttggcttggtcaggtcctggcctcattttggcgttacctgtgtcagagttcaaggtggatgtgcttagagctggtcagccccttccagacctggacacgtctgtggctccttttctttcttcctttttttttttttttttaaaaaaaaaaaaggttcagcagaaatcagcgtggctagttcacaaagaatttccagtatcagggaaaaactgtgcgtgtgtgtgtgtgtgtgtgcacgtgtgtgcgtgtgcacgtgtgtgatacctataaaacagtttctccttctctgaagggaaaggaaagtgctaggcagcctgtgattagcaacattctttgtgcttttttgttgttcctctgctctgtcacagttctacgttgtttgccttagaaatgtaatttttaaaaaccattttaaaaatgaacggtgatttggctggctggaaaaaatcacactgtcaggggactatatttgaagtcagtctagacggggctggactaggaacccacctggacccaggagaccccacaggacccaggaggtccctgccggaaggcagaggttcaggtgagagtggctcacctctgagctggtgaagtgaggacttgcctgtgacatgacccagggatctgctgctggcttctggagacagggccttgggctgacttctcaggttgattgaggcctcctgactagcggtgttcccaggctagaggtgattggctgcaacaaagatgcttctattagtctattagcagtgccttcgggaccctgggattttgctctctctagaaaggtgttttttatttttttattttttatctcccccttttttcctggctttgctccagggtttgtgtatttgcctgtttattgtcctgctctttttttttttggatgaaaactccagcctttcctgactcacctccatcttcggttcttcagttttctgagaagagttgggatatgtgggaaggggcatgggagctcggcagcctccgcctgccaggaaggcagtttcgcctctgcaggaaagagcagagcccgtgggaagccctgggtgagggtggcgcagccggcccagcacgcatggtattgccagccacggggggcctgcgtgtagtctctgctccctgcatttcaccttctttgttgactttccttctctgttttcccccatctgtttgccagaggggtgggactggcaacagaacagccgtggctgctttatctctcctctccacggtgtactcaggcctgagtggtgactcacgggagcctggccacctcgcagctgttcgccccctcaacctttgaactggaactgctggctcacacagggttttcgacaactgcagctgaatctcatggaaaagctggattcctctgccttacgcagaaacacccgggctccatctgccaggtgcttgccactggtcctggcagaaatggcggctgctgaaagtgaccttccaaatccttggtggcacttcagcgccacaggctctccaataaaaaccctttacacacaaaaacagaaacactcccaccaaaaaaccagcaagatcgaccaacacccgcaccagacaaaaacggggggcgacacacgcggacgacacactgaggcagataaaataagagggcacaagagcgcgctaacctcgccgcacac

SEQ ID NO: 50257 - DNA, 1112 bp, Homo sapiens
ccgcaggatcccccggtgcaggcctccgtgctggtgcggatcctggagctcagccgcgcgcgccctgcccgatcctgtgccgacccaccgcactatgcgcgccgtgccgctgcccgccccgctcctgccgctgctgctgctcgcgctcctggccgctcccgccgcccgcgccagcagagccgagtccgtctccgcgccgcggcccgaacccgagcgcgagtcgcggccaccgcccggcccggggcccgggaacaccacccggtttgggtctggggcggcgggcggcagcggcagctccaacagcagcggcgacgccttggtgacccgcatttccatcctcctccgcgacctacccaccctcaaggcagccgtgatcgtggcgttcgcctttaccaccctcctcatcgcctgcctgctgctgcgcgtcttcaggtcgggaaagaggttaaagaagacacgcaagtatgatatcatcaccactccagcagagcgagtggaaatggcgccactaaatgaagaggatgatgaagatgaggactccacagtattcgacatcaaatacaggtaaaacctgtttcccagcctggtggcatcctgtggaaagttggtcagctgcaacctggggtgtgaaggactggacctggaagccctcttgcgtcggaggtgttgaaaccaaaacgaacgttatgtataaaaccccagctccatcgtgcgtgtcaggcatctgctcagactgtcactggcaagctcgtttccacgtcaccacaatggagttgcttctgccaccctttgggcatccctttaaagtgccccctacttctactccccatgtaagaggctttgtgccttgctaaggagcaaagggtagaaacatgttgattttaaagaagtttttttaagacaattgttgacaatagtaaaagagatcaggaggatcaagaatctcatggaaaagctggattcctctgccttacgcagaaacacccgggctccatctgccaggtgcttgccactggtcctggcagaaatggcggctgctgaaagtgaccttccaaatccttggtggcacttcagcgccacaggctctccaataaaaaccctttacacacaaa

SEQ ID NO: 50258 - DNA, 898 bp, Homo sapiens
ccacctcctaggaactcctagtcgttcatcatcatttcagccctttgccgccagggccaaaggtggaaagtgatttggaagagaagagcttttcgtccagcagaagaaatggtaccaaaatcagtctgtaaaggaagtaaattggggagttggcggcaaggcagagagcatagctatgatggtctcagtcagtaaggctgggccctgcaggaagtcaaatatgaatgcctagaggtgttcacaagcacaaagaaggtgtagggggaggcaagtgccaggcacaagcaggggcaggtgaggactctgggtgactgtgctatagggccccaggctacggttagccctgtaggtttcccaagggcctggcctaaggcagatccttgatcgatataccttgagaccagaaggtgctccgaaatcacaaccgtacaattaggggatctaggaacaattctttggagataccaatgcctttggctggtgttgctgcatttctttactggggactgatagatggagaggtggaaagatgagctgaggcacatctttcagagctactgggaggccatttcttcctggctgttaggatttgttcgtgtttgggagacctttagagcgtggttaaacccatatgttgggatttatgctgcttttatggtagcaataccctatattaagatttgaagtagacccggaaagttagtggccggttagctcagttggttagagcgtggtgctaataacgccaaggtcgcgggttcgaaccccgtacgggccagtgggtggcttttttttgtgtgtgttttgttttctgaccctctgctgttatccggaagtttctacccggagccagttgccttctggtaacagaattatattgcacctactgcttcctatt

SEQ ID NO: 50259 - DNA, 964 bp, Homo sapiens
ctcaacttttactcagtggatcagcttatttaattgatgactgtacagttaattcatgctcaaaaatcaaacattctaagcttctttctatgaatatcttccagaccaagattattcatctcatggttttaaaggacagaatttcctggagaatgttggtcctcttgtaggtgctactgcagcaaagttgaaacaatcatacgtcagaccaaaatacaagtcagttcttcagttttcactaattaaaattaactctgtctaaataaatcaactcttaccaccttcaggattcatatctcaagtaagagacattcttactgaccaataacacaaaatatcccaccctcagcactaggatcctcagttttgaattctttcaaccatttttgtcaaaagccttgctgtagccaggtgtggtggcacattcctgtaatctcagctactcgggaggctgaggagggcagatccattgtccctaggagttgaaggccagcctgggcaacatagcaagactctgtctcaaaaaaaaaaaaaatacatgacaacaataacatgaaagccaggagaatgctaaaatgaattaaagtgtcataaggtccctagagttatttagaaaagggtgaaagtactaattcaagggtgacctaattaagccaaggatgcatgctataatatgtgggtaataaaataacaacaatagcaaacacgtgactactaatttatagaggatgaaaatgaaataattaggaaaatattgattgatccaaaagaaggcaagaaagaggtaaaaagaaacaaaaaacagatgtgaaaaatggaaaaaaatggcaaaatggtatactttaaaccctacagtatcagtaattaccataatataaatcaattaaaggcaaagattttcagactggacaagaaaaaaaaaacaactatatgctgttatagaagacacaccttaaacataagg

SEQ ID NO: 50260 - DNA, 1062 bp, Homo sapiens
cccatgatcaaatcacctcccaccaggtctcacctctaacagtgacggttacatttcaacatgagatttgaagaggacaaacaccccaaacataacagactcacttgtgactttgccctgtaaactttcagggaaaatgaggtcacttctgacccagagactctgtcatcttaccctctcctgggggtcttcatctaaagaaaccaagattattcatctcatggttttaaaggacagaatttcctggagaatgttggtcctcttgtaggtgctactgcagcaaagttgaaacaatcatacgtcagaccaaaatacaagtcagttcttcagttttcactaattaaaattaactctgtctaaataaatcaactcttaccaccttcaggattcatatctcaagtaagagacattcttactgaccaataacacaaaatatcccaccctcagcactaggatcctcagttttgaattctttcaaccatttttgtcaaaagccttgctgtagccaggtgtggtggcacattcctgtaatctcagctactcgggaggctgaggagggcagatccattgtccctaggagttgaaggccagcctgggcaacatagcaagactctgtctcaaaaaaaaaaaaaatacatgacaacaataacatgaaagccaggagaatgctaaaatgaattaaagtgtcataaggtccctagagttatttagaaaagggtgaaagtactaattcaagggtgacctaattaagccaaggatgcatgctataatatgtgggtaataaaataacaacaatagcaaacacgtgactactaatttatagaggatgaaaatgaaataattaggaaaatattgattgatccaaaagaaggcaagaaagaggtaaaaagaaacaaaaaacagatgtgaaaaatggaaaaaaatggcaaaatggtatactttaaaccctacagtatcagtaattaccataatataaatcaattaaaggcaaagattttcagactggacaagaaaaaaaaaacaactatatgctgttatagaagacacaccttaaacataagg

SEQ ID NO: 50261 - DNA, 960 bp, Homo sapiens
aagctggcttgctgagtcttctggctttcatctttctcctgtgctagatgcttctgttcattcctcctgcccttagacatcggactccaggttccttggcctttaaactcttggatttacaccaatggtttgctgggggctctagggctttggccacagactgaagcctgcacggtcagcttccctgcttttgaggcttttggactcagactgagccgctactggcttctttctccccgagcttgcagacggcctatcatgagacttcgccgtgtgatggtccaaacacaaaggcctcccgaccttagagttctgcgtctggatgtttttggctacaaaaccagaaaactccttctcaactggcttaaacaggaaaatgaggtcacttctgacccagagactctgtcatcttaccctctcctgggggtcttcatctaaagaactgccactgggatcatacagtgtgctctcatctggaacttcccacatctccacgtgccctcaccttcagtgagagtctgagaagaagccgggtggggttgctgcccacatggtcggggctgctgccaatgccactcatctcaccgtcacttgctgcctctctgcctgccccctggtccatggttctctgacatctctctctccttgaggactgtccactgagaggtctggaaacaatgacactccaggaacaatgacactccagaaacaatgacactccaggaacaatgacactccagaaacaatgacactccaggaacaatgagcacatctagcacccagatcttggcttctacacatcattctctattaaaagaaagaagcatcccttggagcaatggctgattccagagctgtggcagagaaattacaagataagcctggaacatcttgctgtgacagaaagtaagcaagtgctcaaagaattatggcaatagaaaccagcttggcaactggaca

SEQ ID NO: 50262 - DNA, 2713 bp, Homo sapiens
aacactttttgcccgcctaagcgagccatagagccgtctccagagctgccggtgcctttaagaagactcggtctttcgggtcttctttttccccaatgggctccagtggtgcccgcagcaaaaggcaaacttgcctggctcatggggtgaaagggaggattgaagaatgccgcgttgggtgggtgctgagggagcgccagagtgcgctacgggcttcgctccccttcccctttccttaacccttcctagagcggaggaaccgggtcgtgctgcagcgcccaggagccagggcgctgactgtcctcggctccagaaactttgcgcggagagtgggcttgactgggcagagccgagccggctggctgacccgggaaggaacgggggaagggcggggtgagggaagaaagaccctttagcaccccgggtttctagcccgggcggcggtgtgcagctgcatgagggagctgtcccttcggcaccacggaccttaaagcctaggcgttaagacgacggaggcggggcaacaggcggggagctgtcccttcagcaccacggaccttggcgcccccagggaaaccagccggcccccgccccaggactctgtcttttctccagtttgagcgggggtgtcgggagcaggcggagagctttcctgcgaggctgtggaagcagtgaacactcttctcagcggctcgcctcccagcagtgctattttttgccatccgccctcacccccagcacacgcgctcgcacacacacgcacgcacgcacacacacacacacaacactcacacagagacctctctgggtttctttgccttgagtctcccggggctgtgagaagccaggcgcatctcaaaccgagctggcagctccaggctccggagccatgccctgcacggaccctcgtctttaccacgctcctgaggaatgaaaggaacccagggaccctcagaaggcagcagtgatgcggaccaaccccccggagcctgcacccttccgagggccataggcgacccagggaactggagagagctccagaaaggaaatcccagctttcccaaagtccctgtggatgctgacaaaaggagacctgaatttttggaagagcctgtactaggttacccggctgcagagtgattttcccctccggcactgactctccccctccaacccccagccgtccagagtaccatgaagaattatgaggatgtgtgacagaggtatccagatgttgatcaccactgtaggagcctttgccgcttttagtttaatgaccattgcagtgggcacggactactggttatattccagaggtgtgtgcaggactaaatctacaagtgataatgaaaccagcaggaagaatgaagaagtaatgacccattcggggctgtggaggacctgctgcctagaaggggctttccgaggcgtgtgcaagaaaatcgatcacttccctgaagatgctgactacgaacaggacacagccgaatatctcctgcgagctgtgagggcctccagtgtcttccccatcctcagtgtcacgctgctgttcttcggcgggctctgcgtggcagccagtgagttccaccgcagcagacacaacgtcattctcagcgcgggcatcttttttgtctctgcagggttaagcaacatcattggcatcatagtttatatatcagccaacgccggagaccccgggcagcgtgactccaaaaaaagttactcctatggttggtccttttatttcggagccttctctttcatcatcgcagaaattgtaggagtggttgccgtgcacatctatattgaaaaacatcagcagttacgagccaaatcccactcggagttcctgaagaaatctacttttgcccgcctcccaccctacaggtatcgattccggaggcggtcaagttctcgctccaccgagcccagatcccgagacctgtcccccatcagcaaaggcttccacaccatcccttccactgacatctcgatgttcaccctctcccgggacccctcaaagatcaccatggggaccctcctcaactccgaccgggaccacgcttttctacagttccacaattccacacccaaagagttcaaagagtcactgcataataatccggccaacaggcgcaccacgcccgtctgaactgacctctgacctctgccccacgcccagcacagccttgggggaagtgtacagagatgtctctgaggttgcatggcatggtccttgtgatggtattactttttacaaagaatgaaaccaaatggactcagccctctcccacattttcccctcaccctccaagtcctaacccctccatcctctctaacttttcaagccaatcccttaatgtcattcctctctctgtgtatctgtgccagatgttttcctttcttccttctttactggaaggacctccacattcttccctccttggaagaggactttactaaaagtcacaggtggtggccaggggggatttccgaatctccatcaggcgcgctcatagttgtccccattgtctacccacacaaatcctcaggaaaccaaccaccgcccaggtggccctgagggaggcattcacctttatgtgttagaaaaacatgaccagaaatcaaagatgtcagagccccgaagcagctaatgtaataagcactcatgttattaaaggttttgccttgtcgtaaccaaccgaaacggggg

SEQ ID NO: 50263 - DNA, 1480 bp, Homo sapiens
  misc_feature (16)..(16): n is a, c, g, or t
  misc_feature (19)..(19): n is a, c, g, or t
  misc_feature (26)..(26): n is a, c, g, or t
  misc_feature (45)..(45): n is a, c, g, or t
ttttccaggtgccccngtngagtctntttacctcacatagaaggntcctacagtgggcacggactactggttatattccagaggtgtgtgcaggactaaatctacaagtgataatgaaaccagcaggaagaatgaagaagtaatgacccattcggggctgtggaggacctgctgcctagaaggggctttccgaggcgtgtgcaagaaaatcgatcacttccctgaagatgctgactacgaacaggacacagccgaatatctcctgcgagctgtgagggcctccagtgtcttccccatcctcagtgtcacgctgctgttcttcggcgggctctgcgtggcagccagtgagttccaccgcagcagacacaacgtcattctcagcgcgggcatcttttttgtctctgcagggttaagcaacatcattggcatcatagtttatatatcagccaacgccggagaccccgggcagcgtgactccaaaaaaagttactcctatggttggtccttttatttcggagccttctctttcatcatcgcagaaattgtaggagtggttgccgtgcacatctatattgaaaaacatcagcagttacgagccaaatcccactcggagttcctgaagaaatctacttttgcccgcctcccaccctacaggtatcgattccggaggcggtcaagttctcgctccaccgagcccagatcccgagacctgtcccccatcagcaaaggcttccacaccatcccttccactgacatctcgatgttcaccctctcccgggacccctcaaagatcaccatggggaccctcctcaactccgaccgggaccacgcttttctacagttccacaattccacacccaaagagttcaaagagtcactgcataataatccggccaacaggcgcaccacgcccgtctgaactgacctctgacctctgccccacgcccagcacagccttgggggaagtgtacagagatgtctctgaggttgcatggcatggtccttgtgatggtattactttttacaaagaatgaaaccaaatggactcagccctctcccacattttcccctcaccctccaagtcctaacccctccatcctctctaacttttcaagccaatcccttaatgtcattcctctctctgtgtatctgtgccagatgttttcctttcttccttctttactggaaggacctccacattcttccctccttggaagaggactttactaaaagtcacaggtggtggccaggggggatttccgaatctccatcaggcgcgctcatagttgtccccattgtctacccacacaaatcctcaggaaaccaaccaccgcccaggtggccctgagggaggcattcacctttatgtgttagaaaaacatgaccagaaatcaaagatgtcagagccccgaagcagctaatgtaataagcactcatgttattaaaggttttgccttgtcgtaaccaaccgaaacggggg

SEQ ID NO: 50264 - DNA, 1233 bp, Homo sapiens
tcacagcagccttgatctcctgggctcaagtgatcctcttgtctcagtccttgaacagctggggaccacaggcatgcaccaccacgctcagtgaattgttgttgttattgttattgttgttttgtagatacagggtctcactatgttgcccagcctggtctcgaactcgtggccttaagtgatcctcctgccttagcttccccacttttttttatgtcttaatcacttggttaaggtgattttctgccaggcttttccattgtaaagttaccaattttcttttcgtaatcaatgatttgttggaagatgctttgagactagagtttattctttaacccctaaatatttgagtgtattacctataaacaaagaatttcccattcattactgtgatacagttaacaaaatcaggaaattaatctgaaataggtcctcagtctttttgtttcattacattgactctttttttctttttaaaatagggatgtgggatttcactatgttgcccaggctgaagtgcagtggctactcacaggcacgatcctagagcactgcagcctccaacgtcctggggctctgatgatcctcttgcttcagcctcccatgtagctgggactacaggcataagtcaccacacccggctaattaaaaaaccgttttttttcagagacagggtttagctcttgtccaggctggtctcagactcctggccttaagctgtcctgcctcatcctcccaagttgctgggattacaggcctgatacactgtgcctggctagcaaatctgtttcagagtacagttgtccctcagtatctaggggggaccaaaatccatgcatactcaagttctccagttggctctgtataggtgaagtctgcctgcatgtataaaaagtcaaccttcatataactgggttttgcatcctgggaatactgtatttttgatcctcatttggactcgggcagttcaaactcactcatgttgttcagggtcaactgtatttccatataacttaactcagttccttctgaatactttaagtcatctctaggttatttataatacgatttaatgctatgtaaatagttgttatgctgtattgcttagggaataatgacaaaaaaagtctgtacatgtttatacagatgcagtttttttccaaatattttcaatctgtgattgtttgaatctacagatgcagaacccatggatacggtgggccaatcgtatat

SEQ ID NO: 50265 - DNA, 476 bp, Homo sapiens
cagcatcggtttacgaaccctgctgattgttcagctagcaccatggatcagggagtaatctagatgcataactcagagatactgctggtctggttccagaccattgcaatagcaaatatcacaataaagcaagtcacactaattttttgatttcccagtgcacataaagttatatttacactatactgtagtctataaagtgtgcaataacatgtctttaaaaagtatatatcttaattttaaaatattttattgctaaaaaatactttgtaaaaatgcttatagtcatccaagctagatcttctggataaattgttgcagcttctccatcagcacttgctgcctcactttgcactttcaccttacggagatggcttagtttcctaaacttcatgaacccaacttctgctagctttcaacttttcttctgcagcttcctcacctcacccagccttcatagaattgaagagacttgg

SEQ ID NO: 50266 - DNA, 276 bp, Homo sapiens
cgtcttttaagggaaacctgggtatcagttctaaaaatacaggagatctcaatcttagggggagatcatgctagagacagaggaatagatgagctggcctttgcatggaattccattgctaaatcttactccctcatctccctctttacccatgtacctcccaccactggcagcctttcagagctcagttagtggaacaggagggtatagcagttctaagagatcatacaggaaggagacagcgaaaataataactcattctgagcactgactacg

SEQ ID NO: 50267 - DNA, 530 bp, Homo sapiens
aaggtgaacaccaaaaagtaaaaagtctgggtaataaaatctacagtagggaaagaaaatgcttctgataacttcagtgaagcttgcagtttcagctaccaagtcaggattgttacccccaccacctgcgctccctccaagaccttgtccatcacagtctgaacaagtgtcggaggccgagttactcccacagctgagcagagccccatcccaggctgcagaaagtagtccagcaaagaaggatgtactgtattctcagccaccatcaaagcccattcgtaggaaattcagaccagaaaaccaagctacagaaaaccaagagccttccactgctgcaagtgggccagcttctgcggcaaccatgaaaccgcatccaacagtccaaaagcagtcttccaaacagaagaaggccattcaaactgctatccgcaaaaataaagaggcaaacgcagtgctggctcggctgaacagtgagctccagcagcagctcaagggggtttcatcaaggaacggatttggcatttgggaaa

SEQ ID NO: 50268 - DNA, 817 bp, Homo sapiens
ccgggaggaagcggccgcgcggcagctgcggggcgtgggggtggtggtggcggcggcggtggtggcggcggcggcggcggcggcagctgaggccgaggaggcggtggctgtggcggacgcagcagcaccccagctagggatagggctccgccgcgcccccttgctggccccatggaggcggcagcggcggcggcggcggcggcagcggcagcggcagcggcgggcgggggctgtggctccgggccgccgccgctgctgctgagcgagggcgagcagcagtgctactccgagctcttcgcgcgctgtgccggcgccgcgggcgggggccccgggtctgggccccccgaggccgccagagtcgcccccggcacggccactgcggccgccggccccgtggctgacctgtttcgggcatcgcagctgcccgccgagacgctgcaccagatcacagaactgtgtggtgcaaagcgggttggttattttggtccaacacagttttacattgccctgaaattaattgctgcagcacaatctggcctcccggtacggatagagagtattaaatgtgaattgcctctgcctcgctttatgatgtcaaagaatgatggtgagatacgatttgggaacccagctgagctgcatggaactaaggttcagattccatatttaactacagaaaaaaattccttcaaaagaatggacgatgaggataaacaggtaaacagtttgttcagatgtgttcatttgattctgaccatgaaaccgcatgtagcagggcctcgtatctactgttcagcttccagcaaatctcaccatc

SEQ ID NO: 50269 - DNA, 2927 bp, Homo sapiens
ccgggaggaagcggccgcgcggcagctgcggggcgtgggggtggtggtggcggcggcggtggtggcggcggcggcggcggcggcagctgaggccgaggaggcggtggctgtggcggacgcagcagcaccccagctagggatagggctccgccgcgcccccttgctggccccatggaggcggcagcggcggcggcggcggcggcagcggcagcggcagcggcgggcgggggctgtggctccgggccgccgccgctgctgctgagcgagggcgagcagcagtgctactccgagctcttcgcgcgctgtgccggcgccgcgggcgggggccccgggtctgggccccccgaggccgccagagtcgcccccggcacggccactgcggccgccggccccgtggctgacctgtttcgggcatcgcagctgcccgccgagacgctgcaccagatcacagaactgtgtggtgcaaagcgggttggttattttggtccaacacagttttacattgccctgaaattaattgctgcagcacaatctggcctcccggtacggatagagagtattaaatgtgaattgcctctgcctcgctttatgatgtcaaagaatgatggtgagatacgatttgggaacccagctgagctgcatggaactaaggttcagattccatatttaactacagaaaaaaattccttcaaaagaatggacgatgaggataaacagcaggaaacacagtctcccacgatgtcacccctcgcctcccctccttcttccccgcctcattaccagagggtgcccttgagccatggctacagcaaactgcggagcagcgcagaacagatgcatccagcaccttatgaagctaggcagccccttgtccagcccgagggatcctcatcagggggcccaggaaccaagccccttcggcatcaggcttcccttatccggtccttttcagtggagagggaactacaggataacagcagttaccccgacgaaccctggaggataacagaagaacagcgcgagtactatgtcaatcagttccgatcccttcagccagacccaagctctttcatttcaggttctgtggccaagaacttcttcaccaaatcaaagctttccattccagaactctcctatatatgggagcttagtgatgctgactgtgatggagccctgaccctgcctgagttctgtgctgcgtttcatctcattgtggctcggaagaacggctacccattgcctgagggcctccctccaactctgcagccagaatacctgcaggcagcttttcctaagcccaaatgggactgtcaattatttgattcttattctgagtcactgccggcaaatcaacaacctcgtgacttgaatcggatggagaagacatctgttaaagacatggctgaccttcctgtccctaaccaggatgtaactagtgatgacaaacaagctttgaaaagtactatcaatgaagccttaccaaaggacgtgtctgaggatccagcaactcccaaggattccaacagtctcaaagcaagaccaagatccagatcttactctagcacctccatagaagaggccatgaaaaggggcgaggaccctcccaccccgccacctcggccacagaaaacccattccagagcctcctccttggatctgaataaagtcttccagcccagtgtgccagctaccaagtcaggattgttacccccaccacctgcgctccctccaagaccttgtccatcacagtctgaacaagtgtcggaggccgagttactcccacagctgagcagagccccatcccaggctgcagaaagtagtccagcaaagaaggatgtactgtattctcagccaccatcaaagcccattcgtaggaaattcagaccagaaaaccaagctacagaaaaccaagagccttccactgctgcaagtgggccagcttctgcggcaaccatgaaaccgcatccaacagtccaaaagcagtcttccaaacagaagaaggccattcaaactgctatccgcaaaaataaagaggcaaacgcagtgctggctcggctgaacagtgagctccagcagcagctcaaggaggttcatcaagaacgaattgcattggaaaaccaattggaacaacttcgtccggtcactgtgttgtgacccccccatggttcaagtgacagtgggtgaccttgtctgccaagatctttcttttgaatgttttgaacccaactacttgtcatagatgtttgactgtgtcaaaagctgtgagcagcaaaatataatccatatgaccttttctcttgcacttcacttgtatgttttactgtggtggaaaaaatacttcaactgattatcacacttgaaatgctaattatcagtggaatttgtctcctattcttaagtacttctgcaaggtattagatgctgctccttaccaaaaatcagtcttctagcaaataaaaataacttagagcattaaaaaaaaaaaaaaaaacaaaaaaaaaacaaaacaaagacaaagacacagaacaacagacgacaagacgaccgacccaaccgctacagcggcgagcgagagcggcgagaagcaggaacacaaagccaacacgagcgcgacaaagaaccagaagcggggcgggggagcaaccacacggcgagagccgcaccgacgacacgcaaccaaaacaccaaaacgatattaggaaacatgcaggagcacaacaagaacacgataacaaatcaaacaggcgacggagaacgcaaccagaaccaacgacgaacacaaaagaaggtagaagcagagaagagaagaagacacaatcacgaggggaacagaaacgaccacaccacaagaaaaaaccacaaacaaaaacaagcagcaagtgaggaacagaacaacacccgcgaaagagcaaggtaggcaacaaacg

SEQ ID NO: 50270 - DNA, 1599 bp, Homo sapiens
  misc_feature (52)..(52): n is a, c, g, or t
aataatcaatatcgttaaataaaaatattgggattcgcgggaagcccctganaagacatctgttaaagacatggctgaccttcctgtccctaaccaggatgtaactagtgatgacaaacaagctttgaaaagtactatcaatgaagccttaccaaaggacgtgtctgaggatccagcaactcccaaggattccaacagtctcaaagcaagaccaagatccagatcttactctagcacctccatagaagaggccatgaaaaggggcgaggaccctcccaccccgccacctcggccacagaaaacccattccagagcctcctccttggatctgaataaagtcttccagcccagtgtgccagctaccaagtcaggattgttacccccaccacctgcgctccctccaagaccttgtccatcacagtctgaacaagtgtcggaggccgagttactcccacagctgagcagagccccatcccaggctgcagaaagtagtccagcaaagaaggatgtactgtattctcagccaccatcaaagcccattcgtaggaaattcagaccagaaaaccaagctacagaaaaccaagagccttccactgctgcaagtgggccagcttctgcggcaaccatgaaaccgcatccaacagtccaaaagcagtcttccaaacagaagaaggccattcaaactgctatccgcaaaaataaagaggcaaacgcagtgctggctcggctgaacagtgagctccagcagcagctcaaggaggttcatcaagaacgaattgcattggaaaaccaattggaacaacttcgtccggtcactgtgttgtgacccccccatggttcaagtgacagtgggtgaccttgtctgccaagatctttcttttgaatgttttgaacccaactacttgtcatagatgtttgactgtgtcaaaagctgtgagcagcaaaatataatccatatgaccttttctcttgcacttcacttgtatgttttactgtggtggaaaaaatacttcaactgattatcacacttgaaatgctaattatcagtggaatttgtctcctattcttaagtacttctgcaaggtattagatgctgctccttaccaaaaatcagtcttctagcaaataaaaataacttagagcattaaaaaaaaaaaaaaaaacaaaaaaaaaacaaaacaaagacaaagacacagaacaacagacgacaagacgaccgacccaaccgctacagcggcgagcgagagcggcgagaagcaggaacacaaagccaacacgagcgcgacaaagaaccagaagcggggcgggggagcaaccacacggcgagagccgcaccgacgacacgcaaccaaaacaccaaaacgatattaggaaacatgcaggagcacaacaagaacacgataacaaatcaaacaggcgacggagaacgcaaccagaaccaacgacgaacacaaaagaaggtagaagcagagaagagaagaagacacaatcacgaggggaacagaaacgaccacaccacaagaaaaaaccacaaacaaaaacaagcagcaagtgaggaacagaacaacacccgcgaaagagcaaggtaggcaacaaacg

SEQ ID NO: 50271 - DNA, 1285 bp, Homo sapiens
cacgcgtccgtgaagccttaccaaaggacgtgtctgaggatccagctaccaagtcaggattgttacccccaccacctgcgctccctccaagaccttgtccatcacagtctgaacaagtgtcggaggccgagttactcccacagctgagcagagccccatcccaggctgcagaaagtagtccagcaaagaaggatgtactgtattctcagccaccatcaaagcccattcgtaggaaattcagaccagaaaaccaagctacagaaaaccaagagccttccactgctgcaagtgggccagcttctgcggcaaccatgaaaccgcatccaacagtccaaaagcagtcttccaaacagaagaaggccattcaaactgctatccgcaaaaataaagaggcaaacgcagtgctggctcggctgaacagtgagctccagcagcagctcaaggaggttcatcaagaacgaattgcattggaaaaccaattggaacaacttcgtccggtcactgtgttgtgacccccccatggttcaagtgacagtgggtgaccttgtctgccaagatctttcttttgaatgttttgaacccaactacttgtcatagatgtttgactgtgtcaaaagctgtgagcagcaaaatataatccatatgaccttttctcttgcacttcacttgtatgttttactgtggtggaaaaaatacttcaactgattatcacacttgaaatgctaattatcagtggaatttgtctcctattcttaagtacttctgcaaggtattagatgctgctccttaccaaaaatcagtcttctagcaaataaaaataacttagagcattaaaaaaaaaaaaaaaaacaaaaaaaaaacaaaacaaagacaaagacacagaacaacagacgacaagacgaccgacccaaccgctacagcggcgagcgagagcggcgagaagcaggaacacaaagccaacacgagcgcgacaaagaaccagaagcggggcgggggagcaaccacacggcgagagccgcaccgacgacacgcaaccaaaacaccaaaacgatattaggaaacatgcaggagcacaacaagaacacgataacaaatcaaacaggcgacggagaacgcaaccagaaccaacgacgaacacaaaagaaggtagaagcagagaagagaagaagacacaatcacgaggggaacagaaacgaccacaccacaagaaaaaaccacaaacaaaaacaagcagcaagtgaggaacagaacaacacccgcgaaagagcaaggtaggcaacaaacg

SEQ ID NO: 50272 - DNA, 2122 bp, Homo sapiens
ccgggaggaagcggccgcgcggcagctgcggggcgtgggggtggtggtggcggcggcggtggtggcggcggcggcggcggcggcagctgaggccgaggaggcggtggctgtggcggacgcagcagcaccccagctagggatagggctccgccgcgcccccttgctggccccatggaggcggcagcggcggcggcggcggcggcagcggcagcggcagcggcgggcgggggctgtggctccgggccgccgccgctgctgctgagcgagggcgagcagcagtgctactccgagctcttcgcgcgctgtgccggcgccgcgggcgggggccccgggtctgggccccccgaggccgccagagtcgcccccggcacggccactgcggccgccggccccgtggctgacctgtttcgggcatcgcagctgcccgccgagacgctgcaccagatcacagaactgtgtggtgcaaagcgggttggttattttggtccaacacagttttacattgccctgaaattaattgctgcagcacaatctggcctcccggtacggatagagagtattaaatgtgaattgcctctgcctcgctttatgatgtcaaagaatgatggtgagatacgatttgggaacccagctgagctgcatggaactaaggttcagattccatatttaactacagaaaaaaattccttcaaaagaatggacgatgaggataaacagcaggaaacacagtctcccacgatgtcacccctcgcctcccctccttcttccccgcctcattaccagagggtgcccttgagccatggctacagcaaactgcggagcagcgcagaacagatgcatccagcaccttatgaagctaggcagccccttgtccagcccgagggatcctcatcagggggcccaggaaccaagccccttcggcatcaggcttcccttatccggtccttttcagtggagagggaactacaggataacagcagttaccccgacgaaccctggaggataacagaagaacagcgcgagtactatgtcaatcagttccgatcccttcagccagacccaagctctttcatttcaggttctgtggccaagaacttcttcaccaaatcaaagctttccattccagaactctcctatatatgggagcttagtgatgctgactgtgatggagccctgaccctgcctgagttctgtgctgcgtttcatctcattgtggctcggaagaacggctacccattgcctgagggcctccctccaactctgcagccagaatacctgcaggcagcttttcctaagcccaaatgggactgtcaattatttgattcttattctgagtcactgccggcaaatcaacaacctcgtgacttgaatcggatggagaagacatctgttaaagacatggctgaccttcctgtccctaaccaggatgtaactagtgatgacaaacaagctttgaaaagtactatcaatgaagccttaccaaaggacgtgtctgaggatccagcaactcccaaggattccaacagtctcaaagcaagaccaagatccagatcttactctagcacctccatagaagaggccatgaaaaggggcgaggaccctcccaccccgccacctcggccacagaaaacccattccagagcctcctccttggatctgaataaagtcttccagcccagtgtgccagctaccaagtcaggattgttacccccaccacctgcgctccctccaagaccttgtccatcacagtctgaacaagtgtcggaggccgagttactcccacagctgagcagagccccatcccaggctgcagaaagtagtccagcaaagaaggatgtactgtattctcagccaccatcaaagcccattcgtaggaaattcagaccagaaaaccaagctacagaaaaccaagagccttccactgctgcaagtgggccagcttctgcggcaaccatgaaaccgcatccaacagtccaaaagcagtcttccaaacagaagaaggccattcaaactgctatccgcaaaaataaagaggcaaacgcagtgctggctcggctgaacagtgagctccagcagcagctcaagggggtttcatcaaggaacggatttggcatttgggaaa

SEQ ID NO: 50273 - DNA, 441 bp, Homo sapiens
gatggcaatgatcagtgggagaatgaggtggggaagtgggtaaccaatgtcagaaaactcagaatgtgtctgccagggatgggcatggcgtccacccaatctcccaggggaaaggagacctgcactcaccccagcacctccctcctcagttcctatgaaaaggcccagtttggcccctgattcctgctcagctctcagtcccttcattatgtctccttttagcatctccaaaaccccactcagaattctacctggtccctgacgcctgtcctggctgccccactcaaatgatttatcctacctcggagcttacagaacatccccaactactcaagagccaggcttagggtgtacagaatctggatggaaaagtgtgcaggagcagggagtggggagcctgatgcccctgtcaggccatatccaccctcttgccagctgagc

SEQ ID NO: 50274 - DNA, 558 bp, Homo sapiens
ttaagtgaagtgtttctcccaggtgtgcacagggtgtggcttccaaggggaatgtggatgctggaatgagggaggcagccacctaggccggtcaagtcagaggcccagcaaggagaaagcgagccaaggcaaacgccgacagaagagaacgataaatccgcggcgcactcggcagaacgtccaccgcaccgcataatttagcggggcaatgccgccgggagtccacgccaagttaatggaatatttcctgtaaatattattttcccttcctgtctcatcatctcatttcattcaaaaatctttactaatccgggggagtgaaagtaatgcatcaatttccagagccaatgcccctgcttccgaaatacccttaggaatcactggaagccaccgcggctgcttagggacaggggggcaggccgtttactctggttccttctcctaatgcctcagaggggaccccatagtgctcctaattgtgcatctaagtgtacataaaagcccccctaattgcacatcaaataaataagtaaatgctgtctgctgaatatgtaacaa

SEQ ID NO: 50275 - DNA, 600 bp, Homo sapiens
ttaagtgaagtgtttctcccaggtgtgcacagggtgtggcttccaaggggaatgtggatgctggaatgagggaggcagccacctaggccggtcaagtcagaggcccagcaaggagaaagcgagccaaggcaaacgccgacagaagagaacgataaatccgcggcgcactcggcagaacgtccaccgcaccgcataatttagcggggcaatgccgccgggagtccacgccaagttaatggaatatttcctgtaaatataggttggtgtatgtcatcccattttgcagaggagaaattgatgaaagctacctggctagtcactgcagaggcttggctgggatgctaagacccactgccttggttaccaggctgcagcctgcaggttgcccatccaatgtgcgaactccagcgggggcaggaaagcccccgaagaatggtgctgtttgctttctggtcttaataaatctcatgctgggagaatcctgttttagtgattagcatcagtatatccagtcctcggaaacaaaaatatttccaggtcccagaagagggtccagagtaacacagctttactgatctggtttcaataaatcttgttaac

SEQ ID NO: 50276 - DNA, 511 bp, Homo sapiens
ttaagtgaagtgtttctcccaggtgtgcacagggtgtggcttccaaggggaatgtggatgctggaatgagggaggcagccacctaggccggtcaagtcagaggcccagcaaggagaaagcgagccaaggcaaacgccgacagaagagaacgataaatccgcggcgcactcggcagaacgtccaccgcaccgcataatttagcggggcaattattttcccttcctgtctcatcatctcatttcattcaaaaatctttactaatccgggggagtgaaagtaatgcatcaatttccagagccaatgcccctgcttccgaaatacccttaggaatcactggaagccaccgcggctgcttagggacaggggggcaggccgtttactctggttccttctcctaatgcctcagaggggaccccatagtgctcctaattgtgcatctaagtgtacataaaagcccccctaattgcacatcaaataaataagtaaatgctgtctgctgaatatgtaacaa

SEQ ID NO: 50277 - DNA, 428 bp, Homo sapiens
acgtaaggtctgtagagagtccgggaacacagcagtgccccctcagaagagagtgggcagctactgacagctcccagcgttctccccgcaggatcctaaaatagatggcacttaaaggccttggttgagggtgaggagggtgctggtttgtggtgggtaacacaggcgtcttccatgaaggacagcacacagtgcctgctttgtagctgtggccagaacaggagcgcacgcaccagcagagaccttggcttactcctcttggtcgctcttactgccgttaaattgtattctactgaaattcttgtgattctcagcaaacacagtgatgtttcttttgtccaaaggacaaacgtggagttatcgtagtggttaaaatactcattgggtcttacctgtaggaagggaagaaccaagccaaggactgtggc

SEQ ID NO: 50278 - DNA, 579 bp, Homo sapiens
gacggcgttttgttcttgttgcccaggatgtagtgcagtggcgccatctcagctcactgcaagctccgcctaccacattcaagtgattctcctgccgcagcctcccgagtagctgggattataggcacccgccaccacgcccggctaattttttgtatgtttagtagagacagggtttcgccatgttgggcaggctggtctcaaactcctgacctcaggtgatctgcccgtctcagcctcccaaagtgctaggattattggcccaaagtatattcttaatctgccagttcttaactgccttacagctataagcctagctcaagcccctactgtctcacactcctactgtctcacatctggactaaggcagaaacccaggaatgggcttccctgattctctttctgaccttcagtagtccattctaaacatagcaaccacagcgagcattcagtaactgaaatgtgatcatgtgcctctcccctgcttcccactgcagttagagtaaaatccacactcctgcgggcccagtgtgatggggacttgctaacctcctaataaaaagaaaaacatttttaaaa

SEQ ID NO: 50279 - DNA, 402 bp, Homo sapiens
aatcagctcggtacctaggggcttgagctaggcttatagctgtaaggcagttaactggcagattaagaatatactttgggccaataatcctagcactttgggaggctgagacgggcagatcacctgaggtcaggagtttgagaccagcctgcccaacatggcgaaaccctgtctcacatctggactaaggcagaaacccaggaatgggcttccctgattctctttctgaccttcagtagtccattctaaacatagcaaccacagcgagcattcagtaactgaaatgtgatcatgtgcctctcccctgcttcccactgcagttagagtaaaatccacactcctgcgggcccagtgtgatggggacttgctaacctcctaataaaaagaaaaacatttttaaaa

SEQ ID NO: 50280 - DNA, 421 bp, Homo sapiens
ggttaatcaaccgatatgaacagtgctgacctgtagccctgccacatccccgcagtgagagcaagacaaggcacaggagagctgatcccaacacatatctaagcccatgggtcacagcaggtttcaaccatttagagaagaattttggattcttcattgttgcctgttcttatcaatgttactgattcattcagttcattcattcaacagatgtattttcagttttctgctaatatgccagacacagtgtaccagagactctgtggagggcagaaattaaccaggtggagggaagagcattctgggagatgggaatagcaggtgcaaaggcctggcaaataggagtctggcggaggttgcagtgagctgcgatcacaccactgcactccaccctgggcaacagagtgagactctgtctcaa

SEQ ID NO: 50281 - DNA, 782 bp, Homo sapiens
accccttagtggtgtccccattagggactcctcctatctgccccacagcacactgcagctcggcctttttactgtctccgccaactagactgcaaggtccatacattgtccccatggcaactagagcataataagtgttcagtaaagatttgttgagtcaatgtgtgaattttttgtttttttaagagacagggtctcctgctgctgcccaggctggtctcggaactcctgggctcaagggatcctcctgcctcagcctcccaaagcgcaaggattacaggcatgagccacaaggcagggccattgtgtgaattcttaacttgcaaatcagtcctgtcctcggccccctaaactcccacaaaggcttcatcatagagccccagctcctagcagggcatggaaggccctccatagtgaggtccccgctgactcctccagcctcactcctccaattcctgccctcactatcttgtaacacaacaagactcgtggcacagcacgtaagatgcagtttccagcctccatactttgcccagctatccccctcccctcctgggtaggaagttttcctgacaccccaccaagaccaccacaagtcaggatcttttctgggcattgtttgtttgttttgttttgttttgtatcagaatctccctctgtcacccaagttggagtgcagcggcatgatctcggctcactgcaacctctgtctcccaggtccaagtgattctcgtgcctcaacctcccaagtagcttggactacaggtgtgcaccaccatgcc

SEQ ID NO: 50282 - DNA, 888 bp, Homo sapiens
tccagctgctgcaagccccagtgctgccagtctgtgtgctgccagcccacctgctgccaccctagctgctgcatctccagctgctgccgccccagctgctgtgtgtccagctgctgcaagccccagtgctgccagtctgtgtgctgccagcccacctgctgccaccctagctgcagcatctccagctgctgccgcccctcttgctgtgaatccagctgctgccgcccctgctgctgcgtgcgtccagtctgtggccgagtctcctgccacaccacttgctatcgcccaacctgtgtcatctccacctgtccccgccccgtgtgctgcgcctcctcttgctgctgagcccactgccctggctcatctctcccttcgccgctggtccacaaatgtagaccattcttctgtgctgaatattaggacacatggagtgggattgatgtcattcagcagggtggacctcatgtatccaatgagcccatcaccatcccgctgactctgtgagaacattctggttcattttaaactccctcccttgctttatttttcttccagtcatggcaccaaatacgaattaatttgtaatccactagctaagaaataattccaatcctctaaattcctcattttttaaaatcattttgagcctacagaatatccttcccaattaggtacacattatctccctttcaaacatactatttgtctgtcagcctttcagtcattcttttcttttggaaaggtaggaggctgcccctcccgtgctctcccgctttctccctgctccctctttctctcactgttcaagtttgccagaatttttctattttattagttctttatctttattgtgttcacaaaatatattgtattaaacttttcatttag

SEQ ID NO: 50283 - DNA, 214 bp, Homo sapiens
agtttagtggcagagggaggaaatcagagcttttgcctggtggatcacatttccttggagaagtagaattcaagggcttggactgaaagtaaaggtggtggggttgttgcaggcttaagttcaggggcaatggggagaaggtcccttctgtgtttcccatgtatgttcttatgtgaagaagggttgcccgggcctaggagtgtggagcttgtag

SEQ ID NO: 50284 - DNA, 233 bp, Homo sapiens
gacgtgagcagttacatcataaaaagaagaaatgccactcaaacctgtgattgccagtttaggagaggctttgcctcttgggccattgcttcatgttcccattttgggtgccttgtctataaaggggaggaaggggtgtcgggatggctctctgggttggatagcgggaggagactgcagcccacatctggttccagcctcttgtcacacagttgagggagtggagcccagct

SEQ ID NO: 50285 - DNA, 4707 bp, Homo sapiens
  misc_feature (1)..(2): n is a, c, g, or t
nngggatcttgacggagagtgcgggggatgaaggcgggagctgagggctggagagtctctgttgacatagtaactcttcagctccgtctcccttgctctccgctcttacgcttcgctaccaccagcggccccgcctgtgccctctctgcccgggcgccccagacgcatcctcgcggggtctcctcggcctgacctgctcaggtcaagatcctctttgcacccccttaagtggtgacttttccccgggccagtgggcgagccacttgcggcgggcgtctgcaccccctgcttcaccgtcgtcccctgggcaccggtctgcccaggtccagttcggccgctgacgcgaaccctccgcaccgggtccccgctggaactgcccactcggctcccccgggagcggggcccaggccagtcgggcgttcccgccatgagccagagcccggcgttcgggccccggaggggcagttctccccggggcgctgccggagccgctgcgcggcgcaacgagagccaggactatctgctcatggactcggagctgggagaagacggctgcccgcaagccccgctgccttgctacggctactacccctgcttccggggatctgacaacagactggctcaccggcggcagacagttctccgtgagaaggggagaaggttagctaatcgaggaccagcatacatgtttagtgatcgctccacaagcctatctatagaggaggaacgctttttggatgcagctgaatatggtaacatcccagtggtgcggaagatgttagaagaatgccactcactcaacgttaactgtgtggattacatgggccagaatgccctacagttggcagtggccaatgagcatctggaaattacagaacttcttctcaagaaagaaaacctctctcgagttggggatgctttgcttctagctattagtaaaggttatgttcggattgtggaagcaattctcagtcatccggcttttgctgaaggcaagaggttagcaaccagccctagccagtctgaactccagcaagatgatttttatgcctatgatgaagatgggacacggttctcccatgatgtgactccaatcattctggctgcccactgccaggaatatgaaattgtgcataccctcctgcggaagggtgctaggattgaacggcctcatgattatttctgcaagtgcaatgactgcaaccagaaacagaagcatgactcgtttagccactccagatctaggattaatgcctataaaggcctggcaagtccggcttacctgtcattgtctagtgaagatccagtcatgacggctttagaacttagcaatgaactggcagttctggccaatattgagaaagagttcaagaatgactacaaaaaactgtcaatgcagtgcaaagactttgttgttggactccttgatctgtgcagaaacactgaagaagtcgaggccattctgaatggggatgttgaaacgctccagagtggtgatcacggtcgcccaaatctcagccgtttaaaacttgccattaaatatgaagtaaaaaaatttgtagctcatccaaactgccaacagcaacttctctccatttggtatgagaatctttctggtttacgacagcagacaatggcggtcaagttccttgtggtccttgctgttgccattggactgcccttcctggctctcatttactggtttgctccatgcagcaagatggggaagataatgcgtggaccattcatgaagtttgtagcacacgcagcctccttcaccatttttctgggactgctagtcatgaatgcagctgacagatttgaaggcacaaaactccttcctaatgaaaccagcacagataatgcaaaacagctgttcaggatgaaaacatcctgcttctcatggatggagatgctcattatatcctgggtaataggcatgatatgggctgaatgtaaagaaatctggactcagggccccaaggaatatttgtttgagttgtggaacatgcttgattttggtatgttagcaattttcgcagcatcattcattgcgagattcatggcattttggcatgcttccaaagcccagagcatcattgacgcaaatgatactttgaaggacttgacgaaagtaacattgggagacaatgtgaaatactacaatttggccaggataaagtgggacccctctgatcctcaaataatatctgaaggtctttatgcaattgctgtagttttaagtttctctaggatagcttatattttaccagcaaatgaaagctttggacctctgcagatatcacttggaagaacagtcaaagacatcttcaagttcatggtcatattcattatggtgtttgtggcctttatgattggaatgttcaatctctactcctactacattggtgcaaaacaaaatgaagccttcacaacagttgaagagagttttaagacactgttctgggctatatttggactttctgaagtgaaatcagtggtcatcaactataaccacaaattcattgaaaacattggttacgttctttatggagtctataatgttacgatggtcattgttttgctaaatatgttaattgccatgatcaacagttcattccaggaaattgaggatgacgctgatgtggagtggaaatttgcaagggccaaactctggttttcctactttgaggagggcagaacacttcctgtacccttcaatctggtgccgagtccaaagtccctgttttatctcttactgaagcttaaaaaatggatttctgagctgttccagggccataaaaaaggtttccaggaagatgcagagatgaacaagataaatgaagaaaagaaacttggaattttaggaagtcatgaagacctttcaaaattatcacttgacaaaaaacaggttgggcacaataaacaaccaagtataaggagctcagaagatttccatctaaatagtttcaataatcctccaagacaatatcagaaaataatgaaaaggctcattaaaagatatgtactgcaggcccagatagataaggagagtgatgaagtgaacgaaggggaactgaaggaaattaagcaggacatctcaagtctccgctatgaactccttgaagaaaaatctcagaatacagaagacctagcagaacttattagagaacttggagagaaattatccatggaaccaaatcaagaggaaaccaatagataatgcgaagacttccttagaaattcatatttatttgtccacttgaagccatattattttctgatttattttcttaagtgccaatgggcccaccttttaaacaagaaaacgttaaataacttgggccatcctatcatctggagccctagtatctaatttttttggtgattaaactccattgttcagggtaaaggctgtagataatgaggaaaattatgcccagttgtttggtgcttgttttataaactgctttcttggatataactaactcttgtgatgatgtcattgccatgtagtgtctgcctgaaaatgggtcccagcggacaggggctgacccacgttactccccatgcggtttttcctctgaagtttatttcaggttccttcttgcctgctctgtggatcccctgctggggactcccagctctgaaatttgggaaaaagtagcccatgggcctttagaatgctttaatcctttctttagaatgctgtttaaacaccatttaccctacttatccctcaatgcacatgattgataccgttcatacaaaatggtcttacatctatgtaaaattttctgattcatctatttgaaaacattacacttaacaatgaaaaaagtttttcctccactgaaccctggaaacatggtccagttttgtgtgtgtgcgtgtgtgtaaatgtgtacacacagacataaagtacttgccctatttagtttgtggctaatgtggacacacaaaagctctttatgttataaatttttattgtcactaaaaaattttactgtctaaataagtaccttttattggagaaaaatcaaaaccccaaacaaacactgtggttgtttggttccattatagcacaattttgtgccatttctgggagcatttacagatgaatccccacacttagccattgaatgtaaaggggaaaaataaggtgagaatttgtaaatacttatctgttattttcaatatgttctatccttctacccaaatatataaaacaggaatttgcattcatgtgcatttaccaagaggttgttgttgttacttactgatcatgtgaagtggtgtcttaaacaactaaaagcgatgaaggttcatatgtttactcaaagaccattggcattcagaggatgctggacattaactggaactgctacttccaattcaataatgggagatttcaaatgcaaatctttaacttcatcttaaagatgaaatggttgcagaaaatctgtttagctccaactttggcttaatttaaatcaaagaacatttatgtaaccagatcagaaaatacagctgaaaatttatattcagtgattttgtatttgtggatactacttatggaaaagttacttggtgatacataaagatcgattttcaaatattttgtgacagtatttgaatcagcagttgtaaaaaatcaacctcatactgaatgcactatcagcaaattaaaataatctaacatccaca

SEQ ID NO: 50286 - DNA, 3486 bp, Homo sapiens
  misc_feature (1)..(2): n is a, c, g, or t
nngggatcttgacggagagtgcgggggatgaaggcgggagctgagggctggagagtctctgttgacatagtaactcttcagctccgtctcccttgctctccgctcttacgcttcgctaccaccagcggccccgcctgtgccctctctgcccgggcgccccagacgcatcctcgcggggtctcctcggcctgacctgctcaggtcaagatcctctttgcacccccttaagtggtgacttttccccgggccagtgggcgagccacttgcggcgggcgtctgcaccccctgcttcaccgtcgtcccctgggcaccggtctgcccaggtccagttcggccgctgacgcgaaccctccgcaccgggtccccgctggaactgcccactcggctcccccgggagcggggcccaggccagtcgggcgttcccgccatgagccagagcccggcgttcgggccccggaggggcagttctccccggggcgctgccggagccgctgcgcggcgcaacgagagccaggactatctgctcatggactcggagctgggagaagacggctgcccgcaagccccgctgccttgctacggctactacccctgcttccggggatctgacaacagactggctcaccggcggcagacagttctccgtgagaaggggagaaggttagctaatcgaggaccagcatacatgtttagtgatcgctccacaagcctatctatagaggaggaacgctttttggatgcagctgaatatggtaacatcccagtggtgcggaagatgttagaagaatgccactcactcaacgttaactgtgtggattacatgggccagaatgccctacagttggcagtggccaatgagcatctggaaattacagaacttcttctcaagaaagaaaacctctctcgagttggggatgctttgcttctagctattagtaaaggttatgttcggattgtggaagcaattctcagtcatccggcttttgctgaaggcaagaggttagcaaccagccctagccagtctgaactccagcaagatgatttttatgcctatgatgaagatgggacacggttctcccatgatgtgactccaatcattctggctgcccactgccaggaatatgaaattgtgcataccctcctgcggaagggtgctaggattgaacggcctcatgattatttctgcaagtgcaatgactgcaaccagaaacagaagcatgactcgtttagccactccagatctaggattaatgcctataaaggcctggcaagtccggcttacctgtcattgtctagtgaagatccagtcatgacggctttagaacttagcaatgaactggcagttctggccaatattgagaaagagttcaagaatgactacaaaaaactgtcaatgcagtgcaaagactttgttgttggactccttgatctgtgcagaaacactgaagaagtcgaggccattctgaatggggatgttgaaacgctccagagtggtgatcacggtcgcccaaatctcagccgtttaaaacttgccattaaatatgaagtaaaaaaatttgtagctcatccaaactgccaacagcaacttctctccatttggtatgagaatctttctggtttacgacagcagacaatggcggtcaagttccttgtggtccttgctgttgccattggactgcccttcctggctctcatttactggtttgctccatgcagcaagatggggaagataatgcgtggaccattcatgaagtttgtagcacacgcagcctccttcaccatttttctgggactgctagtcatgaatgcagctgacagatttgaaggcacaaaactccttcctaatgaaaccagcacagataatgcaaaacagctgttcaggatgaaaacatcctgcttctcatggatggagatgctcattatatcctgggtaataggcatgatatgggctgaatgtaaagaaatctggactcagggccccaaggaatatttgtttgagttgtggaacatgcttgattttggtatgttagcaattttcgcagcatcattcattgcgagattcatggcattttggcatgcttccaaagcccagagcatcattgacgcaaatgatactttgaaggacttgacgaaagtaacattgggagacaatgtgaaatactacaatttggccaggataaagtgggacccctctgatcctcaaataatatctgaaggtctttatgcaattgctgtagttttaagtttctctaggatagcttatattttaccagcaaatgaaagctttggacctctgcagatatcacttggaagaacagtcaaagacatcttcaagttcatggtcatattcattatggtgtttgtggcctttatgattggaatgttcaatctctactcctactacattggtgcaaaacaaaatgaagccttcacaacagttgaagagagttttaagacactgttctgggctatatttggactttctgaagtgaaatcagtggtcatcaactataaccacaaattcattgaaaacattggttacgttctttatggagtctataatgttacgatggtcattgttttgctaaatatgttaattgccatgatcaacagttcattccaggaaattgaggatgacgctgatgtggagtggaaatttgcaagggccaaactctggttttcctactttgaggagggcagaacacttcctgtacccttcaatctggtgccgagtccaaagtccctgttttatctcttactgaagcttaaaaaatggatttctgagctgttccagggccataaaaaaggtttccaggaagatgcagagatgaacaagataaatgaagaaaagaaacttggaattttaggaagtcatgaagacctttcaaaattatcacttgacaaaaaacaggttgggcacaataaacaaccaagtataaggagctcagaagatttccatctaaatagtttcaataatcctccaagacaatatcagaaaataatgaaaaggctcattaaaagatatgtactgcaggcccagatagataaggagagtgatgaagtgaacgaaggggaactgaaggaaattaagcaggacatctcaagtctccgctatgaactccttgaagaaaaatctcagaatacagaagacctagcagaacttattagagaacttggagagaaattatccatggaaccaaatcaagaggaaaccaatagataatgcgaagacttccttagaaattcatatttatttgtccacttgaagccatattattttctgatttattttcttaagtgccaatgggcccaccttttaaacaagaaaacgttaaataacttgggccatcctatcatctggagccctagtatctaatttttttggtgattaaactccattgttcagggtaaaggctgtagataatgaggaaaattatgcccagttgtttggtgcttgttttataaactgctttcttggatataact

SEQ ID NO: 50287 - DNA, 4542 bp, Homo sapiens
  misc_feature (1)..(2): n is a, c, g, or t
nngggatcttgacggagagtgcgggggatgaaggcgggagctgagggctggagagtctctgttgacatagtaactcttcagctccgtctcccttgctctccgctcttacgcttcgctaccaccagcggccccgcctgtgccctctctgcccgggcgccccagacgcatcctcgcggggtctcctcggcctgacctgctcaggtcaagatcctctttgcacccccttaagtggtgacttttccccgggccagtgggcgagccacttgcggcgggcgtctgcaccccctgcttcaccgtcgtcccctgggcaccggtctgcccaggtccagttcggccgctgacgcgaaccctccgcaccgggtccccgctggaactgcccactcggctcccccgggagcggggcccaggccagtcgggcgttcccgccatgagccagagcccggcgttcgggccccggaggggcagttctccccggggcgctgccggagccgctgcgcggcgcaacgagagccaggactatctgctcatggactcggagctgggagaagacggctgcccgcaagccccgctgccttgctacggctactacccctgcttccggggatctgacaacagactggctcaccggcggcagacagttctccgtgagaaggggagaaggttagctaatcgaggaccagcatacatgtttagtgatcgctccacaagcctatctatagaggaggaacgctttttggatgcagctgaatatggtaacatcccagtggtgcggaagatgttagaagaatgccactcactcaacgttaactgtgtggattacatgggccagaatgccctacagttggcagtggccaatgagcatctggaaattacagaacttcttctcaagaaagaaaacctctctcgagttggggatgctttgcttctagctattagtaaaggttatgttcggattgtggaagcaattctcagtcatccggcttttgctgaaggcaagaggttagcaaccagccctagccagtctgaactccagcaagatgatttttatgcctatgatgaagatgggacacggttctcccatgatgtgactccaatcattctggctgcccactgccaggaatatgaaattgtgcataccctcctgcggaagggtgctaggattgaacggcctcatgattatttctgcaagtgcaatgactgcaaccagaaacagaagcatgactcgtttagccactccagatctaggattaatgcctataaaggcctggcaagtccggcttacctgtcattgtctagtgaagatccagtcatgacggctttagaacttagcaatgaactggcagttctggccaatattgagaaagagttcaagaatgactacaaaaaactgtcaatgcagtgcaaagactttgttgttggactccttgatctgtgcagaaacactgaagaagtcgaggccattctgaatggggatgttgaaacgctccagagtggtgatcacggtcgcccaaatctcagccgtttaaaacttgccattaaatatgaagtaaaaaaaatggggaagataatgcgtggaccattcatgaagtttgtagcacacgcagcctccttcaccatttttctgggactgctagtcatgaatgcagctgacagatttgaaggcacaaaactccttcctaatgaaaccagcacagataatgcaaaacagctgttcaggatgaaaacatcctgcttctcatggatggagatgctcattatatcctgggtaataggcatgatatgggctgaatgtaaagaaatctggactcagggccccaaggaatatttgtttgagttgtggaacatgcttgattttggtatgttagcaattttcgcagcatcattcattgcgagattcatggcattttggcatgcttccaaagcccagagcatcattgacgcaaatgatactttgaaggacttgacgaaagtaacattgggagacaatgtgaaatactacaatttggccaggataaagtgggacccctctgatcctcaaataatatctgaaggtctttatgcaattgctgtagttttaagtttctctaggatagcttatattttaccagcaaatgaaagctttggacctctgcagatatcacttggaagaacagtcaaagacatcttcaagttcatggtcatattcattatggtgtttgtggcctttatgattggaatgttcaatctctactcctactacattggtgcaaaacaaaatgaagccttcacaacagttgaagagagttttaagacactgttctgggctatatttggactttctgaagtgaaatcagtggtcatcaactataaccacaaattcattgaaaacattggttacgttctttatggagtctataatgttacgatggtcattgttttgctaaatatgttaattgccatgatcaacagttcattccaggaaattgaggatgacgctgatgtggagtggaaatttgcaagggccaaactctggttttcctactttgaggagggcagaacacttcctgtacccttcaatctggtgccgagtccaaagtccctgttttatctcttactgaagcttaaaaaatggatttctgagctgttccagggccataaaaaaggtttccaggaagatgcagagatgaacaagataaatgaagaaaagaaacttggaattttaggaagtcatgaagacctttcaaaattatcacttgacaaaaaacaggttgggcacaataaacaaccaagtataaggagctcagaagatttccatctaaatagtttcaataatcctccaagacaatatcagaaaataatgaaaaggctcattaaaagatatgtactgcaggcccagatagataaggagagtgatgaagtgaacgaaggggaactgaaggaaattaagcaggacatctcaagtctccgctatgaactccttgaagaaaaatctcagaatacagaagacctagcagaacttattagagaacttggagagaaattatccatggaaccaaatcaagaggaaaccaatagataatgcgaagacttccttagaaattcatatttatttgtccacttgaagccatattattttctgatttattttcttaagtgccaatgggcccaccttttaaacaagaaaacgttaaataacttgggccatcctatcatctggagccctagtatctaatttttttggtgattaaactccattgttcagggtaaaggctgtagataatgaggaaaattatgcccagttgtttggtgcttgttttataaactgctttcttggatataactaactcttgtgatgatgtcattgccatgtagtgtctgcctgaaaatgggtcccagcggacaggggctgacccacgttactccccatgcggtttttcctctgaagtttatttcaggttccttcttgcctgctctgtggatcccctgctggggactcccagctctgaaatttgggaaaaagtagcccatgggcctttagaatgctttaatcctttctttagaatgctgtttaaacaccatttaccctacttatccctcaatgcacatgattgataccgttcatacaaaatggtcttacatctatgtaaaattttctgattcatctatttgaaaacattacacttaacaatgaaaaaagtttttcctccactgaaccctggaaacatggtccagttttgtgtgtgtgcgtgtgtgtaaatgtgtacacacagacataaagtacttgccctatttagtttgtggctaatgtggacacacaaaagctctttatgttataaatttttattgtcactaaaaaattttactgtctaaataagtaccttttattggagaaaaatcaaaaccccaaacaaacactgtggttgtttggttccattatagcacaattttgtgccatttctgggagcatttacagatgaatccccacacttagccattgaatgtaaaggggaaaaataaggtgagaatttgtaaatacttatctgttattttcaatatgttctatccttctacccaaatatataaaacaggaatttgcattcatgtgcatttaccaagaggttgttgttgttacttactgatcatgtgaagtggtgtcttaaacaactaaaagcgatgaaggttcatatgtttactcaaagaccattggcattcagaggatgctggacattaactggaactgctacttccaattcaataatgggagatttcaaatgcaaatctttaacttcatcttaaagatgaaatggttgcagaaaatctgtttagctccaactttggcttaatttaaatcaaagaacatttatgtaaccagatcagaaaatacagctgaaaatttatattcagtgattttgtatttgtggatactacttatggaaaagttacttggtgatacataaagatcgattttcaaatattttgtgacagtatttgaatcagcagttgtaaaaaatcaacctcatactgaatgcactatcagcaaattaaaataatctaacatccaca

SEQ ID NO: 50288 - DNA, 4359 bp, Homo sapiens
  misc_feature (1)..(2): n is a, c, g, or t
nngggatcttgacggagagtgcgggggatgaaggcgggagctgagggctggagagtctctgttgacatagtaactcttcagctccgtctcccttgctctccgctcttacgcttcgctaccaccagcggccccgcctgtgccctctctgcccgggcgccccagacgcatcctcgcggggtctcctcggcctgacctgctcaggtcaagatcctctttgcacccccttaagtggtgacttttccccgggccagtgggcgagccacttgcggcgggcgtctgcaccccctgcttcaccgtcgtcccctgggcaccggtctgcccaggtccagttcggccgctgacgcgaaccctccgcaccgggtccccgctggaactgcccactcggctcccccgggagcggggcccaggccagtcgggcgttcccgccatgagccagagcccggcgttcgggccccggaggggcagttctccccggggcgctgccggagccgctgcgcggcgcaacgagagccaggactatctgctcatggactcggagctgggagaagacggctgcccgcaagccccgctgccttgctacggctactacccctgcttccggggatctgacaacagactggctcaccggcggcagacagttctccgtgagaaggggagaaggttagctaatcgaggaccagcatacatgtttagtgatcgctccacaagcctatctatagaggaggaacgctttttggatgcagctgaatatggtaacatcccagtggtgcggaagatgttagaagaatgccactcactcaacgttaactgtgtggattacatgggccagaatgccctacagttggcagtggccaatgagcatctggaaattacagaacttcttctcaagaaagaaaacctctctcgagttggggatgctttgcttctagctattagtaaaggttatgttcggattgtggaagcaattctcagtcatccggcttttgctgaaggcaagaggttagcaaccagccctagccagtctgaactccagcaagatgatttttatgcctatgatgaagatgggacacggttctcccatgatgtgactccaatcattctggctgcccactgccaggaatatgaaattgtgcataccctcctgcggaagggtgctaggattgaacggcctcatgattatttctgcaagtgcaatgactgcaaccagaaacagaagcatgactcgtttagccactccagatctaggattaatgcctataaaggcctggcaagtccggcttacctgtcattgtctagtgaagatccagtcatgacggctttagaacttagcaatgaactggcagttctggccaatattgagaaagagttcaagatggggaagataatgcgtggaccattcatgaagtttgtagcacacgcagcctccttcaccatttttctgggactgctagtcatgaatgcagctgacagatttgaaggcacaaaactccttcctaatgaaaccagcacagataatgcaaaacagctgttcaggatgaaaacatcctgcttctcatggatggagatgctcattatatcctgggtaataggcatgatatgggctgaatgtaaagaaatctggactcagggccccaaggaatatttgtttgagttgtggaacatgcttgattttggtatgttagcaattttcgcagcatcattcattgcgagattcatggcattttggcatgcttccaaagcccagagcatcattgacgcaaatgatactttgaaggacttgacgaaagtaacattgggagacaatgtgaaatactacaatttggccaggataaagtgggacccctctgatcctcaaataatatctgaaggtctttatgcaattgctgtagttttaagtttctctaggatagcttatattttaccagcaaatgaaagctttggacctctgcagatatcacttggaagaacagtcaaagacatcttcaagttcatggtcatattcattatggtgtttgtggcctttatgattggaatgttcaatctctactcctactacattggtgcaaaacaaaatgaagccttcacaacagttgaagagagttttaagacactgttctgggctatatttggactttctgaagtgaaatcagtggtcatcaactataaccacaaattcattgaaaacattggttacgttctttatggagtctataatgttacgatggtcattgttttgctaaatatgttaattgccatgatcaacagttcattccaggaaattgaggatgacgctgatgtggagtggaaatttgcaagggccaaactctggttttcctactttgaggagggcagaacacttcctgtacccttcaatctggtgccgagtccaaagtccctgttttatctcttactgaagcttaaaaaatggatttctgagctgttccagggccataaaaaaggtttccaggaagatgcagagatgaacaagataaatgaagaaaagaaacttggaattttaggaagtcatgaagacctttcaaaattatcacttgacaaaaaacaggttgggcacaataaacaaccaagtataaggagctcagaagatttccatctaaatagtttcaataatcctccaagacaatatcagaaaataatgaaaaggctcattaaaagatatgtactgcaggcccagatagataaggagagtgatgaagtgaacgaaggggaactgaaggaaattaagcaggacatctcaagtctccgctatgaactccttgaagaaaaatctcagaatacagaagacctagcagaacttattagagaacttggagagaaattatccatggaaccaaatcaagaggaaaccaatagataatgcgaagacttccttagaaattcatatttatttgtccacttgaagccatattattttctgatttattttcttaagtgccaatgggcccaccttttaaacaagaaaacgttaaataacttgggccatcctatcatctggagccctagtatctaatttttttggtgattaaactccattgttcagggtaaaggctgtagataatgaggaaaattatgcccagttgtttggtgcttgttttataaactgctttcttggatataactaactcttgtgatgatgtcattgccatgtagtgtctgcctgaaaatgggtcccagcggacaggggctgacccacgttactccccatgcggtttttcctctgaagtttatttcaggttccttcttgcctgctctgtggatcccctgctggggactcccagctctgaaatttgggaaaaagtagcccatgggcctttagaatgctttaatcctttctttagaatgctgtttaaacaccatttaccctacttatccctcaatgcacatgattgataccgttcatacaaaatggtcttacatctatgtaaaattttctgattcatctatttgaaaacattacacttaacaatgaaaaaagtttttcctccactgaaccctggaaacatggtccagttttgtgtgtgtgcgtgtgtgtaaatgtgtacacacagacataaagtacttgccctatttagtttgtggctaatgtggacacacaaaagctctttatgttataaatttttattgtcactaaaaaattttactgtctaaataagtaccttttattggagaaaaatcaaaaccccaaacaaacactgtggttgtttggttccattatagcacaattttgtgccatttctgggagcatttacagatgaatccccacacttagccattgaatgtaaaggggaaaaataaggtgagaatttgtaaatacttatctgttattttcaatatgttctatccttctacccaaatatataaaacaggaatttgcattcatgtgcatttaccaagaggttgttgttgttacttactgatcatgtgaagtggtgtcttaaacaactaaaagcgatgaaggttcatatgtttactcaaagaccattggcattcagaggatgctggacattaactggaactgctacttccaattcaataatgggagatttcaaatgcaaatctttaacttcatcttaaagatgaaatggttgcagaaaatctgtttagctccaactttggcttaatttaaatcaaagaacatttatgtaaccagatcagaaaatacagctgaaaatttatattcagtgattttgtatttgtggatactacttatggaaaagttacttggtgatacataaagatcgattttcaaatattttgtgacagtatttgaatcagcagttgtaaaaaatcaacctcatactgaatgcactatcagcaaattaaaataatctaacatccaca

SEQ ID NO: 50289 - DNA, 2272 bp, Homo sapiens
ctttttttgaaactgaattctgctccaccacagtcttaccctggtgtttctgcaggatccacatcagaccctgcttcaggtgtggatgtcttagttaatcaggtggcactgttgatcccccatcaatggacttctgagatcaccaccattatttcctcaatttgtttgactctttctctaccatgcattcatctgtgagaaggttaacgcgtgattctcatgacaacgtgattggcagccacaaagtctaagagactcctcagacaacctctaacaaacagccattaacaaactgaacacacctaaaatgtcactgatttgtcttggaagacagaatactaagcaagataaatggcactatacatatagataatttgtgtatgtaagactattagttcattagataactaatctcactactttatttaaaagaaaatgtaagtaggaatccatttctaaatcttttcaaattacaggttgggcacaataaacaaccaagtataaggagctcagaagatttccatctaaatagtttcaataatcctccaagacaatatcagaaaataatgaaaaggctcattaaaagatatgtactgcaggcccagatagataaggagagtgatgaagtgaacgaaggggaactgaaggaaattaagcaggacatctcaagtctccgctatgaactccttgaagaaaaatctcagaatacagaagacctagcagaacttattagagaacttggagagaaattatccatggaaccaaatcaagaggaaaccaatagataatgcgaagacttccttagaaattcatatttatttgtccacttgaagccatattattttctgatttattttcttaagtgccaatgggcccaccttttaaacaagaaaacgttaaataacttgggccatcctatcatctggagccctagtatctaatttttttggtgattaaactccattgttcagggtaaaggctgtagataatgaggaaaattatgcccagttgtttggtgcttgttttataaactgctttcttggatataactaactcttgtgatgatgtcattgccatgtagtgtctgcctgaaaatgggtcccagcggacaggggctgacccacgttactccccatgcggtttttcctctgaagtttatttcaggttccttcttgcctgctctgtggatcccctgctggggactcccagctctgaaatttgggaaaaagtagcccatgggcctttagaatgctttaatcctttctttagaatgctgtttaaacaccatttaccctacttatccctcaatgcacatgattgataccgttcatacaaaatggtcttacatctatgtaaaattttctgattcatctatttgaaaacattacacttaacaatgaaaaaagtttttcctccactgaaccctggaaacatggtccagttttgtgtgtgtgcgtgtgtgtaaatgtgtacacacagacataaagtacttgccctatttagtttgtggctaatgtggacacacaaaagctctttatgttataaatttttattgtcactaaaaaattttactgtctaaataagtaccttttattggagaaaaatcaaaaccccaaacaaacactgtggttgtttggttccattatagcacaattttgtgccatttctgggagcatttacagatgaatccccacacttagccattgaatgtaaaggggaaaaataaggtgagaatttgtaaatacttatctgttattttcaatatgttctatccttctacccaaatatataaaacaggaatttgcattcatgtgcatttaccaagaggttgttgttgttacttactgatcatgtgaagtggtgtcttaaacaactaaaagcgatgaaggttcatatgtttactcaaagaccattggcattcagaggatgctggacattaactggaactgctacttccaattcaataatgggagatttcaaatgcaaatctttaacttcatcttaaagatgaaatggttgcagaaaatctgtttagctccaactttggcttaatttaaatcaaagaacatttatgtaaccagatcagaaaatacagctgaaaatttatattcagtgattttgtatttgtggatactacttatggaaaagttacttggtgatacataaagatcgattttcaaatattttgtgacagtatttgaatcagcagttgtaaaaaatcaacctcatactgaatgcactatcagcaaattaaaataatctaacatccaca

SEQ ID NO: 50290 - DNA, 1730 bp, Homo sapiens
  misc_feature (1)..(2): n is a, c, g, or t
nngggatcttgacggagagtgcgggggatgaaggcgggagctgagggctggagagtctctgttgacatagtaactcttcagctccgtctcccttgctctccgctcttacgcttcgctaccaccagcggccccgcctgtgccctctctgcccgggcgccccagacgcatcctcgcggggtctcctcggcctgacctgctcaggtcaagatcctctttgcacccccttaagtggtgacttttccccgggccagtgggcgagccacttgcggcgggcgtctgcaccccctgcttcaccgtcgtcccctgggcaccggtctgcccaggtccagttcggccgctgacgcgaaccctccgcaccgggtccccgctggaactgcccactcggctcccccgggagcggggcccaggccagtcgggcgttcccgccatgagccagagcccggcgttcgggccccggaggggcagttctccccggggcgctgccggagccgctgcgcggcgcaacgagagccaggactatctgctcatggactcggagctgggagaagacggctgcccgcaagccccgctgccttgctacggctactacccctgcttccggggatctgacaacagactggctcaccggcggcagacagttctccgtgagaaggggagaaggttagctaatcgaggaccagcatacatgtttagtgatcgctccacaagcctatctatagaggaggaacgctttttggatgcagctgaatatggtaacatcccagtggtgcggaagatgttagaagaatgccactcactcaacgttaactgtgtggattacatgggccagaatgccctacagttggcagtggccaatgagcatctggaaattacagaacttcttctcaagaaagaaaacctctctcgagttggggatgctttgcttctagctattagtaaaggttatgttcggattgtggaagcaattctcagtcatccggcttttgctgaaggcaagaggttagcaaccagccctagccagtctgaactccagcaagatgatttttatgcctatgatgaagatgggacacggttctcccatgatgtgactccaatcattctggctgcccactgccaggaatatgaaattgtgcataccctcctgcggaagggtgctaggattgaacggcctcatgattatttctgcaagtgcaatgactgcaaccagaaacagaagcatgactcgtttagccactccagatctaggattaatgcctataaaggcctggcaagtccggcttacctgtcattgtctagtgaagatccagtcatgacggctttagaacttagcaatgaactggcagttctggccaatattgagaaagagttcaagaatgactacaaaaaactgtcaatgcagtgcaaagactttgttgttggactccttgatctgtgcagaaacactgaagaagtcgaggccattctgaatggggatgttgaaacgctccagagtggtgatcacggtcgcccaaatctcagccgtttaaaacttgccattaaatatgaagtaaaaaaagtaaggtcaggcgtgaagcccgtttacattattttggttcttgttggtgctaaataaggataaagggttgatattgttagattaagctgggattttcttttcttttctctttttttttttttgagatggagtctcgctctgtcgcccagtctggagtgcagtggtgcgatctcgg

SEQ ID NO: 50291 - DNA, 480 bp, Homo sapiens
ctttgcagcttaaaacaacagtaatatttatttactcatgattttatgatttttgtaggactcattgagggtagtttatcttcgtttcatctggtgtcagctcagtgggggttagattatctacttccaaatggctcacttacatagctggcagtttatgctggctgctgtccaggagctcagctagggctatttactagaggtactaaatgaggccttttcctgtggcctggccatgactggtagtttctaagaaggagtgctctaagaacaagcatttcaagaggcaaaaagtggaaaaacctagtccccttaaaggctaggctaggaactgatagagcattacttctgctgtattttgttggctaagaagacagagtcagcccagattcaagaggaagagaattaaactccatctattggtggagaaaatgacaaagaatttgcaactttacttaatttgctacacaaacttaaaat

SEQ ID NO: 50292 - DNA, 492 bp, Homo sapiens
ttgggctgctttgtcctttatcttatttcataactgttaggcaggaagaccagttacctactaagtacgttactgtagtgaggacagagggaagctcaaacaaggctgaatcttaaaactcttactgagcaatgggtgggagcatttaatactgaattactgtaatataggagagctcgttgtatggatttttaaaacttttttcaggctgggtgtggtacctcatacttgtaatcccagctctttgggaagctgaggtgcaaggatcacttgaggccagaagtttgagaccagcctgggcaacatagtgaggctccatctctacaaaaaaaacttttagtgagctgtgtgtgatagcgtgtgcctatagtttcagctgcctgggaagctggggcaggaggattgtgtgagctccagagttttgaggctgtagtgaaccgtgatcgtgccactgcactctagcctgggcaacagaggggacaccctgtctca

SEQ ID NO: 50293 - DNA, 291 bp, Homo sapiens
tccatctcaaaaaaaataaaaataaaataaaataaaaagtaatcactgtcttctaatggaagtttctgttgccttttgctaaacatctaaagtactttaagattatattttagcacataatttgtgcgcttatccaagatcacctttcaattttcaaacacttcttaggattttctagtcactaaggtgaactggaagcgagttggaccgaacacaaattttacttagtcttgaaagaagaaatataaatggctaagtaatgtcagggtagggaggaggttcagcttcatt

SEQ ID NO: 50294 - DNA, 222 bp, Homo sapiens
cttgagcccaggaggtcaaggctgcagtgagctgtgttcatgctattatattccaggctgggtgacagagggagaccctgtctcaaggcaaaaaaaattgttgtaaacttccaggcatctcagatattttttttaaaaagaaagaagtgcaaagattgaacagctggtttcaagtttagaagaatgttttggtcactggtattagcttggaattgattgatc

SEQ ID NO: 50295 - DNA, 439 bp, Homo sapiens
atatgtttatttagtttttataatgtcatgtgtcacttaacgatggggatatagtctgagaaatgtgtcattaggaaatttcatcattttgcagacatcatagagagtacttacacaaacctcatggtatagcctactataccccaaggttctatggtctagcctcttgctcctaggctacaaacctgtactgtatgttactgggctgaatactgtaggcaacttaaacacagtggtatgtatccaaacatagcaacagtatagtaaaaatacagtcttataatcttatgggaccactggaatatatacagtctgctgtcgactgaaagcatcattgtttggcagatgactacatgtgacattacagtgctttttttttgagatctcaccattgcaaccccagcctgggcagcaagagcaaaattccatctcaaaaaag

SEQ ID NO: 50296 - DNA, 312 bp, Homo sapiens
attatgtagtagatattgtgattatcctcattttacagatggagaaactgagacttagacaagttaaataacttgcccagggttacaatattactgagtagaaaaaccacatttgaacccaggaagtgtggctgaagaatttttgtgatttacctgttagactataattgtctattttttctacagtggagataattctggtgtcaaggggctaaagaattttctcaagaccaaacaacacattttttggaaatacacagtaattgaccatgagacatgctgagcttagtactgagtgagcttttgcttaaa

SEQ ID NO: 50297 - DNA, 336 bp, Homo sapiens
gtaacgagtaagttctcactctgctggttcatttgagagctggttgtttaaaaagagcctagcaccttttttgcttgctctctcaccacgcaacacacctgctcccccttcaccttacaccatgatgggaagcttccttcggcctcaccagaagcagatgctggcaccatgcttcttgtacaacctgcaaaaccatgagctacataaacgttttttctttataaattaccaaacacaggtattcctttatagcagtgcacaatgaactaatacagatggggtttcactttgttgcccaggctggtcttcaactcctgacctcaagcaatcctccca

SEQ ID NO: 50298 - DNA, 491 bp, Homo sapiens
gaacggaagagttttccctcctccgtgctcaccgctcgcctgtttgtccacgggtgtgtccggctgtgtccattgccgtccccttttaatatgctgccctgccagggctcctgcccttatgatgtgcctgacagtttctgcacccttgcttgctttctggcacccagatgctcccagcacccggcggctctgggacagccgctcctggctccttatgggtgtgtttaagactcagggtctgggccgggcgcggtggctcacacctgtaatcccaacactttgggaggccgaggcaggtggatcacctgaggtcaggagttcaaaaccagcttggccaacatggtgaaaccccatctctactaaaaatacgaaaagttagccggttgtggcggcaaatgcctgtaatcccagctactcgggaggctgaggcaggagaattgctggaacccgggaggtggaggttgtggtgagctgagattgcgccactgcac

SEQ ID NO: 50299 - DNA, 298 bp, Homo sapiens
gcttgcctttccttttttatattatctaccatattagaaaatgcagagggaagagttagtgcaaattgggaaagtgagtaccgatgcatttgtactcctgattggtgagcaaaataaaactgctcagcctcctataggattaaagtagaacttacactggagatgtttgatctttctgtataaatgtttgtgataaaatcatgcttatttaaaataagaagatcaggaatgatagatataaaattaactggattcagattttctgagattttagaataggatgtcagctatttaccag

SEQ ID NO: 50300 - DNA, 303 bp, Homo sapiens
ggccacacatataaggaaagtttgtccaatcctttcctcaataaagatcttttgtaaagtgctatggaaactcatagaggcctcaaagagattaagggtgggactctcctaggactttcaaatatatatgtgtgtgtgtatgtgtgtgtgtgtgtatgtgtgtgtgtgtaatctttaaaaagctaaatggtattaaataaatgctcaggaaagaatatgaattccttgttttgttttgatcattttagatggtttctccaacctgtaaaagaaggcagttcaggctgggcgcagtggctcacg

SEQ ID NO: 50301 - DNA, 2163 bp, Homo sapiens
  misc_feature (641)..(642): n is a, c, g, or t
  misc_feature (645)..(645): n is a, c, g, or t
  misc_feature (654)..(654): n is a, c, g, or t
  misc_feature (659)..(659): n is a, c, g, or t
  misc_feature (662)..(662): n is a, c, g, or t
  misc_feature (667)..(667): n is a, c, g, or t
  misc_feature (729)..(729): n is a, c, g, or t
ctggcatctagaatgcagtgtaggcagcagtgtgcctgggagacaagcagagatctcacggattcctttatttttcctgccatagcagcaaattttccttggagcactatttgaaaattaacattactgaaaaaattaagcccacttaaagggactctagtttttatctaaattataaaaggtgagaagacagttctgaaaaaaatgtatcaccttgaaactagaatgctttagttaatggggtaagctagaagtaagctgcctttgataactcatgtaagagcagcatatgaatggatgataactgtctttcttccatttaattcagctacttcctattcaatctcaaatctcagttggaaagcaatttccctcacttgacccatttttcttctgcattatatctttcttctggttcttcaacacaaaaagtttgaaaagacttgtaagcagattcagacacctggtttgggctaagcgtatttcattatttggctttccagttggaaggataacagttttacttctttacattttgttttgtttcttggttctttttgagacaggttctcgctctgttgcccaggctggagtgcagtggtacagtcacagctcatcgcagcctcagcctctcaggctcnngcngtcctcccncttcngcntccanagtagctgggaccacaggcatgcactatcatgcctggctaatttttaaaattgtttttgtanagacagggtcttcctatgttgctgggattgcaagtgtgagcaacctcacctggctgctgctttactttgatatcacaactttcaggagagatatatgttaaatgactgagactggtatagagtcatatgggtatagaccaagcttgcccaacctgcagcccgggatagctttgaatgcggcccaaaacaaattaataaactttcttaaaatactatgagatttgtgtgtgtgtgtgtgtatgtgtgtgtttaagctcatcagttattaatgttagtgtattttatgtgtggcccaagacaattcttcttcttccaaggtggcccagggaagtcaaaagattggacacccctggtatagataaaagcaggtaattggcctagcctgggcgacacagcaagacccttgtcttttaaaacatgaaaaaattagctgagcatggtggcacatacctgtagtcctagctactcaggaggctgaggtgggaggatcacttgagctgtggagttcaaggttacagtgagctacgatcctgccactacactttggcatgggtgatagaccttgtctcagaaaaaaaaagaaagaaaagaaaaaagtaggtggggggtataaaattcttgttttagtaacacgggcaatgtaaagatgttataattttagtaaagatatatgaaataagcctcacatatccatattgtaaaatgtctatctgagacccaagtctctggaatttgttatctaaattaatctattagtggtatcattaacacatgcattagttacaggtgtcttgtaataacatttatttcacaccttgggtgataaagtgcttgaattggtttctgtctttgccagatcaaattctaaatttcctaaaatagctaacatgaaaccagtctcctttatgaacccttctctgacttctctcatgataaactttctcttctctattcattcctttggtcatctcattcagtcctgtgacattaaataccacatacgcactgaagacaccaacctagactgctccccagactcaatatttccatatccagttgcctgttccacatcttgatggctttttaatgggcatttccactgaacagatccagaactgcacccctgttcttgccccaaaataacctcaggaggttattttgtcttcactgatgaattctgtcaaacatagaactaatatcgagccttcacaaacatttccagagattaaaatctgctctgcttgcattccttcccactcactgaaaagcactgccatccttccagttgctccactcaaaaactttggagtccccattgacttctctctttcactccatgtatgtccatcagaaattaagtaagagatttctgaataacccataggttaaagaagagctcacaagggaaaattagaagatatttttaagtgagtt

SEQ ID NO: 50302 - DNA, 446 bp, Homo sapiens
ctggtattggcaatttaaaaataaacacaacagaactcccactgtataattgctaaacacaatgacagctataattgaggcactgaaggaaggtcaggggagcccaggagggcggggctgctgctgcctgctgagctgggagggttggtggcaccccttgccctgggttgccatagcagatatcataatcaattacggccgtctttcatgaggaacctggatctttcccaaggaatcagtgagaagtttcagctcacataccatctctgatttgccatccctgggatgttagctgaatcctctcattttacgtgaaggagactgagggccacagagttcaatgcagggcctagtttagactccagaccagctgccaagagagatgaagggctggtggagaccagccagcaagtggccatgctgcctgctgcagaccccacttcaca

SEQ ID NO: 50303 - DNA, 13938 bp, Homo sapiens
ctgggattgggacacactttctggacactgctggccagtcccaaaatggaacataaggaagtggttcttctacttcttttatttctgaaatcagcagcacctgagcaaagccatgtggtccaggattgctaccatggtgatggacagagttatcgaggcacgtactccaccactgtcacaggaaggacctgccaagcttggtcatctatgacaccacatcaacataataggaccacagaaaactacccaaatgctggcttgatcatgaactactgcaggaatccagatgctgtggcagctccttattgttatacgagggatcccggtgtcaggtgggagtactgcaacctgacgcaatgctcagacgcagaagggactgccgtcgcgcctccgactgttaccccggttccaagcctagaggctccttccgaacaagcaccgactgagcaaaggcctggggtgcaggagtgctaccatggtaatggacagagttatcgaggcacatactccaccactgtcacaggaagaacctgccaagcttggtcatctatgacaccacactcgcatagtcggaccccagaatactacccaaatgctggcttgatcatgaactactgcaggaatccagatgctgtggcagctccttattgttatacgagggatcccggtgtcaggtgggagtactgcaacctgacgcaatgctcagacgcagaagggactgccgtcgcgcctccgactgttaccccggttccaagcctagaggctccttccgaacaagcaccgactgagcaaaggcctggggtgcaggagtgctaccatggtaatggacagagttatcgaggcacatactccaccactgtcacaggaagaacctgccaagcttggtcatctatgacaccacactcgcatagtcggaccccagaatactacccaaatgctggcttgatcatgaactactgcaggaatccagatgctgtggcagctccttattgttatacgagggatcccggtgtcaggtgggagtactgcaacctgacgcaatgctcagacgcagaagggactgccgtcgcgcctccgactgttaccccggttccaagcctagaggctccttccgaacaagcaccgactgagcaaaggcctggggtgcaggagtgctaccatggtaatggacagagttatcgaggcacatactccaccactgtcacaggaagaacctgccaagcttggtcatctatgacaccacactcgcatagtcggaccccagaatactacccaaatgctggcttgatcatgaactactgcaggaatccagatgctgtggcagctccttattgttatacgagggatcccggtgtcaggtgggagtactgcaacctgacgcaatgctcagacgcagaagggactgccgtcgcgcctccgactgttaccccggttccaagcctagaggctccttccgaacaagcaccgactgagcaaaggcctggggtgcaggagtgctaccatggtaatggacagagttatcgaggcacatactccaccactgtcacaggaagaacctgccaagcttggtcatctatgacaccacactcgcatagtcggaccccagaatactacccaaatgctggcttgatcatgaactactgcaggaatccagatgctgtggcagctccttattgttatacgagggatcccggtgtcaggtgggagtactgcaacctgacgcaatgctcagacgcagaagggactgccgtcgcgcctccgactgttaccccggttccaagcctagaggctccttccgaacaagcaccgactgagcaaaggcctggggtgcaggagtgctaccatggtaatggacagagttatcgaggcacatactccaccactgtcacaggaagaacctgccaagcttggtcatctatgacaccacactcgcatagtcggaccccagaatactacccaaatgctggcttgatcatgaactactgcaggaatccagatgctgtggcagctccttattgttatacgagggatcccggtgtcaggtgggagtactgcaacctgacgcaatgctcagacgcagaagggactgccgtcgcgcctccgactgttaccccggttccaagcctagaggctccttccgaacaagcaccgactgagcaaaggcctggggtgcaggagtgctaccatggtaatggacagagttatcgaggcacatactccaccactgtcacaggaagaacctgccaagcttggtcatctatgacaccacactcgcatagtcggaccccagaatactacccaaatgctggcttgatcatgaactactgcaggaatccagatgctgtggcagctccttattgttatacgagggatcccggtgtcaggtgggagtactgcaacctgacgcaatgctcagacgcagaagggactgccgtcgcgcctccgactgttaccccggttccaagcctagaggctccttccgaacaagcaccgactgagcaaaggcctggggtgcaggagtgctaccatggtaatggacagagttatcgaggcacatactccaccactgtcacaggaagaacctgccaagcttggtcatctatgacaccacactcgcatagtcggaccccagaatactacccaaatgctggcttgatcatgaactactgcaggaatccagatgctgtggcagctccttattgttatacgagggatcccggtgtcaggtgggagtactgcaacctgacgcaatgctcagacgcagaagggactgccgtcgcgcctccgactgttaccccggttccaagcctagaggctccttccgaacaagcaccgactgagcaaaggcctggggtgcaggagtgctaccatggtaatggacagagttatcgaggcacatactccaccactgtcacaggaagaacctgccaagcttggtcatctatgacaccacactcgcatagtcggaccccagaatactacccaaatgctggcttgatcatgaactactgcaggaatccagatgctgtggcagctccttattgttatacgagggatcccggtgtcaggtgggagtactgcaacctgacgcaatgctcagacgcagaagggactgccgtcgcgcctccgactgttaccccggttccaagcctagaggctccttccgaacaagcaccgactgagcaaaggcctggggtgcaggagtgctaccatggtaatggacagagttatcgaggcacatactccaccactgtcacaggaagaacctgccaagcttggtcatctatgacaccacactcgcatagtcggaccccagaatactacccaaatgctggcttgatcatgaactactgcaggaatccagatgctgtggcagctccttattgttatacgagggatcccggtgtcaggtgggagtactgcaacctgacgcaatgctcagacgcagaagggactgccgtcgcgcctccgactgttaccccggttccaagcctagaggctccttccgaacaagcaccgactgagcaaaggcctggggtgcaggagtgctaccatggtaatggacagagttatcgaggcacatactccaccactgtcacaggaagaacctgccaagcttggtcatctatgacaccacactcgcatagtcggaccccagaatactacccaaatgctggcttgatcatgaactactgcaggaatccagatgctgtggcagctccttattgttatacgagggatcccggtgtcaggtgggagtactgcaacctgacgcaatgctcagacgcagaagggactgccgtcgcgcctccgactgttaccccggttccaagcctagaggctccttccgaacaagcaccgactgagcaaaggcctggggtgcaggagtgctaccatggtaatggacagagttatcgaggcacatactccaccactgtcacaggaagaacctgccaagcttggtcatctatgacaccacactcgcatagtcggaccccagaatactacccaaatgctggcttgatcatgaactactgcaggaatccagatgctgtggcagctccttattgttatacgagggatcccggtgtcaggtgggagtactgcaacctgacgcaatgctcagacgcagaagggactgccgtcgcgcctccgactgttaccccggttccaagcctagaggctccttccgaacaagcaccgactgagcaaaggcctggggtgcaggagtgctaccatggtaatggacagagttatcgaggcacatactccaccactgtcacaggaagaacctgccaagcttggtcatctatgacaccacactcgcatagtcggaccccagaatactacccaaatgctggcttgatcatgaactactgcaggaatccagatgctgtggcagctccttattgttatacgagggatcccggtgtcaggtgggagtactgcaacctgacgcaatgctcagacgcagaagggactgccgtcgcgcctccgactgttaccccggttccaagcctagaggctccttccgaacaagcaccgactgagcaaaggcctggggtgcaggagtgctaccatggtaatggacagagttatcgaggcacatactccaccactgtcacaggaagaacctgccaagcttggtcatctatgacaccacactcgcatagtcggaccccagaatactacccaaatgctggcttgatcatgaactactgcaggaatccagatgctgtggcagctccttattgttatacgagggatcccggtgtcaggtgggagtactgcaacctgacgcaatgctcagacgcagaagggactgccgtcgcgcctccgactgttaccccggttccaagcctagaggctccttccgaacaagcaccgactgagcaaaggcctggggtgcaggagtgctaccatggtaatggacagagttatcgaggcacatactccaccactgtcacaggaagaacctgccaagcttggtcatctatgacaccacactcgcatagtcggaccccagaatactacccaaatgctggcttgatcatgaactactgcaggaatccagatgctgtggcagctccttattgttatacgagggatcccggtgtcaggtgggagtactgcaacctgacgcaatgctcagacgcagaagggactgccgtcgcgcctccgactgttaccccggttccaagcctagaggctccttccgaacaagcaccgactgagcaaaggcctggggtgcaggagtgctaccatggtaatggacagagttatcgaggcacatactccaccactgtcacaggaagaacctgccaagcttggtcatctatgacaccacactcgcatagtcggaccccagaatactacccaaatgctggcttgatcatgaactactgcaggaatccagatgctgtggcagctccttattgttatacgagggatcccggtgtcaggtgggagtactgcaacctgacgcaatgctcagacgcagaagggactgccgtcgcgcctccgactgttaccccggttccaagcctagaggctccttccgaacaagcaccgactgagcaaaggcctggggtgcaggagtgctaccatggtaatggacagagttatcgaggcacatactccaccactgtcacaggaagaacctgccaagcttggtcatctatgacaccacactcgcatagtcggaccccagaatactacccaaatgctggcttgatcatgaactactgcaggaatccagatgctgtggcagctccttattgttatacgagggatcccggtgtcaggtgggagtactgcaacctgacgcaatgctcagacgcagaagggactgccgtcgcgcctccgactgttaccccggttccaagcctagaggctccttccgaacaagcaccgactgagcaaaggcctggggtgcaggagtgctaccatggtaatggacagagttatcgaggcacatactccaccactgtcacaggaagaacctgccaagcttggtcatctatgacaccacactcgcatagtcggaccccagaatactacccaaatgctggcttgatcatgaactactgcaggaatccagatgctgtggcagctccttattgttatacgagggatcccggtgtcaggtgggagtactgcaacctgacgcaatgctcagacgcagaagggactgccgtcgcgcctccgactgttaccccggttccaagcctagaggctccttccgaacaagcaccgactgagcaaaggcctggggtgcaggagtgctaccatggtaatggacagagttatcgaggcacatactccaccactgtcacaggaagaacctgccaagcttggtcatctatgacaccacactcgcatagtcggaccccagaatactacccaaatgctggcttgatcatgaactactgcaggaatccagatgctgtggcagctccttattgttatacgagggatcccggtgtcaggtgggagtactgcaacctgacgcaatgctcagacgcagaagggactgccgtcgcgcctccgactgttaccccggttccaagcctagaggctccttccgaacaagcaccgactgagcaaaggcctggggtgcaggagtgctaccatggtaatggacagagttatcgaggcacatactccaccactgtcacaggaagaacctgccaagcttggtcatctatgacaccacactcgcatagtcggaccccagaatactacccaaatgctggcttgatcatgaactactgcaggaatccagatgctgtggcagctccttattgttatacgagggatcccggtgtcaggtgggagtactgcaacctgacgcaatgctcagacgcagaagggactgccgtcgcgcctccgactgttaccccggttccaagcctagaggctccttccgaacaagcaccgactgagcaaaggcctggggtgcaggagtgctaccatggtaatggacagagttatcgaggcacatactccaccactgtcacaggaagaacctgccaagcttggtcatctatgacaccacactcgcatagtcggaccccagaatactacccaaatgctggcttgatcatgaactactgcaggaatccagatgctgtggcagctccttattgttatacgagggatcccggtgtcaggtgggagtactgcaacctgacgcaatgctcagacgcagaagggactgccgtcgcgcctccgactgttaccccggttccaagcctagaggctccttccgaacaagcaccgactgagcaaaggcctggggtgcaggagtgctaccatggtaatggacagagttatcgaggcacatactccaccactgtcacaggaagaacctgccaagcttggtcatctatgacaccacactcgcatagtcggaccccagaatactacccaaatgctggcttgatcatgaactactgcaggaatccagatgctgtggcagctccttattgttatacgagggatcccggtgtcaggtgggagtactgcaacctgacgcaatgctcagacgcagaagggactgccgtcgcgcctccgactgttaccccggttccaagcctagaggctccttccgaacaagcaccgactgagcaaaggcctggggtgcaggagtgctaccatggtaatggacagagttatcgaggcacatactccaccactgtcacaggaagaacctgccaagcttggtcatctatgacaccacactcgcatagtcggaccccagaatactacccaaatgctggcttgatcatgaactactgcaggaatccagatgctgtggcagctccttattgttatacgagggatcccggtgtcaggtgggagtactgcaacctgacgcaatgctcagacgcagaagggactgccgtcgcgcctccgactgttaccccggttccaagcctagaggctccttccgaacaagcaccgactgagcagaggcctggggtgcaggagtgctaccacggtaatggacagagttatcgaggcacatactccaccactgtcactggaagaacctgccaagcttggtcatctatgacaccacactcgcatagtcggaccccagaatactacccaaatgctggcttgatcatgaactactgcaggaatccagatgctgtggcagctccttattgttatacgagggatcccggtgtcaggtgggagtactgcaacctgacgcaatgctcagacgcagaagggactgccgtcgcgcctccgactgttaccccggttccaagcctagaggctccttccgaacaagcaccgactgagcaaaggcctggggtgcaggagtgctaccatggtaatggacagagttatcgaggcacatactccaccactgtcacaggaagaacctgccaagcttggtcatctatgacaccacactcgcatagtcggaccccagaatactacccaaatgctggcttgatcatgaactactgcaggaatccagatgctgtggcagctccttattgttatacgagggatcccggtgtcaggtgggagtactgcaacctgacgcaatgctcagacgcagaagggactgccgtcgcgcctccgactgttaccccggttccaagcctagaggctccttccgaacaagcaccgactgagcaaaggcctggggtgcaggagtgctaccatggtaatggacagagttatcgaggcacatactccaccactgtcacaggaagaacctgccaagcttggtcatctatgacaccacactcgcatagtcggaccccagaatactacccaaatgctggcttgatcatgaactactgcaggaatccagatgctgtggcagctccttattgttatacgagggatcccggtgtcaggtgggagtactgcaacctgacgcaatgctcagacgcagaagggactgccgtcgcgcctccgactgttaccccggttccaagcctagaggctccttccgaacaagcaccgactgagcagaggcctggggtgcaggagtgctaccacggtaatggacagagttatcgaggcacatactccaccactgtcactggaagaacctgccaagcttggtcatctatgacaccacactcgcatagtcggaccccagaatactacccaaatgctggcttgatcatgaactactgcaggaatccagatgctgtggcagctccttattgttatacgagggatcccggtgtcaggtgggagtactgcaacctgacgcaatgctcagacgcagaagggactgccgtcgcgcctccgactgttaccccggttccaagcctagaggctccttccgaacaagcaccgactgagcagaggcctggggtgcaggagtgctaccacggtaatggacagagttatcgaggcacatactccaccactgtcactggaagaacctgccaagcttggtcatctatgacaccacactcgcatagtcggaccccagaatactacccaaatgctggcttgatcatgaactactgcaggaatccagatgctgtggcagctccttattgttatacgagggatcccggtgtcaggtgggagtactgcaacctgacgcaatgctcagacgcagaagggactgccgtcgcgcctccgactgttaccccggttccaagcctagaggctccttccgaacaagcaccgactgagcagaggcctggggtgcaggagtgctaccacggtaatggacagagttatcgaggcacatactccaccactgtcactggaagaacctgccaagcttggtcatctatgacaccacactcgcatagtcggaccccagaatactacccaaatgctggcttgatcatgaactactgcaggaatccagatgctgtggcagctccttattgttatacgagggatcccggtgtcaggtgggagtactgcaacctgacgcaatgctcagacgcagaagggactgccgtcgcgcctccgactgttaccccggttccaagcctagaggctccttccgaacaagcaccgactgagcagaggcctggggtgcaggagtgctaccacggtaatggacagagttatcgaggcacatactccaccactgtcactggaagaacctgccaagcttggtcatctatgacaccacactcgcatagtcggaccccagaatactacccaaatgctggcttgatcatgaactactgcaggaatccagatcctgtggcagccccttattgttatacgagggatcccagtgtcaggtgggagtactgcaacctgacacaatgctcagacgcagaagggactgccgtcgcgcctccaactattaccccgattccaagcctagaggctccttctgaacaagcaccaactgagcaaaggcctggggtgcaggagtgctaccacggaaatggacagagttatcaaggcacatacttcattactgtcacaggaagaacctgccaagcttggtcatctatgacaccacactcgcatagtcggaccccagcatactacccaaatgctggcttgatcaagaactactgccgaaatccagatcctgtggcagccccttggtgttatacaacagatcccagtgtcaggtgggagtactgcaacctgacacgatgctcagatgcagaatggactgccttcgtccctccgaatgttattctggctccaagcctagaggctttttttgaacaagcactgactgaggaaacccccggggtacaggactgctactaccattatggacagagttaccgaggcacatactccaccactgtcacaggaagaacttgccaagcttggtcatctatgacaccacaccagcatagtcggaccccagaaaactacccaaatgctggcctgaccaggaactactgcaggaatccagatgctgagattcgcccttggtgttacaccatggatcccagtgtcaggtgggagtactgcaacctgacacaatgcctggtgacagaatcaagtgtccttgcaactctcacggtggtcccagatccaagcacagaggcttcttctgaagaagcaccaacggagcaaagccccggggtccaggattgctaccatggtgatggacagagttatcgaggctcattctctaccactgtcacaggaaggacatgtcagtcttggtcctctatgacaccacactggcatcagaggacaacagaatattatccaaatggtggcctgaccaggaactactgcaggaatccagatgctgagattagtccttggtgttataccatggatcccaatgtcagatgggagtactgcaacctgacacaatgtccagtgacagaatcaagtgtccttgcgacgtccacggctgtttctgaacaagcaccaacggagcaaagccccacagtccaggactgctaccatggtgatggacagagttatcgaggctcattctccaccactgttacaggaaggacatgtcagtcttggtcctctatgacaccacactggcatcagagaaccacagaatactacccaaatggtggcctgaccaggaactactgcaggaatccagatgctgagattcgcccttggtgttataccatggatcccagtgtcagatgggagtactgcaacctgacgcaatgtccagtgatggaatcaactctcctcacaactcccacggtggtcccagttccaagcacagagcttccttctgaagaagcaccaactgaaaacagcactggggtccaggactgctaccgaggtgatggacagagttatcgaggcacactctccaccactatcacaggaagaacatgtcagtcttggtcgtctatgacaccacattggcatcggaggatcccattatactatccaaatgctggcctgaccaggaactactgcaggaatccagatgctgagattcgcccttggtgttacaccatggatcccagtgtcaggtgggagtactgcaacctgacacgatgtccagtgacagaatcgagtgtcctcacaactcccacagtggccccggttccaagcacagaggctccttctgaacaagcaccacctgagaaaagccctgtggtccaggattgctaccatggtgatggacggagttatcgaggcatatcctccaccactgtcacaggaaggacctgtcaatcttggtcatctatgataccacactggcatcagaggaccccagaaaactacccaaatgctggcctgaccgagaactactgcaggaatccagattctgggaaacaaccctggtgttacacaaccgatccgtgtgtgaggtgggagtactgcaatctgacacaatgctcagaaacagaatcaggtgtcctagagactcccactgttgttccagttccaagcatggaggctcattctgaagcagcaccaactgagcaaacccctgtggtccggcagtgctaccatggtaatggccagagttatcgaggcacattctccaccactgtcacaggaaggacatgtcaatcttggtcatccatgacaccacaccggcatcagaggaccccagaaaactacccaaatgatggcctgacaatgaactactgcaggaatccagatgccgatacaggcccttggtgttttaccatggaccccagcatcaggtgggagtactgcaacctgacgcgatgctcagacacagaagggactgtggtcgctcctccgactgtcatccaggttccaagcctagggcctccttctgaacaagactgtatgtttgggaatgggaaaggataccggggcaagaaggcaaccactgttactgggacgccatgccaggaatgggctgcccaggagccccatagacacagcacgttcattccagggacaaataaatgggcaggtctggaaaaaaattactgccgtaaccctgatggtgacatcaatggtccctggtgctacacaatgaatccaagaaaactttttgactactgtgatatccctctctgtgcatcctcttcatttgattgtgggaagcctcaagtggagccgaagaaatgtcctggaagcattgtaggggggtgtgtggcccacccacattcctggccctggcaagtcagtctcagaacaaggtttggaaagcacttctgtggaggcaccttaatatccccagagtgggtgctgactgctgctcactgcttgaagaagtcctcaaggccttcatcctacaaggtcatcctgggtgcacaccaagaagtgaacctcgaatctcatgttcaggaaatagaagtgtctaggctgttcttggagcccacacaagcagatattgccttgctaaagctaagcaggcctgccgtcatcactgacaaagtaatgccagcttgtctgccatccccagactacatggtcaccgccaggactgaatgttacatcactggctggggagaaacccaaggtacctttgggactggccttctcaaggaagcccagctccttgttattgagaatgaagtgtgcaatcactataagtatatttgtgctgagcatttggccagaggcactgacagttgccagggtgacagtggagggcctctggtttgcttcgagaaggacaaatacattttacaaggagtcacttcttggggtcttggctgtgcacgccccaataagcctggtgtctatgctcgtgtttcaaggtttgttacttggattgagggaatgatgagaaataattaattggacgggagacagagtgaagcatcaacctacttagaagctgaaacgtgggtaaggatttagcatgctggaaataatagacagcaatcaaacgaagacactgttcccagctaccagctatgccaaaccttggcatttttggtatttttgtgtataagcttttaaggtctgactgacaaattctgtattaaggtgtcatagctatgacatttgttaaaaataaactctgcacttattttgatttga

SEQ ID NO: 50304 - DNA, 13964 bp, Homo sapiens
ctgggattgggacacactttctggacactgctggccagtcccaaaatggaacataaggaagtggttcttctacttcttttatttctgaaatcagcagcacctgagcaaagccatgtggtccaggattgctaccatggtgatggacagagttatcgaggcacgtactccaccactgtcacaggaaggacctgccaagcttggtcatctatgacaccacatcaacataataggaccacagaaaactacccaaatgctggcttgatcatgaactactgcaggaatccagatgctgtggcagctccttattgttatacgagggatcccggtgtcaggtgggagtactgcaacctgacgcaatgctcagacgcagaagggactgccgtcgcgcctccgactgttaccccggttccaagcctagaggctccttccgaacaagcaccgactgagcaaaggcctggggtgcaggagtgctaccatggtaatggacagagttatcgaggcacatactccaccactgtcacaggaagaacctgccaagcttggtcatctatgacaccacactcgcatagtcggaccccagaatactacccaaatgctggcttgatcatgaactactgcaggaatccagatgctgtggcagctccttattgttatacgagggatcccggtgtcaggtgggagtactgcaacctgacgcaatgctcagacgcagaagggactgccgtcgcgcctccgactgttaccccggttccaagcctagaggctccttccgaacaagcaccgactgagcaaaggcctggggtgcaggagtgctaccatggtaatggacagagttatcgaggcacatactccaccactgtcacaggaagaacctgccaagcttggtcatctatgacaccacactcgcatagtcggaccccagaatactacccaaatgctggcttgatcatgaactactgcaggaatccagatgctgtggcagctccttattgttatacgagggatcccggtgtcaggtgggagtactgcaacctgacgcaatgctcagacgcagaagggactgccgtcgcgcctccgactgttaccccggttccaagcctagaggctccttccgaacaagcaccgactgagcaaaggcctggggtgcaggagtgctaccatggtaatggacagagttatcgaggcacatactccaccactgtcacaggaagaacctgccaagcttggtcatctatgacaccacactcgcatagtcggaccccagaatactacccaaatgctggcttgatcatgaactactgcaggaatccagatgctgtggcagctccttattgttatacgagggatcccggtgtcaggtgggagtactgcaacctgacgcaatgctcagacgcagaagggactgccgtcgcgcctccgactgttaccccggttccaagcctagaggctccttccgaacaagcaccgactgagcaaaggcctggggtgcaggagtgctaccatggtaatggacagagttatcgaggcacatactccaccactgtcacaggaagaacctgccaagcttggtcatctatgacaccacactcgcatagtcggaccccagaatactacccaaatgctggcttgatcatgaactactgcaggaatccagatgctgtggcagctccttattgttatacgagggatcccggtgtcaggtgggagtactgcaacctgacgcaatgctcagacgcagaagggactgccgtcgcgcctccgactgttaccccggttccaagcctagaggctccttccgaacaagcaccgactgagcaaaggcctggggtgcaggagtgctaccatggtaatggacagagttatcgaggcacatactccaccactgtcacaggaagaacctgccaagcttggtcatctatgacaccacactcgcatagtcggaccccagaatactacccaaatgctggcttgatcatgaactactgcaggaatccagatgctgtggcagctccttattgttatacgagggatcccggtgtcaggtgggagtactgcaacctgacgcaatgctcagacgcagaagggactgccgtcgcgcctccgactgttaccccggttccaagcctagaggctccttccgaacaagcaccgactgagcaaaggcctggggtgcaggagtgctaccatggtaatggacagagttatcgaggcacatactccaccactgtcacaggaagaacctgccaagcttggtcatctatgacaccacactcgcatagtcggaccccagaatactacccaaatgctggcttgatcatgaactactgcaggaatccagatgctgtggcagctccttattgttatacgagggatcccggtgtcaggtgggagtactgcaacctgacgcaatgctcagacgcagaagggactgccgtcgcgcctccgactgttaccccggttccaagcctagaggctccttccgaacaagcaccgactgagcaaaggcctggggtgcaggagtgctaccatggtaatggacagagttatcgaggcacatactccaccactgtcacaggaagaacctgccaagcttggtcatctatgacaccacactcgcatagtcggaccccagaatactacccaaatgctggcttgatcatgaactactgcaggaatccagatgctgtggcagctccttattgttatacgagggatcccggtgtcaggtgggagtactgcaacctgacgcaatgctcagacgcagaagggactgccgtcgcgcctccgactgttaccccggttccaagcctagaggctccttccgaacaagcaccgactgagcaaaggcctggggtgcaggagtgctaccatggtaatggacagagttatcgaggcacatactccaccactgtcacaggaagaacctgccaagcttggtcatctatgacaccacactcgcatagtcggaccccagaatactacccaaatgctggcttgatcatgaactactgcaggaatccagatgctgtggcagctccttattgttatacgagggatcccggtgtcaggtgggagtactgcaacctgacgcaatgctcagacgcagaagggactgccgtcgcgcctccgactgttaccccggttccaagcctagaggctccttccgaacaagcaccgactgagcaaaggcctggggtgcaggagtgctaccatggtaatggacagagttatcgaggcacatactccaccactgtcacaggaagaacctgccaagcttggtcatctatgacaccacactcgcatagtcggaccccagaatactacccaaatgctggcttgatcatgaactactgcaggaatccagatgctgtggcagctccttattgttatacgagggatcccggtgtcaggtgggagtactgcaacctgacgcaatgctcagacgcagaagggactgccgtcgcgcctccgactgttaccccggttccaagcctagaggctccttccgaacaagcaccgactgagcaaaggcctggggtgcaggagtgctaccatggtaatggacagagttatcgaggcacatactccaccactgtcacaggaagaacctgccaagcttggtcatctatgacaccacactcgcatagtcggaccccagaatactacccaaatgctggcttgatcatgaactactgcaggaatccagatgctgtggcagctccttattgttatacgagggatcccggtgtcaggtgggagtactgcaacctgacgcaatgctcagacgcagaagggactgccgtcgcgcctccgactgttaccccggttccaagcctagaggctccttccgaacaagcaccgactgagcaaaggcctggggtgcaggagtgctaccatggtaatggacagagttatcgaggcacatactccaccactgtcacaggaagaacctgccaagcttggtcatctatgacaccacactcgcatagtcggaccccagaatactacccaaatgctggcttgatcatgaactactgcaggaatccagatgctgtggcagctccttattgttatacgagggatcccggtgtcaggtgggagtactgcaacctgacgcaatgctcagacgcagaagggactgccgtcgcgcctccgactgttaccccggttccaagcctagaggctccttccgaacaagcaccgactgagcaaaggcctggggtgcaggagtgctaccatggtaatggacagagttatcgaggcacatactccaccactgtcacaggaagaacctgccaagcttggtcatctatgacaccacactcgcatagtcggaccccagaatactacccaaatgctggcttgatcatgaactactgcaggaatccagatgctgtggcagctccttattgttatacgagggatcccggtgtcaggtgggagtactgcaacctgacgcaatgctcagacgcagaagggactgccgtcgcgcctccgactgttaccccggttccaagcctagaggctccttccgaacaagcaccgactgagcaaaggcctggggtgcaggagtgctaccatggtaatggacagagttatcgaggcacatactccaccactgtcacaggaagaacctgccaagcttggtcatctatgacaccacactcgcatagtcggaccccagaatactacccaaatgctggcttgatcatgaactactgcaggaatccagatgctgtggcagctccttattgttatacgagggatcccggtgtcaggtgggagtactgcaacctgacgcaatgctcagacgcagaagggactgccgtcgcgcctccgactgttaccccggttccaagcctagaggctccttccgaacaagcaccgactgagcaaaggcctggggtgcaggagtgctaccatggtaatggacagagttatcgaggcacatactccaccactgtcacaggaagaacctgccaagcttggtcatctatgacaccacactcgcatagtcggaccccagaatactacccaaatgctggcttgatcatgaactactgcaggaatccagatgctgtggcagctccttattgttatacgagggatcccggtgtcaggtgggagtactgcaacctgacgcaatgctcagacgcagaagggactgccgtcgcgcctccgactgttaccccggttccaagcctagaggctccttccgaacaagcaccgactgagcaaaggcctggggtgcaggagtgctaccatggtaatggacagagttatcgaggcacatactccaccactgtcacaggaagaacctgccaagcttggtcatctatgacaccacactcgcatagtcggaccccagaatactacccaaatgctggcttgatcatgaactactgcaggaatccagatgctgtggcagctccttattgttatacgagggatcccggtgtcaggtgggagtactgcaacctgacgcaatgctcagacgcagaagggactgccgtcgcgcctccgactgttaccccggttccaagcctagaggctccttccgaacaagcaccgactgagcaaaggcctggggtgcaggagtgctaccatggtaatggacagagttatcgaggcacatactccaccactgtcacaggaagaacctgccaagcttggtcatctatgacaccacactcgcatagtcggaccccagaatactacccaaatgctggcttgatcatgaactactgcaggaatccagatgctgtggcagctccttattgttatacgagggatcccggtgtcaggtgggagtactgcaacctgacgcaatgctcagacgcagaagggactgccgtcgcgcctccgactgttaccccggttccaagcctagaggctccttccgaacaagcaccgactgagcaaaggcctggggtgcaggagtgctaccatggtaatggacagagttatcgaggcacatactccaccactgtcacaggaagaacctgccaagcttggtcatctatgacaccacactcgcatagtcggaccccagaatactacccaaatgctggcttgatcatgaactactgcaggaatccagatgctgtggcagctccttattgttatacgagggatcccggtgtcaggtgggagtactgcaacctgacgcaatgctcagacgcagaagggactgccgtcgcgcctccgactgttaccccggttccaagcctagaggctccttccgaacaagcaccgactgagcaaaggcctggggtgcaggagtgctaccatggtaatggacagagttatcgaggcacatactccaccactgtcacaggaagaacctgccaagcttggtcatctatgacaccacactcgcatagtcggaccccagaatactacccaaatgctggcttgatcatgaactactgcaggaatccagatgctgtggcagctccttattgttatacgagggatcccggtgtcaggtgggagtactgcaacctgacgcaatgctcagacgcagaagggactgccgtcgcgcctccgactgttaccccggttccaagcctagaggctccttccgaacaagcaccgactgagcaaaggcctggggtgcaggagtgctaccatggtaatggacagagttatcgaggcacatactccaccactgtcacaggaagaacctgccaagcttggtcatctatgacaccacactcgcatagtcggaccccagaatactacccaaatgctggcttgatcatgaactactgcaggaatccagatgctgtggcagctccttattgttatacgagggatcccggtgtcaggtgggagtactgcaacctgacgcaatgctcagacgcagaagggactgccgtcgcgcctccgactgttaccccggttccaagcctagaggctccttccgaacaagcaccgactgagcaaaggcctggggtgcaggagtgctaccatggtaatggacagagttatcgaggcacatactccaccactgtcacaggaagaacctgccaagcttggtcatctatgacaccacactcgcatagtcggaccccagaatactacccaaatgctggcttgatcatgaactactgcaggaatccagatgctgtggcagctccttattgttatacgagggatcccggtgtcaggtgggagtactgcaacctgacgcaatgctcagacgcagaagggactgccgtcgcgcctccgactgttaccccggttccaagcctagaggctccttccgaacaagcaccgactgagcaaaggcctggggtgcaggagtgctaccatggtaatggacagagttatcgaggcacatactccaccactgtcacaggaagaacctgccaagcttggtcatctatgacaccacactcgcatagtcggaccccagaatactacccaaatgctggcttgatcatgaactactgcaggaatccagatgctgtggcagctccttattgttatacgagggatcccggtgtcaggtgggagtactgcaacctgacgcaatgctcagacgcagaagggactgccgtcgcgcctccgactgttaccccggttccaagcctagaggctccttccgaacaagcaccgactgagcaaaggcctggggtgcaggagtgctaccatggtaatggacagagttatcgaggcacatactccaccactgtcacaggaagaacctgccaagcttggtcatctatgacaccacactcgcatagtcggaccccagaatactacccaaatgctggcttgatcatgaactactgcaggaatccagatgctgtggcagctccttattgttatacgagggatcccggtgtcaggtgggagtactgcaacctgacgcaatgctcagacgcagaagggactgccgtcgcgcctccgactgttaccccggttccaagcctagaggctccttccgaacaagcaccgactgagcagaggcctggggtgcaggagtgctaccacggtaatggacagagttatcgaggcacatactccaccactgtcactggaagaacctgccaagcttggtcatctatgacaccacactcgcatagtcggaccccagaatactacccaaatgctggcttgatcatgaactactgcaggaatccagatgctgtggcagctccttattgttatacgagggatcccggtgtcaggtgggagtactgcaacctgacgcaatgctcagacgcagaagggactgccgtcgcgcctccgactgttaccccggttccaagcctagaggctccttccgaacaagcaccgactgagcaaaggcctggggtgcaggagtgctaccatggtaatggacagagttatcgaggcacatactccaccactgtcacaggaagaacctgccaagcttggtcatctatgacaccacactcgcatagtcggaccccagaatactacccaaatgctggcttgatcatgaactactgcaggaatccagatgctgtggcagctccttattgttatacgagggatcccggtgtcaggtgggagtactgcaacctgacgcaatgctcagacgcagaagggactgccgtcgcgcctccgactgttaccccggttccaagcctagaggctccttccgaacaagcaccgactgagcaaaggcctggggtgcaggagtgctaccatggtaatggacagagttatcgaggcacatactccaccactgtcacaggaagaacctgccaagcttggtcatctatgacaccacactcgcatagtcggaccccagaatactacccaaatgctggcttgatcatgaactactgcaggaatccagatgctgtggcagctccttattgttatacgagggatcccggtgtcaggtgggagtactgcaacctgacgcaatgctcagacgcagaagggactgccgtcgcgcctccgactgttaccccggttccaagcctagaggctccttccgaacaagcaccgactgagcagaggcctggggtgcaggagtgctaccacggtaatggacagagttatcgaggcacatactccaccactgtcactggaagaacctgccaagcttggtcatctatgacaccacactcgcatagtcggaccccagaatactacccaaatgctggcttgatcatgaactactgcaggaatccagatgctgtggcagctccttattgttatacgagggatcccggtgtcaggtgggagtactgcaacctgacgcaatgctcagacgcagaagggactgccgtcgcgcctccgactgttaccccggttccaagcctagaggctccttccgaacaagcaccgactgagcagaggcctggggtgcaggagtgctaccacggtaatggacagagttatcgaggcacatactccaccactgtcactggaagaacctgccaagcttggtcatctatgacaccacactcgcatagtcggaccccagaatactacccaaatgctggcttgatcatgaactactgcaggaatccagatgctgtggcagctccttattgttatacgagggatcccggtgtcaggtgggagtactgcaacctgacgcaatgctcagacgcagaagggactgccgtcgcgcctccgactgttaccccggttccaagcctagaggctccttccgaacaagcaccgactgagcagaggcctggggtgcaggagtgctaccacggtaatggacagagttatcgaggcacatactccaccactgtcactggaagaacctgccaagcttggtcatctatgacaccacactcgcatagtcggaccccagaatactacccaaatgctggcttgatcatgaactactgcaggaatccagatgctgtggcagctccttattgttatacgagggatcccggtgtcaggtgggagtactgcaacctgacgcaatgctcagacgcagaagggactgccgtcgcgcctccgactgttaccccggttccaagcctagaggctccttccgaacaagcaccgactgagcagaggcctggggtgcaggagtgctaccacggtaatggacagagttatcgaggcacatactccaccactgtcactggaagaacctgccaagcttggtcatctatgacaccacactcgcatagtcggaccccagaatactacccaaatgctggcttgatcatgaactactgcaggaatccagatcctgtggcagccccttattgttatacgagggatcccagtgtcaggtgggagtactgcaacctgacacaatgctcagacgcagaagggactgccgtcgcgcctccaactattaccccgattccaagcctagaggctccttctgaacaagcaccaactgagcaaaggcctggggtgcaggagtgctaccacggaaatggacagagttatcaaggcacatacttcattactgtcacaggaagaacctgccaagcttggtcatctatgacaccacactcgcatagtcggaccccagcatactacccaaatgctggcttgatcaagaactactgccgaaatccagatcctgtggcagccccttggtgttatacaacagatcccagtgtcaggtgggagtactgcaacctgacacgatgctcagatgcagaatggactgccttcgtccctccgaatgttattctggctccaagcctagaggctttttttgaacaagcactgactgaggaaacccccggggtacaggactgctactaccattatggacagagttaccgaggcacatactccaccactgtcacaggaagaacttgccaagcttggtcatctatgacaccacaccagcatagtcggaccccagaaaactacccaaatgctggcctgaccaggaactactgcaggaatccagatgctgagattcgcccttggtgttacaccatggatcccagtgtcaggtgggagtactgcaacctgacacaatgcctggtgacagaatcaagtgtccttgcaactctcacggtggtcccagatccaagcacagaggcttcttctgaagaagcaccaacggagcaaagccccggggtccaggattgctaccatggtgatggacagagttatcgaggctcattctctaccactgtcacaggaaggacatgtcagtcttggtcctctatgacaccacactggcatcagaggacaacagaatattatccaaatggtggcctgaccaggaactactgcaggaatccagatgctgagattagtccttggtgttataccatggatcccaatgtcagatgggagtactgcaacctgacacaatgtccagtgacagaatcaagtgtccttgcgacgtccacggctgtttctgaacaagcaccaacggagcaaagccccacagtccaggactgctaccatggtgatggacagagttatcgaggctcattctccaccactgttacaggaaggacatgtcagtcttggtcctctatgacaccacactggcatcagagaaccacagaatactacccaaatggtggcctgaccaggaactactgcaggaatccagatgctgagattcgcccttggtgttataccatggatcccagtgtcagatgggagtactgcaacctgacgcaatgtccagtgatggaatcaactctcctcacaactcccacggtggtcccagttccaagcacagagcttccttctgaagaagcaccaactgaaaacagcactggggtccaggactgctaccgaggtgatggacagagttatcgaggcacactctccaccactatcacaggaagaacatgtcagtcttggtcgtctatgacaccacattggcatcggaggatcccattatactatccaaatgctggcctgaccaggaactactgcaggaatccagatgctgagattcgcccttggtgttacaccatggatcccagtgtcaggtgggagtactgcaacctgacacgatgtccagtgacagaatcgagtgtcctcacaactcccacagtggccccggttccaagcacagaggctccttctgaacaagcaccacctgagaaaagccctgtggtccaggattgctaccatggtgatggacggagttatcgaggcatatcctccaccactgtcacaggaaggacctgtcaatcttggtcatctatgataccacactggcatcagaggaccccagaaaactacccaaatgctggcctgaccgagaactactgcaggaatccagattctgggaaacaaccctggtgttacacaaccgatccgtgtgtgaggtgggagtactgcaatctgacacaatgctcagaaacagaatcaggtgtcctagagactcccactgttgttccagttccaagcatggaggctcattctgaagcagcaccaactgagcaaacccctgtggtccggcagtgctaccatggtaatggccagagttatcgaggcacattctccaccactgtcacaggaaggacatgtcaatcttggtcatccatgacaccacaccggcatcagaggaccccagaaaactacccaaatgatggcctgacaatgaactactgcaggaatccagatgccgatacaggcccttggtgttttaccatggaccccagcatcaggtgggagtactgcaacctgacgcgatgctcagacacagaagggactgtggtcgctcctccgactgtcatccaggttccaagcctagggcctccttctgaacaagactgtatgtttgggaatgggaaaggataccggggcaagaaggcaaccactgttactgggacgccatgccaggaatgggctgcccaggagccccatagacacagcacgttcattccagggacaaataaatgggcaggtctggaaaaaaattactgccgtaaccctgatggtgacatcaatggtccctggtgctacacaatgaatccaagaaaactttttgactactgtgatatccctctctgtgcatcctcttcatttgattgtgggaagcctcaagtggagccgaagaaatgtcctggaagcattgtaggggggtgtgtggcccacccacattcctggccctggcaagtcagtctcagaacaaggtttggaaagcacttctgtggaggcaccttaatatccccagagtgggtgctgactgctgctcactgcttgaagaagtcctcaaggccttcatcctacaaggtcatcctgggtgcacaccaagaagtgaacctcgaatctcatgttcaggaaatagaagtgtctaggctgttcttggagcccacacaagcagatattgccttgctaaagctaagcaggcctgccgtcatcactgacaaagtaatgccagcttgtctgccatccccagactacatggtcaccgccaggactgaatgttacatcactggctggggagaaacccaaggtacctttgggactggccttctcaaggaagcccagctccttgttattgagaatgaagtgtgcaatcactataagtatctgaatggaagagtccaatccaccgaatttgtgctgagcatttggccagaggcactgacagttgccagggtgacagtggagggcctctggtttgcttcgagaaggacaaatacattttacaaggagtcacttcttggggtcttggctgtgcacgccccaataagcctggtgtctatgctcgtgtttcaaggtttgttacttggattgagggaatgatgagaaataattaattggacgggagacagagtgaagcatcaacctacttagaagctgaaacgtgggtaaggatttagcatgctggaaataatagacagcaatcaaacgaagacactgttcccagctaccagctatgccaaaccttggcatttttggtatttttgtgtataagcttttaaggtctgactgacaaattctgtattaaggtgtcatagctatgacatttgttaaaaataaactctgcacttattttgatttga

SEQ ID NO: 50305 - DNA, 822 bp, Homo sapiens
taaacctctcacaaagcccaacacctaacatatgctcgatcaactttaaacatgaaccaagaggtggtattgagggaacaagagaagaagggtgttttgggtcattcatcactctgccaataacctcaggcaagccaaaacaccgctagacagataaggggaattaatattttccaacttaatgacgtcaaggtacactgaactttatttcactgacaaaagaagtgaatcaatttgtaaatggtactgtttatgaatcaattggcattcttacgcactaaatctccacttgtttttaacagtctccagttaaatatgtggataattaactagtccacaatatagtctgagttaggaattgtgtcactagattacctttgaaatctttccaattctaaagctccctggttttgtaagagtaagctcaggttaatccaagcatcacaaatctacgtctctccccttcacgcggtcagctgctttactccaggcgggaggaggtgtgctgtggtacaccagtccctgcacaacaaaagcagttacctaaaagtaaagcgtggagaggaagaagcacaggcagctcagcacccagtgccttgcacaaattatacaggaatcacctgaactgagaggcagcaccagccagtgaagcaagctttgttttaggacttgtaagaaatctaagacacccaaacccctctttgtccctaagtagccctagcctggtaagaggtcacctttcctatctgcaggatggcaagttggcctagaatctctaaggtcccttccagctctgacattcagatgcgcagaactgagggt

SEQ ID NO: 50306 - DNA, 347 bp, Homo sapiens
ctgacaagaccttcatgggagaaaatgtaaaattatatcagaagacattaaactaacatctaaatagacagagctttgtcatgttcatggttaagaaggctcaattatttttaaaaatgtcaattcttcttgaattggtatataaattcaaagtaattcccataaaaacgccatgctttttttctgaaacttgataagatgattttaaaatttatatggaaaagagaaatgacaggaacaacaagtgggaggatttaacctgctagatcccttgccgtaaagctgtagtaacgaagagcagtgtggtgtagatgcaggggctgaggtgggtcagcgcgtaagtggga

SEQ ID NO: 50307 - DNA, 343 bp, Homo sapiens
ctcacgcttgctgagacagaagtcacagcaggattatgcccctcagggcaagaggaagagttcagaaactgccgccgtaacccaagaacaaagttgcatgcagagccaacctaagagcttcaaaatcgggattccttactgagaaagatgtataacataaaacagtcaacagataccaaggaagcagcagccatcgaggctagaagaaatcgagaaaaagagcgacaaaaccgattcttcaatgtgcggaaccgagtcatgggggtggatgtccaggccctgaacaaccaggtgggagaccgaaagcgtcgggaagcagcagaaagaagcaaggaggcagctt

SEQ ID NO: 50308 - DNA, 248 bp, Homo sapiens
catgatgtcattccaagagctggttccggtccctgaggcccatgacccaaaaggcaccccagccagacaccttgtgatgccatgagcaagggtgactttatttaagattgaacagagccacactgttgacagtacatatcacgcttgtcacgtaagcttacgataacccatgagggtaggcattgtcactccacttatgcaggaggaagcagagacccaacactggggctgaactagatctgcctccc

SEQ ID NO: 50309 - DNA, 365 bp, Homo sapiens
tctgggttcaaattctagcgatcccacttatctatagtgtgacgtgggcaagtgactgcctccctgagcccatttcctcttccacatgtgaaaggatgtcacatggacaatcagctttggctctaacaaacctagagcatccgtcagtggcttaaacaagatagatgtttatttcttagccacagaaaagccaagaggtaaccagttagctcggggacctaagccgcttctgttttgttctcctgggcacagcttctcttcctagtgttgcatcgaggtctaagaggctctggccatcatgtcttcattctatccagcagggaggaaaaagggaggaaaaggggcaaagcgctcatgccatttgt

SEQ ID NO: 50310 - DNA, 474 bp, Homo sapiens
tctttcagagttctaagggcagggaaatttccaactcctgtctctattctcactttgctaatcacagcaatgatgacaaataagcaccccagcgttttcctaacttgaaatgaaattgaaatctgtacacacggttaaaatccagacctagaagtgatgctgtgattaaaagcatgggctctggatagagagagatctggattcaaacccctgcttatctatttttatctataaacttagggcaagtgacatagattctctaagccaagtgttctcatctgtaacaaatagatttcgtagggtttttgtgatgataaatgagataatgtgatacgtgctcaataaatgttaactatgattagtaagaagagctccaggggatgtcttcctttgagtcatgcagctttgagaatgctgggatagctctaggtcaggggaaattgcataggattttaatacatcttgggatttaaa

SEQ ID NO: 50311 - DNA, 1037 bp, Homo sapiens
ggtacagatatttatttatttattgagatatggtctcactatgtggcttaggctgtagtgcagtgaatgttcagaggagcaattatagccagtacagcctcaaattcctgggcttaagcaatcctctttcctcagggcctctgaggaactgagattacaggcgtgccagcacaccaggctcatcagggatttcttatatactcctactcaacccctacatgcataaactcccccattatcaatatttcctaccaaagtgatacaatagatgagcgtacattgacatctcattatcacccaaagttcatagtttacactggggttcactggtggtgttgcataatctatgggtttggacatacgtataatgacatggaagctacatgatattttcctacagggtagtttcactgccctaaaatattctgtgaatcgtctctttatgcccctcacccaacccccaggatcccagtgttttctttttgagtttagctgctgatgtttgtcggtttatcaggcactcaaaaaactgcactctctattccctttgctctttttaagggggcatccttatttcctagacagatttgtgactgtgtagatgctgggaacatgttttgctttggagtggggaggggggaaatcttgtaaagatttctctttgtcacatttttgatttgtgaattctcagaggctggacctgggcttcctggaaggtaatgcagatgtgacgtcacaatttcctgtcccgtgctcttgggattggtgtgagaatagtttatcagaatgggctgaccttctgcagattccactgctgaactaattttatagatgaggaagctgaggcccagaaaggcccagaaaagctgaagctcttgggattggtgtgagaacagtttatcagaatgggcaaaacctctggagactccactgctgagctaattttacagatgaggaagctgaagcccagaaaagtaaccactgggacatgccgattaggagcagatatcttcaaaaaaataacttgtctttaaaga

SEQ ID NO: 50312 - DNA, 204 bp, Homo sapiens
acgcggaggaagcccccaccgaggccccccggcaccgcgcctgctgccgggttgcgctccgtgcacctcttgcggattccctataaggagcccctgctggtgcaccagaactaccgggggccatctgcccaactgccccagactctggcagtggggcccccgatggcagtgggcacctccccgtgaaacctgccaagctggacg

SEQ ID NO: 50313 - DNA, 2703 bp, Homo sapiens
tgacatatgttggttcaacttgtatatactattttgtaaactgtttttcccaattaacaatatacacagatgtcttcattttacacacccctctcctacacaccctcagacaaaaggcaaacctattcaagtttttgatttttgaaaatgtttcaatcagggaagctctgggtacatttcatgaagagaagtgatgaagatatccctctgacataacagaaagtggctgtttagctaggaaaatcatcaaataagtaagtagaaatgcatgcagaaacagaatgagtcaatcccaattaatgtttctgtgtttcctaaaagaaaataaacaccgcacatttgtctttagacagcttagtgtgcaccatggttccagtgtttttgctggaagtgtaaagttgttagcacaggcatatttctcagttagcagaaaacagctgctactggaattagtacccagaaatgaagttatttcctcccatcatcttactgaattgctctgctttacaaacaagaagtgaacattaattacttggaaaataggcctgacccagccaggatgaggctgacgcgtggaaagaggtaaaaataaaatgacaaagctctcttcacttcctatgctagtgtctgaaaacagagctgctcagaccattatggtcatttcaaagttttcattcaataaatagttttttagacacctactgtgccctacagggacatatatttttggcatacaatcaataactacaaccgtggtaagaaattaaggtacatgctgaacacttaccactgcagagagatcttatcgccagaattttagcaatcaagactattggcttttggccttccaaacagataaaaggtaacaattttttgaaaaactgagtacctaaactgccagatacattatatgaattctattatttaatttttgcaatgactctatgagttaggtactgttcccaaacccatttcataaatgaggtaaccaaggatcaggaaggtgaagtaaactaacctatgttttacaaaaaataaaaggcaaagctgaattctgaacaaatctcttctcacttatcacactgtttccctgtcaagccaagccctaggaaaacttacaaagtcagtcaaaatatagctttactgttttgccttttctggttcttactgcccttaaatggccagttccctcatcttccctccagatgcacgttccaaattccaaacttattactctgtggccacaactaaagctctcacatcccctgtgtgatccttcagacagggaaaaagataagtagtgattatctaactgaagtaattcattctagggtagatggctgaattcccttaaccctcccaaccattttactaatttttttgtcaaacatttatcactgtatctcccaatcattttaataaagggactcatttccagttggcagaatgtatgtatatgtgagaaagaaatatttgaaaatggagatctccaagaaaatgttttttattgcagcaaggaatcggttaccttacttttgagaggatgttccactcaaatcaacattaaacaatcaatgctacaatgcaaatagtaaaaaaagcttactggggctcctgctaagacgtggcgctgaggttactgcacccaatgaatgtgctagatagtcatccacgcaggcatttctgcaaatatgtattaagtacctactatttgatagtatatagagtttgggccaatacaggaagaatttttaaattcacatttcctattaatttcagtagccactttacgtcatgctatccaacaagggtacataaaactaaaaccttcagacttggaatatttgtataaaatgcattaatttgatagtaaaacatctgagctatggcatatgtttttttcttttttttagacggagtctcgctctgttgcccagactggagtacagtggtgtgatcttggcttactgcaacctccacctcctgggttcagacgattcttgtgcctcagccttccgagtagctgagattacaggcatgagccatcacatctggctaattttttgtattattagtagaggtaggttttcaccatgttggccaggctgatcttgaactccttacctcaggtgatccacccacctcggcctcccaaagtgctggggttacaggcatgagccacacacccaggcaaaagattcttgatgtatctaaaatggtatactgcatgacaacattttggccaaagataagaccacatgtattttgggagtcccataatattataacagaactcagggtgatgggtgtagcaaactaccatgacacatgtatacctgtgtaacaaacctgcacattgtgcacatgtatcccataacttaaagcattaaaaaaaaaaaaagattataacggaactgaaggattcctatcacctagtgacatcttggtgatcctgacctggcgtaggcctaggctattgtatgtggttgtatcttagttttgcacaaaaaaaagttttattcagtgatgttatcatggcccactgcatcctcagcctcctgggttcacgtgatcctctcccttcaatctcctgagtagctgggactattaagcacatgcccaccctgcccagctaattttttattttttgtagagacagggtttctccatgttgtccaagctggtctggaactcctgagctga

SEQ ID NO: 50314 - DNA, 696 bp, Homo sapiens
tgctcatgtgatcctataccccagccttctgaatagctagaactattggcacacgcatccacaccccagctaagtttttaaattttttggaggccaggctgatcttgaactccttacctcaggtgatccacccacctcggcctcccaaagtgctggggttacaggcatgagccacacacccaggcaaaagattcttgatgtatctaaaatggtatactgcatgacaacattttggccaaagataagaccacatgtattttgggagtcccataatattataacagaactcagggtgatgggtgtagcaaactaccatgacacatgtatacctgtgtaacaaacctgcacattgtgcacatgtatcccataacttaaagcattaaaaaaaaaaaaagattataacggaactgaaggattcctatcacctagtgacatcttggtgatcctgacctggcgtaggcctaggctattgtatgtggttgtatcttagttttgcacaaaaaaaagttttattcagtgatgttatcatggcccactgcatcctcagcctcctgggttcacgtgatcctctcccttcaatctcctgagtagctgggactattaagcacatgcccaccctgcccagctaattttttattttttgtagagacagggtttctccatgttgtccaagctggtctggaactcctgagctga

SEQ ID NO: 50315 - DNA, 469 bp, Homo sapiens
gggtgacatcgaattgtgctctcgagctcacaaagccctttgttgagctccattgcatttgttcttcacctgcaccctgcattatgttgccagggttttagcgtcaactagcttacccagttacccgacttggaagtggcagagatggactcaactgaagcctgctaactctcattttagcccctttctaccacatgctgccttttataacatagaccccagcatgcctgggtggagatctgctggagtttatgagcctgggtaccctggggaaaagatgtggatgggattgagtgaatgggaggtgcaagtagtttctctctctggggcagcagccacttgcttgggacaccacaaacacttccctggcagctgagcaccaggttgattaggagcataacattttccgggggaaaatggggaaaacttgcaaaatgcagtttgtttttttccagaggtccatgagaat

SEQ ID NO: 50316 - DNA, 1002 bp, Homo sapiens
ttttctacccgttaatgaaccaattatattaaatcctctaattgctgacacatgttgaattgaacagacactttaacaacctaccagcagcacagagtattcccagttttaccattttccatttagctatagtgtccttttaaggattctaggcaacagtgaaccttatttaaaaagcaaaattgtgctataacaagtgcaaaaggaaagtttgtgttcctaccgtgctttaaagtattgatggtagcaagagaaagcgcagtggtgtttttgctcatagaaattctggaaattaggtgcctgaagtcttacactcattttttaaaagtatagcatctgcttccagttttcagtgactccattgatgatgcatgcggtttggccgtatcatactgagctttaaacacaagatttataaacatggtatgtagtgcatcttttgcaaacaggttggcagcggtactgtgtgacttggtcttttgtggcttttttgagaaaaatgaaacactttgcatgtatagttttttctcccaactacttgtgagtagttcctggttataaaacgttatgaaggtagcacataacccttttctagaatgaagaggcttttgagctaccagtgtaaggggataggtagaaatagagatgaaaggcactaagatgtcctactctttaagagcattgaacgccagttgtgccatttattcaaagtcatctttgaacttatgttaaaatggggtaaaaacaggtaactacttcaggccgggctcatgcttgtaatcccagtgctttgggaggccaaggcaggtggttcacctgacctgaggtcaggagaccagcctgggcaacatggcgaaaccccatctctactaaaagtacaaaaagtagcctagcgtggtggcgcacccctgtaatcccagctactcggggaggtggaggttgcagtgagccgagatcacatgactgaattccagcctggatgacagagggagactctgtctc

SEQ ID NO: 50317 - DNA, 272 bp, Homo sapiens
catgtatgttgttgtttcatacatttacaatatttttaaaatttaaaccagtagtctaatgtaataagaactatttcaccatgaaagataaagagtgtaataattcctgtcaaaagtccaatgtacattgtctaggtaagcagaatccagatagttcacctgaaaaatagtaaaatgtccaaacagcttcataaataaatagactatgtttaatcttaaaaaactgctaatatacgtatttgatattaagaattttaaaattaatttcactg

SEQ ID NO: 50318 - DNA, 324 bp, Homo sapiens
atgtgtttggtcttcgaccccttttcctgacatacaactctaaaaatccttagaatctccacagtgatgtcttttgtattttaatgaccgactgatgggtggcagcccgtagatagctccaagatggggctggtcaccagaaagaccaaggcattactagaagattggaaccttcagcccacccccaccctccagggaggggagaacaggtgaaggttaagttgatcaccagtggccaatgatgtaatcaattatgaccatataatgaagtttccataaaaacccaaaggactggggtccaagagcttctggatagctaaacac

SEQ ID NO: 50319 - DNA, 2087 bp, Homo sapiens
tcactgcaacctctgcctcccgggttcaagggattctcctgcctcagcctcccgagtagctgggattacaggcgcctgccaccacgcccggctaatttttgtgattttttttccagcagagatggggtttcaccatgttgctcaggttggtctcgaactcctgacctcagatgatccacccgcctcggcctcccaaagtgctgggattacaggcgtgagccaccgcgcctggcctgtttattctcttaagagagaaaatgaggggattaatggactgtagttctggacaaggtggaaaactcttaaagtggaagtactggggcaagtgctctgacagggtaggatggtgcagtcagtcccttcacccagaaatcagtagaatgttagcagttcagactcaaaccttgtgaaaaacaggtggtggaaaggaaatccctcacagcaactggcaccataatcaagacaatgtttacaggataaatggagttacctgctttcagccccaggtcgtagctattgtctgccctgctgatatgtgataataatttgtgatcctgttgtcttaaaatggggtcactcatctccagtagaattaagtccacagtgaagttgtccccccatccccaaagagataaacatatatgaatgaactcacgtgataacaactactgctgcctgggatcatgagagacctgaactgaactgataggaagtgaaaggtggctgagataatgagaatagacccatctgcagaggatcataaaaccagcaaagacaagatcttgtctaagatgccttcacaagctttgtccatgagaactcttaaggatttcaccagacctgttggctgctgctgtgatctctgcccaagaggagcctctgaccaacatccaaagggcttctggacccactggactcctctggaggtaccttggtctcccgatccatggctgtggttttttactccctttatcactgcctgtgtgtagaatgataattgcacaattgatagtgtgaagacctcttgataaatggtaaatctgagcatatgtatttggctgacatgtcattgtgaaacctcacagcttcagtcagtgtctctccaaggactaaacaatggaagactgtagaagatgctattcattaagatatcgcaagaatatggaagactattattcgcttctcatgggacaggacttttcagggcacctgaaaaaactcccatgaaaaatcacttttacaaaatgtcaagttatgatatccaagatgaaaccaatgagtcacaacattcacataatacactgtacaaccctgatctcttgactgtcatcaaatgtttcttacctctaaaccaaagtttcattttataatttaatttttctcattttttccattctcttagcttaagaaaagatcattacaaactttttgtaagtttttcatatatgcttgcaaagggtcgtaaaactttattgtgattattcttgctttaagctgaaacatccctaatctttctttagagattgtggcatagcatgttagtttcttttccatatccaattgttgtctgtaatgaatacagaaatacgggcactattttgtaactttaaatagacatcatctcaagtctacaagaattatccaaaatggtatttaatgacatttctaggtcttcagacactattaatgcagattgtagcctctaggtcctgaagattttactagatactggttactgaaactgagctttcttgaattctttttccttccactgtggtttcccgcatttcaacatatcacctatttttgtcctcaaaggttacttaaattttttccacagaattaaattaaatatgaatcatccctcctctgatttttgaaatgaccctttgcttcctatgataatgattcttctggtccgttttgtagttatatgttagagtttgtaaatagtcacacattttgcaactgcatgtaattttcttattattttttcctcttcctctaaaactgctgttatttcttttaactttttgtgggaaaaattaaacccatctttcactttgttgatatacttatttataatt

SEQ ID NO: 50320 - DNA, 2069 bp, Homo sapiens
cttatttataattgaaccccttgatttttgctcgaattgcttttcaagttactcacttttagggaagacattatttgggttttgtttagtgtatcaggctttttttagttagttgtatcaagaagtgtagacttttctaaacataaaatcctttttcccccagtagttttttttttttttttttttaaagtctggcgtgagccaccgcgcctggcctgtttattctcttaagagagaaaatgaggggattaatggactgtagttctggacaaggtggaaaactcttaaagtggaagtactggggcaagtgctctgacagggtaggatggtgcagtcagtcccttcacccagaaatcagtagaatgttagcagttcagactcaaaccttgtgaaaaacaggtggtggaaaggaaatccctcacagcaactggcaccataatcaagacaatgtttacaggataaatggagttacctgctttcagccccaggtcgtagctattgtctgccctgctgatatgtgataataatttgtgatcctgttgtcttaaaatggggtcactcatctccagtagaattaagtccacagtgaagttgtccccccatccccaaagagataaacatatatgaatgaactcacgtgataacaactactgctgcctgggatcatgagagacctgaactgaactgataggaagtgaaaggtggctgagataatgagaatagacccatctgcagaggatcataaaaccagcaaagacaagatcttgtctaagatgccttcacaagctttgtccatgagaactcttaaggatttcaccagacctgttggctgctgctgtgatctctgcccaagaggagcctctgaccaacatccaaagggcttctggacccactggactcctctggaggtaccttggtctcccgatccatggctgtggttttttactccctttatcactgcctgtgtgtagaatgataattgcacaattgatagtgtgaagacctcttgataaatggtaaatctgagcatatgtatttggctgacatgtcattgtgaaacctcacagcttcagtcagtgtctctccaaggactaaacaatggaagactgtagaagatgctattcattaagatatcgcaagaatatggaagactattattcgcttctcatgggacaggacttttcagggcacctgaaaaaactcccatgaaaaatcacttttacaaaatgtcaagttatgatatccaagatgaaaccaatgagtcacaacattcacataatacactgtacaaccctgatctcttgactgtcatcaaatgtttcttacctctaaaccaaagtttcattttataatttaatttttctcattttttccattctcttagcttaagaaaagatcattacaaactttttgtaagtttttcatatatgcttgcaaagggtcgtaaaactttattgtgattattcttgctttaagctgaaacatccctaatctttctttagagattgtggcatagcatgttagtttcttttccatatccaattgttgtctgtaatgaatacagaaatacgggcactattttgtaactttaaatagacatcatctcaagtctacaagaattatccaaaatggtatttaatgacatttctaggtcttcagacactattaatgcagattgtagcctctaggtcctgaagattttactagatactggttactgaaactgagctttcttgaattctttttccttccactgtggtttcccgcatttcaacatatcacctatttttgtcctcaaaggttacttaaattttttccacagaattaaattaaatatgaatcatccctcctctgatttttgaaatgaccctttgcttcctatgataatgattcttctggtccgttttgtagttatatgttagagtttgtaaatagtcacacattttgcaactgcatgtaattttcttattattttttcctcttcctctaaaactgctgttatttcttttaactttttgtgggaaaaattaaacccatctttcactttgttgatatacttatttataatt

SEQ ID NO: 50321 - DNA, 1534 bp, Homo sapiens
cttatttataattgaaccccttgatttttgctcgaattgcttttcaagttactcacttttagggaagacattatttgggttttgtttagtgtatcaggctttttttagttagttgtatcaagaagtgtagacttttctaaacataaaatcctttttcccccagtagttttttttttttttttttttaaagtctggcgtgagccaccgcgcctggcctgtttattctcttaagagagaaaatgaggggattaatggactgtagttctggacaaggtggaaaactcttaaagtggaagtactggggcaagtgctctgacagggtaggatggtgcagtcagtcccttcacccagaaatcagtagaatgttagcagttcagactcaaaccttgtgaaaaacaggtggttttttactccctttatcactgcctgtgtgtagaatgataattgcacaattgatagtgtgaagacctcttgataaatggtaaatctgagcatatgtatttggctgacatgtcattgtgaaacctcacagcttcagtcagtgtctctccaaggactaaacaatggaagactgtagaagatgctattcattaagatatcgcaagaatatggaagactattattcgcttctcatgggacaggacttttcagggcacctgaaaaaactcccatgaaaaatcacttttacaaaatgtcaagttatgatatccaagatgaaaccaatgagtcacaacattcacataatacactgtacaaccctgatctcttgactgtcatcaaatgtttcttacctctaaaccaaagtttcattttataatttaatttttctcattttttccattctcttagcttaagaaaagatcattacaaactttttgtaagtttttcatatatgcttgcaaagggtcgtaaaactttattgtgattattcttgctttaagctgaaacatccctaatctttctttagagattgtggcatagcatgttagtttcttttccatatccaattgttgtctgtaatgaatacagaaatacgggcactattttgtaactttaaatagacatcatctcaagtctacaagaattatccaaaatggtatttaatgacatttctaggtcttcagacactattaatgcagattgtagcctctaggtcctgaagattttactagatactggttactgaaactgagctttcttgaattctttttccttccactgtggtttcccgcatttcaacatatcacctatttttgtcctcaaaggttacttaaattttttccacagaattaaattaaatatgaatcatccctcctctgatttttgaaatgaccctttgcttcctatgataatgattcttctggtccgttttgtagttatatgttagagtttgtaaatagtcacacattttgcaactgcatgtaattttcttattattttttcctcttcctctaaaactgctgttatttcttttaactttttgtgggaaaaattaaacccatctttcactttgttgatatacttatttataatt

SEQ ID NO: 50322 - DNA, 2719 bp, Homo sapiens
  misc_feature (1002)..(1002): n is a, c, g, or t
  misc_feature (1360)..(1360): n is a, c, g, or t
agatagcatgtgtaattaatttttaatgcagtgctggatgcagcgctttcaagcagttagtggatgtgaagaagcagcactggccaaggacatcagagacctcagagcaaggcagccccgttctcctttaaagggactcggaaagtggcagaggaggcttgcattgccctctgtgtggagcggactggcccagaaatgggttcttctcgggtgacctgaggtcaagtcagtctataacaatctaagaccagggatcccaagagatcatctcctccaacctcttcattatataaatggggaaaccaaggcagagagtggggatgaagccatgacacatgggtggcagagctgactcatacctgggtctgcccactaggccatactacctctcttgagtttttattgaaaaccagaaaaggaagttcgtcgcccagtggaagccacttaaagattgatttctgcctgaccatgaggcttggtgtgaaccctgcaatgagattggtagcaggtagagctctgatgttgaggagccccacgttgggtgccttggacttcagctctgctatctgcagtgggagcccaccagacacatcctgggtttgagactctggggttgtgctttgacagctggctgccctgtccctgtggggctctgtggcatggatgtgtgtttgaagttaaatgtcattgtggacccgtgttagactgcaggcattgtgggaagctctcgagatggggccatcctcggtccttcccttgcagtgaatgggagtgagtatgtgatcccaggctagccacttacttcctctctccaatcttcagtgtccccacctgtaaaatggggacactgaagtacttgcttaccatccctctactggcaggtcccatgaacagctaccatctgggcgtggccacagcccatgaccagcacctgggggaatcagagggaaaaggccggtgggaagggaaggagggagaaagctgagatgccggaaagccttntgagactctggccttgggtaatcggcaccccagtgacgacttagctcttggaaagccacttgcctgggagagtttcttagtgtgaatgaaggcagaggaagggccaacatcatcagtgttcctggggcttgccactgtttgctaaagggccggctcagtcctaggcatgacatctcatcgttgtaacgctcccaagaagaggcactcccccacccttttgcttatgaggatattggggctcagagaggccacacaacccaccaggggtcacacagcacacaaatagcagaacttggacagagagtctcaaaacagagattcagactcaggtctggccagcctcccagctgtacttggngctctcccgtctggcttcccactgggctgtagtggacaacagagaaggagctgctggtagaaaaccaaatcaaactctgatatggtacctgggagggtcctgaaggtcttccttcatgcactggtcatccttgtgccagaccctgggctggactgagggatccggaaatgggcatgacggggtccttgccctagaggaactcaccgtggtgggggtgcccatggagggccttctcactcagtggatgtgaaatgcatgtccccatggcgcctttctctgtttgaaaaaaatgaatcaattggctgctgctcgggtgctccctcacttattgccatggtgcagctcaagagcagatctcaggatggagaggtgtcccacctgaggacagcttgtccttgtggtcgcattgctgagaggtggggggtaccttctgtgaggatttttacctgaatgaagcacaagtggtgcctgactgcattggaatccacgtgattattggcgtgtttttgactctcattttatccagtggtgcattgggcccatggctggtccataaccgcatgttatgtggaagaagcgagagagtaatgggttttccatgaaaggtggtgctgtttctggaaatggggcatacatatgctcatcctcatggagcagcgccgtattaaacagaattgtgtgaattgaaggtcacctggaccactcttggaaaatgctcccgacccccatggggttccttccagagaatttgtgttctctgtacctgagatcaaatgtgtgtctaagcaattctggcccctggctcccaccaccctaccctctccacaaaataatagacattaggggaggtaagggaacagaagaggtctctttgcagatattatatttttaaaaaatggttctatgtaataagcagcagctaaggagacagaaagacagtagatgaagagagtgccaatatcttccatggggaaaaatgaatgaactgaaagagaatattatttttctagaatacagaaagctgtcctctcacagatcagctggaattccaaggtggattatggacttcttctaactcccattgatagtgcttcttaccaggtgaagggaagggctactttttcctaaaggagaaaaaagctttcagacaaagctcgtaccaacccctgaactgcaaatttgctcaagtgaccgtgcatacttatattcctaatttaaatgattatttatgtcaaacgctcattgtgaaacttgaaaatgttgtattacattacatcaaataaagtttacttgtagcagacagaaagagagaaagagaaagaaagaaaggaaagaaaggaaggaaagaaggaaagaaag

SEQ ID NO: 50323 - DNA, 4039 bp, Homo sapiens
cgaaaacccaattgacaagaattccctccgaagctctgtggtccgatctgcggtccgcttgctttccctgcccggtcccgagcgctcagcctgaagcgccgctttcgagggcaccctgcatacactggccgcgcctcagggatctcattgcccgcgctttctcattgcctctttccgtgttcgattcggctgatctgggcccagcctccgctcccgctctctgtcggtgggcgcgggggaatccgaaacggctcagcagaatcccagcagcttgctgctactggagcgggccgcctccatggcctccaggcaggccgggctggaccgcgtgaggtcctaggagacgggattccgggaagcggggagtatggtgggggtcctggccatggcggctgcagctgctccgcctcccgtgaaggactgcgagattgagccatgcaaaaagcgaaagaaagatgatgacacatctacctgcaaaacaattacaaaatatttatcaccactagggaagactagagacagggtttttgctccaccaaaacctagtaatattctggattattttagaaagacttcacccacaaatgagaagacacaattagggaaagagtgcaagataaagtcacctgaatcagtacctgttgacagcaacaaagactgtacgacacctttggaaatgttctcaaatgtagagtttaagaagaaaagaaagagggttaatttatctcatcaactaaataatattaaaactgaaaatgaagctccaattgaaattagtagcgacgatagcaaagaagactatagtttaaataatgattttgtggaaagtagtacttctgttttacgttacaagaaacaagtagaggtacttgcagaaaacattcaagatacaaaaagtcaaccaaatactatgacctccctgcaaaattctaaaaaagtaaatcctaaacaagggaccacaaaaaatgacttcaaaaagttgagaaaaaggaaatgcagagatgtagtagatctatctgaaagcttacccttggcagaggaactaaatttgcttaaaaaagatggtaaagatactaaacagatggagaatactacaagccatgcaaactctagagataacgtaactgaagcagcccagttaaatgatagtataataactgtctcatatgaggaatttttaaaaagtcacaaggaaaataaagtggaagagataccagactctacaatgtcaatttgtgttccttctgaaactgtcgacgaaatagtcaaaagtggttatataagtgaatcagaaaactccgaaatttcccagcaggtacgctttaagacagttactgttcttgcacaggttcaccctattccgcccaaaaagacagggaaaataccccgaattttcttgaaacaaaagcaatttgaaatggaaaatagtttatctgatcctgagaatgaacagacagttcagaaaagaaaatctaatgttgttatacaggaggaagaattagaattggctgttttggaagctggaagttctgaagctgtgaaaccaaaatgcactctagaagaaagacagcaatttatgaaagcatttaggcagccagcatcagatgcacttaaaaatggagttaaaaagtcttctgataagcagaaagaccttaatgaaaaatgtctatatgaagtaggaagagatgataattctaaaaaaatcatggaaaattctggtatccaaatggtttcaaaaaatggcaatttacagttacacactgataaaggaagttttctgaaggagaaagataaaaagctaaagaagaagaataagaaaacattagatactggggctattccaggcaaaaacagagagggaaacactcaaaagaaagaaacaacctttttcttaaaagagaaacaatatcaaaatagaatgagtttaagacaaaggaaaacagagtttttcaaaagcagcactttatttaacaatgaaagtcttgtttatgaagatatagcaaatgatgaccttctaaaggtttcctctctgtgtaacaataataaattgtcaagaaaaaccagcataccagttaaagatattaagcttacacagtctaaagctgaatctgaagccagcttgctaaatgtttccacgcccaagtcaactagaagatctggaagaattagcagcacacctactacagaaaccattagaggtattgattctgacgatgtacaagataatagtcaactaaaggcttccactcaaaaagcagccaacttatcggaaaagcacagcttatatacagcagaattaataacagtaccctttgattcagagagccctattagaatgaaattcaccagaattagtactcccaaaaaatctaagaaaaaatctaacaaaagatctgagaaatctgaagcaactgatggaggttttacttctcagattagaaaggcaagcaatacttcaaaaaacatatcaaaagcaaaacaattgattgaaaaagcaaaagctttacacatcagtaggtcaaaggtgactgaagaaatagcgatacccttaaggcgctcctctagacatcagacacttcctgaaaggaagaaattgtcagaaacagaagattctgttataataatagattcaagtcctactgctttaaagcatccagagaaaaatcagaagaaacttcagtgtttgaatgatgtgctaggaaaaaaacttaacacatccactaaaaatgtacctggaaaaatgaaagtcgctcctttatttcttgtcagaaaagcacaaaaagcagctgatcctgtccctagttttgatgaaagcagtcaagatacatctgaaaaatctcaggattgtgatgttcaatgtaaagcaaagcgtgacttcctaatgagtggtttgccagatttgttgaaacggcaaattgcaaagaaagctgctgcgctggatgtgtacaatgcagtgagtaccagtttccagagagtcgtacatgtgcaacaaaaggatgatgggtgttgtttgtggcatttgaaaccaccctcttgtcctctcttaactaaatttaaagaactgaacactaaagtaatagatctctcaaaatgtggtattgctcttggtgaattttcaacattgaattcaaagttgaaaagcggtaactctgctgctgtgttcatgaggacaaggaaggaatttactgaagaagtaagaaatcttttgcttgaggaaattaggtggtcaaatcctgaattttcattgaaaaaatattttcccttactcctaaaaaaacaaattgagcaccaagtactttcttccgagtgtcatagtaaacaagaactggaggctgatgtcagccataaagaaaccaaaaggaaactcgtagaagcagaaaattctaagtcaaaaagaaagaaaccaaatgagtattcaaaaaatctggagaagaccaataggaagtcagaagaacttagcaaaagaaacaactcttctgggataaagctagattcttccaaagattctggaactgaagacatgctttggacagaaaagtatcaacctcagactgccagtgaacttataggaaatgagttagctataaaaaagttacatagttggttgaaagactggaaaagaagagctgaattggaagaaaggcagaatctgaagggaaaaagagatgagaaacatgaagatttctcgggtggcatagactttaaaggcagttcagatgatgaagaagagagtcgtctttgcaatactgtccttataacagggccaacaggagtgggaaaaactgctgcagtgtatgcttgtgcccaggagcttggatttaagatatttgaagtgaatgcctcttcccagcgcagtggtagacaaattctatctcagttgaaggaagctactcagtcccatcaagtagacaaacaaggtgtaaactcacaaaaaccctgtttttttaatagctactacataggcaagtcaccaagtaagtaaactattttccttaagccataatgttttgaaaaaaataaaatctaagaaagtaatgtt

SEQ ID NO: 50324 - DNA, 1732 bp, Homo sapiens
agacgacggctccctttaatctaggaaaatgaaattcaccagaattagtactcccaaaaaatctaagaaaaaatctaacaaaagatctgagaaatctgaagcaactgatggaggttttacttctcagattagaaaggcaagcaatacttcaaaaaacatatcaaaagcaaaacaattgattgaaaaagcaaaagctttacacatcagtaggtcaaaggtgactgaagaaatagcgatacccttaaggcgctcctctagacatcagacacttcctgaaaggaagaaattgtcagaaacagaagattctgttataataatagattcaagtcctactgctttaaagcatccagagaaaaatcagaagaaacttcagtgtttgaatgatgtgctaggaaaaaaacttaacacatccactaaaaatgtacctggaaaaatgaaagtcgctcctttatttcttgtcagaaaagcacaaaaagcagctgatcctgtccctagttttgatgaaagcagtcaagatacatctgaaaaatctcaggattgtgatgttcaatgtaaagcaaagcgtgacttcctaatgagtggtttgccagatttgttgaaacggcaaattgcaaagaaagctgctgcgctggatgtgtacaatgcagtgagtaccagtttccagagagtcgtacatgtgcaacaaaaggatgatgggtgttgtttgtggcatttgaaaccaccctcttgtcctctcttaactaaatttaaagaactgaacactaaagtaatagatctctcaaaatgtggtattgctcttggtgaattttcaacattgaattcaaagttgaaaagcggtaactctgctgctgtgttcatgaggacaaggaaggaatttactgaagaagtaagaaatcttttgcttgaggaaattaggtggtcaaatcctgaattttcattgaaaaaatattttcccttactcctaaaaaaacaaattgagcaccaagtactttcttccgagtgtcatagtaaacaagaactggaggctgatgtcagccataaagaaaccaaaaggaaactcgtagaagcagaaaattctaagtcaaaaagaaagaaaccaaatgagtattcaaaaaatctggagaagaccaataggaagtcagaagaacttagcaaaagaaacaactcttctgggataaagctagattcttccaaagattctggaactgaagacatgctttggacagaaaagtatcaacctcagactgccagtgaacttataggaaatgagttagctataaaaaagttacatagttggttgaaagactggaaaagaagagctgaattggaagaaaggcagaatctgaagggaaaaagagatgagaaacatgaagatttctcgggtggcatagactttaaaggcagttcagatgatgaagaagagagtcgtctttgcaatactgtccttataacagggccaacaggagtgggaaaaactgctgcagtgtatgcttgtgcccaggagcttggatttaagatatttgaagtgaatgcctcttcccagcgcagtggtagacaaattctatctcagttgaaggaagctactcagtcccatcaagtagacaaacaaggtgtaaactcacaaaaaccctgtttttttaatagctactacataggcaagtcaccaagtaagtaaactattttccttaagccataatgttttgaaaaaaataaaatctaagaaagtaatgtt

SEQ ID NO: 50325 - DNA, 155 bp, Homo sapiens
aatgtgatttgtgattgtatttttttctattattaaatataaaatattttcttgtgatgtaaattaatgtttcaattttttgtttaggcaagcaatacttcaaaaaacatatcaaaagcaaaacaattgattgaaaaagcaaaagctttacacat

SEQ ID NO: 50326 - DNA, 583 bp, Homo sapiens
agttaaagatattaagcttacacagtctaaagctgaatctgaagccagcttgctaaatgtttccacgcccaagtcaactagaagatctggaagaattagcagcacacctactacagaaaccattagaggtattgattctgacgatgtacaagataatagtcaactaaaggcttccactcaaaaagcagccaacttatcggaaaagcacagcttatatacagcagaattaataacagtaccctttgattcagagagccctattaggtaaggtttgtttttgttctaacgttctagtattctgcatgtattattagctggggacaaaaatgcttcaagtattggagggtatttttttttctagaacacagctgtttaaaagaaaaagaacaggatttcttttttttttttctttgagatggagtcttgctgtgtcgcccaggctggagtgcagtggggcaatctcggctcactgcaacctccacctcccaggttcaagcaattctcctgccttagcctcccaagtagctgggactacaggcacccgccaccacgcccagctaatttttgtatttttagtagacat

SEQ ID NO: 50327 - DNA, 1786 bp, Homo sapiens
cgaaaacccaattgacaagaattccctccgaagctctgtggtccgatctgcggtccgcttgctttccctgcccggtcccgagcgctcagcctgaagcgccgctttcgagggcaccctgcatacactggccgcgcctcagggatctcattgcccgcgctttctcattgcctctttccgtgttcgattcggctgatctgggcccagcctccgctcccgctctctgtcggtgggcgcgggggaatccgaaacggctcagcagaatcccagcagcttgctgctactggagcgggccgcctccatggcctccaggcaggccgggctggaccgcgtgaggtcctaggagacgggattccgggaagcggggagtatggtgggggtcctggccatggcggctgcagctgctccgcctcccgtgaaggactgcgagattgagccatgcaaaaagcgaaagaaagatgatgacacatctacctgcaaaacaattacaaaatatttatcaccactagggaagactagagacagggtttttgctccaccaaaacctagtaatattctggattattttagaaagacttcacccacaaatgagaagacacaattagggaaagagtgcaagataaagtcacctgaatcagtacctgttgacagcaacaaagactgtacgacacctttggaaatgttctcaaatgtagagtttaagaagaaaagaaagagggttaatttatctcatcaactaaataatattaaaactgaaaatgaagctccaattgaaattagtagcgacgatagcaaagaagactatagtttaaataatgattttgtggaaagtagtacttctgttttacgttacaagaaacaagtagaggtacttgcagaaaacattcaagatacaaaaagtcaaccaaatactatgacctccctgcaaaattctaaaaaagtaaatcctaaacaagggaccacaaaaaatgacttcaaaaagttgagaaaaaggaaatgcagagatgtagtagatctatctgaaagcttacccttggcagaggaactaaatttgcttaaaaaagatggtaaagatactaaacagatggagaatactacaagccatgcaaactctagagataacgtaactgaagcagcccagttaaatgatagtataataactgtctcatatgaggaatttttaaaaagtcacaaggaaaataaagtggaagagataccagactctacaatgtcaatttgtgttccttctgaaactgtcgacgaaatagtcaaaagtggttatataagtgaatcagaaaactccgaaatttcccagcaggtacgctttaagacagttactgttcttgcacaggttcaccctattccgcccaaaaagacagggaaaataccccgaattttcttgaaacaaaagcaatttgaaatggaaaatagtttatctgatcctgagaatgaacagacagttcagaaaagaaaatctaatgttgttatacaggaggaagaattagaattggctgttttggaagctggaagttctgaagctgtgaaaccaaaatgcactctagaagaaagacagcaatttatgaaagcatttaggcagccagcatcagatgcacttaaaaatggagttaaaaagtcttctgataagcagaaagaccttaatgaaaaatgtctatatgaagtaggaagagatgataattctaaaaaaatcatggaaaattctggtatccaaatggtttcaaaaaatggcaatttacagttacacactgataaaggaagttttctgaaggag

SEQ ID NO: 50328 - DNA, 1248 bp, Homo sapiens
cgaaaacccaattgacaagaattccctccgaagctctgtggtccgatctgcggtccgcttgctttccctgcccggtcccgagcgctcagcctgaagcgccgctttcgagggcaccctgcatacactggccgcgcctcagggatctcattgcccgcgctttctcattgcctctttccgtgttcgattcggctgatctgggcccagcctccgctcccgctctctgtcggtgggcgcgggggaatccgaaacggctcagcagaatcccagcagcttgctgctactggagcgggccgcctccatggcctccaggcaggccgggctggaccgcgtgaggtcctaggagacgggattccgggaagcggggagtatggtgggggtcctggccatggcggctgcagctgctccgcctcccgtgaaggactgcgagattgagccatgcaaaaagcgaaagaaagatgatgacacatctacctgcaaaacaattacaaaatatttatcaccactagggaagactagagacagggtttttgctccaccaaaacctagtaatattctggattattttagaaagacttcacccacaaatgagaagacacaattagggaaagagtgcaagataaagtcacctgaatcagtacctgttgacagcaacaaagactgtacgacacctttggaaatgttctcaaatgtagagtttaagaagaaaagaaagagggttaatttatctcatcaactaaataatattaaaactgaaaatgaagctccaattgaaattagtagcgacgatagcaaagaagactatagtttaaataatgattttgtggaaagtagtacttctgttttacgttacaagaaacaagtagaggtacttgcagaaaacattcaagatacaaaaagtcaaccaaatactatgacctcccaaagtgctgggattacaggcatgagccaccgtgcccagccccattcagtatatatagcttttccaaagtatgctattgatttattcatttatatagctttatacaggatgagtatccctaatccaaaaatctgaaatttgaaatgctccaaaatccaaaacattttgagtgctgacatggtgccataagtggaaaattccatacctggggccaggcaccatggctcatccctataatcccagcactttgagaggccgaggtgggagcattgcttgagcctaggagtttgaggccaggctgggcaacacagggagaccacacctttacc

SEQ ID NO: 50329 - DNA, 1082 bp, Homo sapiens
ggaaaagatggggacaccaaaccaggacagtggctggagtgtgggggtgagaagtgggtataaagtggagaggagatgagcttggtctctgctctggtctcagcctttatgtactgtcttggtgggatgaccgtggttgggtcctgcctccaagggtatcccagagggttctagaaactcccacatggacaggcacttgaaggatagtgctggtgattgggcaggtgcctggatggaggtgaggcctaaagcacacccggggacagaaggcagcacccacacgggagcccagcttcgtgccagggactgtattttaggtgctggatcttgtttaaatcttccggctggctatgattatcctctaagctggggaaggaagaaaagcattccagtactatacctctgtttgggttaaaggaggggaaagtattttaaataaaacctattagagttaaaaggatgagtagcaataaaaatatctttgaatctctgatggttctattgtagtcaaaagttttagataaattgtgaagaatctctaatcatgctatgtggagtttttctcttttaaaaaatacaagttattgtatatacttaaggtatataacgcgatgttatgaatacatttagatagtaaaaaggttactatagtgcagcaaatgaacatattcatcatctcagctggcacaaaagtaattgcaatttttgccattactttcaatgacgaaaactgcaatacttttgcactgcactaataaaatctgctcatttagcatgaatcccaaaatacagtacaacttattccctatagtcctcatgttgcacattagtgctcttttttatttttaaatttttatttttgttatttttaatatagagagagacagggtctcacgacattgtccaggttggtcttgaactctggggctcaagtgatcctccctcctcagcctcccaaagtgctgggattacaggcacaagctctctacacttgttcattccacgtatctgctaccttgcaccctccatatcctcattcgtggattcaaccaaccacagatcagaaatattaaaaaaaaata

SEQ ID NO: 50330 - DNA, 483 bp, Homo sapiens
atctacaatttataaaaagtttgtgttatattctaaattggtgagttggttatttagatcctaaaattgattcttcattcagaacaaaaaaattataaaataacggacttgtttccatggtagccagaataagtaaggttgttgacaaaagctaagtgtctgtttcacagagataactttcttaatggtggaaagattctgggtgttaccatattgctaccaggtagctctgtgtcccctgtgaaatgtggtactgtttggtgtggaggtgagaggaactcaagagttaattgttgcttatagtagatcacattattcaaaaacagttgcttcccttctttactggcttctccctacaggacctcctatttgtgggaggagtacttccttgttcctgtggacatcaggaatggccatggaacttgatttggccactggaagatgagtagaagtgattatttgtcatgtctaagctgaagcctt

SEQ ID NO: 50331 - DNA, 448 bp, Homo sapiens
cctctgaaatggcaatgcaaaatatattcgtgtgatttgttgatctaacacgcaggatgctaagtgctaggcattgttgaaagtgccttaaatgttaactgatttaatgcttttggcagctgcttgaggtaggcactatcactatcctctccattttatagatgatgagcctgaggtgcagagagatcccgcagctggtaagtggcagagccaggcaagtctggtgccagggtttcagcgactatcccaagctctgcttagtcttcctgtacaaagggaacgataactagtagtctccagtgatgtttttgttccagatagtacaggatcaaagtgatattttggagacagatccttccattttcaaaagcatctgccttaaagacatttgtctagaaatatttatatgattgtatcacacttaatatgtgcttggcttagagcaggc

SEQ ID NO: 50332 - DNA, 175 bp, Homo sapiens
aggataaagggtgtagccatagatgggtggtggtgaagatctctgagatgaggagctcaaggaattgagaggccagggtgtggacatcaggtaatattataacaccattattagatggagagagctgctgagaactactgccagagtgagttgagtagagtgaactggaggggta

SEQ ID NO: 50333 - DNA, 421 bp, Homo sapiens
aaaaaaaaaaaaaaaaaaggcttaatcttatctgtgaggcttttgggcccacaatttaattacacattggatgcagaatatgctatccattcactggcactccaaatttcctggactcctatttccccaaatgtatattttattaagagagagataaaaagtatgaaacaattcaactgtcattgaaccacgtcatatttatttggtatccagactcttaaaacataacattctagccgggcgcagtggctcacgcctgtaatcccagcactttgggaggctgaggcgggcggatcacgaggtcaggagatcgagaccatcctggctaacacggtgaaactctgtctctaccaaaaatacaaaaaattagctgggcgtggtggcgggcgcctgtagtcccagctactcgggaggctgaggc

SEQ ID NO: 50334 - DNA, 702 bp, Homo sapiens
agaggatccttaatctgtgtcattgcgaaggcacctgccttttatagattgtgtagtagctctgacacattactttctgagggtgaagaaaatcaaaaaccaaagaaatcagacacaaaagttgattcatctcctagaagaaagcattcttcctcatcgaattctcaaggcagcatccacaagagtaaggaagatgtaacagttagcccatctcaagagataaatgctccaccagatgaaaataaaagaacaccttctccaggtccagttgaaagcaagttcttggaaagggcaggagatgcctctgccccaagatttaacactgaacagatccaataccgagattcaagggagattaatgcagttgttacccctgaaagaagacctacttcttctccaaggccaacgtccagtgagcttctacgatctcattcaactgatcggcgtgtttacagtcgttttgagccgttttgtaagattgagagctctattcagccaacaagcaacatgccaaataccagtataaatcgcccagaaataaaatctgcgactatgggcaacagttatggcaggtctagtccattgcttaattacaacactggtgtttatcgctcatatcaacccaatgagaacaagtttcgaggatttatgcaaaagtttggaaactttatacacaaaaataaatagctattaaaatgcaaa

SEQ ID NO: 50335 - DNA, 741 bp, Homo sapiens
gggtctcagaagttaaggtcattacttagccttaccccagataagaaagaaaatctatccaaaaataaagcacctgccttttatagattgtgtagtagctctgacacattactttctgagggtgaagaaaatcaaaaaccaaagaaatcagacacaaaagttgattcatctcctagaagaaagcattcttcctcatcgaattctcaaggcagcatccacaagagtaaggaagatgtaacagttagcccatctcaagagataaatgctccaccagatgaaaataaaagaacaccttctccaggtccagttgaaagcaagttcttggaaagggcaggagatgcctctgccccaagatttaacactgaacagatccaataccgagattcaagggagattaatgcagttgttacccctgaaagaagacctacttcttctccaaggccaacgtccagtgagcttctacgatctcattcaactgatcggcgtgtttacagtcgttttgagccgttttgtaagattgagagctctattcagccaacaagcaacatgccaaataccagtataaatcgcccagaaataaaatctgcgactatgggcaacagttatggcaggtctagtccattgcttaattacaacactggtgtttatcgctcatatcaacccaatgagaacaagtttcgaggatttatgcaaaagtttggaaactttatacacaaaaataaatagctattaaaatgcaaa

SEQ ID NO: 50336 - DNA, 1280 bp, Homo sapiens
ccctattggcaggattttggagaaaaaaaaataaaagcgaatagatacctgtgaaagaaaaaataaatacattttaaaataattggaggatagaaggattacttttaaaagttctgttagtttgccagtacagagcaaaacagaaaatggacacatttttttgatcagcattctctgttctaaaaacttatttcaataagggaaagaatatgcaaagacatatatatagatatagacatacacccactccaaaagaatagtgatatctttctggtaaataatatccaaagtttggaaagaaatcaaatatccattgaaaggaaactaattttagggggataggattcacatttggaatgatctcatagttagtttactggatttctgttctggtcaacctaataattgtcttgaaagtgagatggctactgacattctagggtatggttagggagaatattctttatttttaaaaccctacaagattttttcattttttaaaataaaatgtcttatttgttaaatatgatggttatgtaggtttactcaaaagtgattttttccattgctctttattattttctgcatctctgtgttacagctgaaataatttttagtattttctttagtgcaggtctgctgaagataaattctctcagttcttgtttgtctaaaatatctttgggccaggcacgtttgttacgcctgtaatcccagcacttgggaggccgaggcaggaagatcacttggcccaagagtttgaggccagtctgggtaacatagggagacaacatctctacaaaaagaaagaaataaaataaaaaaaaattagctgtgcatgttagtacatgcctgtagtcccagctactcaggaggtggaggtgggggaatcacttgagcctgggaggtcaaggctgcagtgggccatgattgtgccaccacactctagcctgggcaacagagtgaggcatggtttcaaagacaaaaagaaagtctttgtttcatcttcattttgtgaagggtgttttttctagatttagaattctagattgtcggttattttatttatcataactgtcattgtctcttggctttcattgtttctgttgggcagttggctgtaagtttgattattcctccttcgaatgtaatctgttttttcctttggctgcttttaagatttatttcactttggttttagcagttttattataaggtgtgattttctttttaatttattctccttagagcttatgagacttctttttatttggttggtg

SEQ ID NO: 50337 - DNA, 3088 bp, Homo sapiens
ggcacgagcggagagccgcgcagggcgcgggccgcgcggggtggggcagccggagcgcaggcccccgatccccggcgggcgcccccgggcccccgcgcgcgccccggcctccgggagactggcgcatgccacggagcgcccctcgggccgccgccgctcctgcccgggcccctgctgctgctgctgtcgcctgcgcctgctgccccaactcggcgcccgacttcttcatggtgtgcggaggtcatgttcgctccttagcaggcaaacgacttttctcctcgcctcctcgccccgcatgttcaggaccaaacgatctgcgctcgtccggcgtctctggaggagccgtgcgcccggcggcgaggacgaggaggagggcgcagggggaggtggaggaggaggcgagctgcggggagaaggggcgacggacagccgagcgcatggggccggtggcggcggcccgggcagggctggatgctgcctgggcaaggcggtgcgaggtgccaaaggtcaccaccatccccacccgccagccgcgggcgccggcgcggccgggggcgccgaggcggatctgaaggcgctcacgcactcggtgctcaagaaactgaaggagcggcagctggagctgctgctccaggccgtggagtcccgcggcgggacgcgcaccgcgtgcctcctgctgcccggccgcctggactgcaggctgggcccgggggcgcccgccggcgcgcagcctgcgcagccgccctcgtcctactcgctccccctcctgctgtgcaaagtgttcaggtggccggatctcaggcattcctcggaagtcaagaggctgtgttgctgtgaatcttacgggaagatcaaccccgagctggtgtgctgcaacccccatcaccttagccgactctgcgaactagagtctcccccccctccttactccagatacccgatggattttctcaaaccaactgcagactgtccagatgctgtgccttcctccgctgaaacagggggaacgaattatctggcccctggggggctttcagattcccaacttcttctggagcctggggatcggtcacactggtgcgtggtggcatactgggaggagaagacgagagtggggaggctctactgtgtccaggagccctctctggatatcttctatgatctacctcaggggaatggcttttgcctcggacagctcaattcggacaacaagagtcagctggtgcagaaggtgcggagcaaaatcggctgcggcatccagctgacgcgggaggtggatggtgtgtgggtgtacaaccgcagcagttaccccatcttcatcaagtccgccacactggacaacccggactccaggacgctgttggtacacaaggtgttccccggtttctccatcaaggctttcgactacgagaaggcgtacagcctgcagcggcccaatgaccacgagtttatgcagcagccgtggacgggctttaccgtgcagatcagctttgtgaagggctggggccagtgctacacccgccagttcatcagcagctgcccgtgctggctagaggtcatcttcaacagccggtagccgcgtgcggaggggacagagcgtgagctgagcaggccacacttcaaactactttgctgctaatattttcctcctgagtgcttgcttttcatgcaaactctttggtcgttttttttttgtttgttggttggttttcttcttctcgtcctcgtttgtgttctgttttgtttcgctctttgagaaatagcttatgaaaagaattgttgggggtttttttggaagaaggggcaggtatgatcggcaggacaccctgataggaagaggggaagcagaaatccaagcaccaccaaacacagtgtatgaaggggggcggtcatcatttcacttgtcaggagtgtgtgtgagtgtgagtgtgcggctgtgtgtgcacgcgtgtgcaggagcggcagatggggagacaacgtgctctttgttttgtgtctcttatggatgtccccagcagagaggtttgcagtcccaagcggtgtctctcctgccccttggacacgctcagtggggcagaggcagtacctgggcaagctggcggctggggtcccagcagctgccaggagcacggctctgtccccagcctgggaaagcccctgcccctcctctccctcatcaaggacacgggcctgtccacaggcttctgagcagcgagcctgctagtggccgaaccagaaccaattattttcatccttgtcttattcccttcctgccagcccctgccattgtagcgtctttcttttttggccatctgctcctggatctccctgagatgggcttcccaagggctgccggggcagccccctcacagtattgctcacccagtgccctctcccctcagcctctcccctgcctgccctggtgacatcaggtttttcccggacttagaaaaccagctcagcactgcctgctcccatcctgtgtgttaagctctgctattaggccagcaagcggggatgtccctgggagggacatgcttagcagtccccttccctccaagaaggatttggtccgtcataacccaaggtaccatcctaggctgacacctaactcttctttcatttcttctacaactcatacactcgtatgatacttcgacactgttcttagctcaatgagcatgtttagactttaacataagctatttttctaactacaaaggtttaaatgaacaagagaagcattctcattggaaatttagcattgtagtgctttgagagagaaaggactcctgaaaaaaaacctgagatttattaaagaaaaaaatgtattttatgttatatataaatatattattacttgtaaatataaagacgttttataagcatcattatttatgtattgtgcaatgtgtataaacaagaaaaataaagaaaagatgcactttgctttaatataaatgcaaataacaaatgccaaattaaaaaagataaacacaagattggtgtttttttctatgggtgttatcacctagctgaatgtttttctaaaggagtttatgttccattaaacgatttttaaaatgta

SEQ ID NO: 50338 - DNA, 3132 bp, Homo sapiens
ggcacgagcggagagccgcgcagggcgcgggccgcgcggggtggggcagccggagcgcaggcccccgatccccggcgggcgcccccgggcccccgcgcgcgccccggcctccgggagactggcgcatgccacggagcgcccctcgggccgccgccgctcctgcccgggcccctgctgctgctgctgtcgcctgcgcctgctgccccaactcggcgcccgacttcttcatggtgtgcggaggtcatgttcgctccttagcaggcaaacgacttttctcctcgcctcctcgccccgcatgttcaggaccaaacgatctgcgctcgtccggcgtctctggaggagccgtgcgcccggcggcgaggacgaggaggagggcgcagggggaggtggaggaggaggcgagctgcggggagaaggggcgacggacagccgagcgcatggggccggtggcggcggcccgggcagggctggatgctgcctgggcaaggcggtgcgaggtgccaaaggtcaccaccatccccacccgccagccgcgggcgccggcgcggccgggggcgccgaggcggatctgaaggcgctcacgcactcggtgctcaagaaactgaaggagcggcagctggagctgctgctccaggccgtggagtcccgcggcgggacgcgcaccgcgtgcctcctgctgcccggccgcctggactgcaggctgggcccgggggcgcccgccggcgcgcagcctgcgcagccgccctcgtcctactcgctccccctcctgctgtgcaaagtgttcaggtggccggatctcaggcattcctcggaagtcaagaggctgtgttgctgtgaatcttacgggaagatcaaccccgagctggtgtgctgcaacccccatcaccttagccgactctgcgaactagagtctcccccccctccttactccagatacccgatggattttctcaaaccaactgcagactgtccagatgctgtgccttcctccgctgaaacagggggaacgaattatctggcccctggggggctttcagattcccaacttcttctggagcctggggatcggtcacactggtgcgtggtggcatactgggaggagaagacgagagtggggaggctctactgtgtccaggagccctctctggatatcttctatgatctacctcaggggaatggcttttgcctcggacagctcaattcggacaacaagagtcagctggtgcagaaggtgcggagcaaaatcggctgcggcatccagctgacgcgggaggtggatggtgtgtgggtgtacaaccgcagcagttaccccatcttcatcaagtccgccacactggacaacccggactccaggacgctgttggtacacaaggtgttccccggtttctccatcaaggctttcgactacgagaaggcgtacagcctgcagcggcccaatgaccacgagtttatgcagcagccgtggacgggctttaccgtgcagatcagctttgtgaagggctggggccagtgctacacccgccagttcatcagcagctgcccgtgctggctagaggtcatcttcaacagccggtagccgcgtgcggaggggacagagcgtgagctgagcaggccacacttcaaactactttgctgctaatattttcctcctgagtgcttgcttttcatgcaaactctttggtcgttttttttttgtttgttggttggttttcttcttctcgtcctcgtttgtgttctgttttgtttcgctctttgagaaatagcttatgaaaagaattgttgggggtttttttggaagaaggggcaggtatgatcggcaggacaccctgataggaagaggggaagcagaaatccaagcaccaccaaacacagtgtatgaaggggggcggtcatcatttcacttgtcaggagtgtgtgtgagtgtgagtgtgcggctgtgtgtgcacgcgtgtgcaggagcggcagatggggagacaacgtgctctttgttttgtgtctcttatggatgtccccagcagagaggtttgcagtcccaagcggtgtctctcctgccccttggacacgctcagtggggcagaggcagtacctgggcaagctggcggctggggtcccagcagctgccaggagcacggctctgtccccagcctgggaaagcccctgcccctcctctccctcatcaaggacacgggcctgtccacaggcttctgagcagcgagcctgctagtggccgaaccagaaccaattattttcatccttgtcttattcccttcctgccagcccctgccattgtagcgtctttcttttttggccatctgctcctggatctccctgagatgggcttcccaagggctgccggggcagccccctcacagtattgctcacccagtgccctctcccctcagcctctcccctgcctgccctggtgacatcaggtttttcccggacttagaaaaccagctcagcactgcctgctcccatcctgtgtgttaagctctgctattaggccagcaagcggggatgtccctgggagggacatgcttagcagtccccttccctccaagaaggatttggtccgtcataacccaaggtaccatcctaggctgacacctaactcttctttcatttcttctacaactcatacactcgtatgatacttcgacactgttcttagctcaatgagcatgtttagactttaacataagctatttttctaactacaaaggtttaaatgaacaagagaagcattctcattggaaatttagcattgtagtgctttgagagagaaaggactcctgaaaaaaaacctgagatttattaaagaaaaaaatgtattttatgttatatataaatatattattacttgtaaatataaagacgttttataagcatcattatttatgtattgtgcaatgtgtataaacaagaaaaataaagaaaagatgcactttgctttaatataaatgcaaataacaaatgccaaattaaaaaagataaacacaagattggtgtttttttctatgggtgttatcacctagctgaatgtttttctaaaggagtttatgttccattaaacgatttttaaaatgtaaaaaaaaacaaaaaacacaacacacacaaaaaacacaaaacaac

SEQ ID NO: 50339 - DNA, 1972 bp, Homo sapiens
tttatctgacagctaaatatcaaggcaatcaccgcctcgcggccctgcctccaacccccacagctaagacaaacagttgggctaaaagaatgcctctgttatcataagtttctatctctcttctcatggctgggcctttattttctcttgcttttttaatttcagagtctcccccccctccttactccagatacccatcttcatcaagtccgccacactggacaacccggactccaggacgctgttggtacacaaggtgttccccggtttctccatcaaggctttcgactacgagaaggcgtacagcctgcagcggcccaatgaccacgagtttatgcagcagccgtggacgggctttaccgtgcagatcagctttgtgaagggctggggccagtgctacacccgccagttcatcagcagctgcccgtgctggctagaggtcatcttcaacagccggtagccgcgtgcggaggggacagagcgtgagctgagcaggccacacttcaaactactttgctgctaatattttcctcctgagtgcttgcttttcatgcaaactctttggtcgttttttttttgtttgttggttggttttcttcttctcgtcctcgtttgtgttctgttttgtttcgctctttgagaaatagcttatgaaaagaattgttgggggtttttttggaagaaggggcaggtatgatcggcaggacaccctgataggaagaggggaagcagaaatccaagcaccaccaaacacagtgtatgaaggggggcggtcatcatttcacttgtcaggagtgtgtgtgagtgtgagtgtgcggctgtgtgtgcacgcgtgtgcaggagcggcagatggggagacaacgtgctctttgttttgtgtctcttatggatgtccccagcagagaggtttgcagtcccaagcggtgtctctcctgccccttggacacgctcagtggggcagaggcagtacctgggcaagctggcggctggggtcccagcagctgccaggagcacggctctgtccccagcctgggaaagcccctgcccctcctctccctcatcaaggacacgggcctgtccacaggcttctgagcagcgagcctgctagtggccgaaccagaaccaattattttcatccttgtcttattcccttcctgccagcccctgccattgtagcgtctttcttttttggccatctgctcctggatctccctgagatgggcttcccaagggctgccggggcagccccctcacagtattgctcacccagtgccctctcccctcagcctctcccctgcctgccctggtgacatcaggtttttcccggacttagaaaaccagctcagcactgcctgctcccatcctgtgtgttaagctctgctattaggccagcaagcggggatgtccctgggagggacatgcttagcagtccccttccctccaagaaggatttggtccgtcataacccaaggtaccatcctaggctgacacctaactcttctttcatttcttctacaactcatacactcgtatgatacttcgacactgttcttagctcaatgagcatgtttagactttaacataagctatttttctaactacaaaggtttaaatgaacaagagaagcattctcattggaaatttagcattgtagtgctttgagagagaaaggactcctgaaaaaaaacctgagatttattaaagaaaaaaatgtattttatgttatatataaatatattattacttgtaaatataaagacgttttataagcatcattatttatgtattgtgcaatgtgtataaacaagaaaaataaagaaaagatgcactttgctttaatataaatgcaaataacaaatgccaaattaaaaaagataaacacaagattggtgtttttttctatgggtgttatcacctagctgaatgtttttctaaaggagtttatgttccattaaacgatttttaaaatgta

SEQ ID NO: 50340 - DNA, 474 bp, Homo sapiens
tttatctgacagctaaatatcaaggcaatcaccgcctcgcggccctgcctccaacccccacagctaagacaaacagttgggctaaaagaatgcctctgttatcataagtttctatctctcttctcatggctgggcctttattttctcttgcttttttaatttcagagtctcccccccctccttactccagatacccgatggattttctcaaaccaactggtgagtaaatgatttttaaaatatcctgcttatcttaagttagaaatagagcctctagaacgtggctttttgtgtgtaggcaaaggcttggggaggtgctgggcttcacgttggttctaggtttcctctgttggaagtttggtgaatttttctgttgtggctgggttttttgctgtttttgcaaagacgttcccttgatatgctttacattttgttcctttttcatgtatttgtgctgtgtagccggtgggctca

SEQ ID NO: 50341 - DNA, 802 bp, Homo sapiens
tttatctgacagctaaatatcaaggcaatcaccgcctcgcggccctgcctccaacccccacagctaagacaaacagttgggctaaaagaatgcctctgttatcataagtttctatctctcttctcatggctgggcctttattttctcttgcttttttaatttcagagtctcccccccctccttactccagatacccatcttcatcaagtccgccacactggacaacccggactccaggacgctgttggtacacaaggtgttccccggtttctccatcaaggctttcgactacgagaaggcgtacagcctgcagcggcccaatgaccacgagtttatgcagcagccgtggacgggctttaccgtgcagatcagctttgtgaagggctggggccagtgctacacccgccagttcatcagcagctgcccgtgctggctagaggtcatcttcaacagccggtagccgcgtgcggaggggacagagcgtgagctgagcaggccacacttcaaactactttgctgctaatattttcctcctgagtgcttgcttttcatgcaaactctttggtcgttttttttttgtttgttggttggttttcttcttctcgtcctcgtttgtgttctgttttgtttcgctctttgagaaatagcttatgaaaagaattgttgggggtgtacaaccgcagcagttaccccatcttcatcaagtccggcacactgggggggctttcagattcccaactttttttggagcctgggggatcggtcacactggtgcgtggtggcatactgggaggagaaaaac

SEQ ID NO: 50342 - DNA, 2286 bp, Homo sapiens
tagtaaatacggagaatcacgtcgaacaccagtggcccagatactgtcgtggccgcgcacctttggagttttggggcaaagagagttggatggaaggccgaactggagtctcccccccctccttactccagatacccgatggattttctcaaaccaactgcagactgtccagatgctgtgccttcctccgctgaaacagggggaacgaattatctggcccctggggggctttcagattcccaacttcttctggagcctggggatcggtcacactggtgcgtggtggcatactgggaggagaagacgagagtggggaggctctactgtgtccaggagccctctctggatatcttctatgatctacctcaggggaatggcttttgcctcggacagctcaattcggacaacaagagtcagctggtgcagaaggtgcggagcaaaatcggctgcggcatccagctgacgcgggaggtggatggtgtgtgggtgtacaaccgcagcagttaccccatcttcatcaagtccgccacactggacaacccggactccaggacgctgttggtacacaaggtgttccccggtttctccatcaaggctttcgactacgagaaggcgtacagcctgcagcggcccaatgaccacgagtttatgcagcagccgtggacgggctttaccgtgcagatcagctttgtgaagggctggggccagtgctacacccgccagttcatcagcagctgcccgtgctggctagaggtcatcttcaacagccggtagccgcgtgcggaggggacagagcgtgagctgagcaggccacacttcaaactactttgctgctaatattttcctcctgagtgcttgcttttcatgcaaactctttggtcgttttttttttgtttgttggttggttttcttcttctcgtcctcgtttgtgttctgttttgtttcgctctttgagaaatagcttatgaaaagaattgttgggggtttttttggaagaaggggcaggtatgatcggcaggacaccctgataggaagaggggaagcagaaatccaagcaccaccaaacacagtgtatgaaggggggcggtcatcatttcacttgtcaggagtgtgtgtgagtgtgagtgtgcggctgtgtgtgcacgcgtgtgcaggagcggcagatggggagacaacgtgctctttgttttgtgtctcttatggatgtccccagcagagaggtttgcagtcccaagcggtgtctctcctgccccttggacacgctcagtggggcagaggcagtacctgggcaagctggcggctggggtcccagcagctgccaggagcacggctctgtccccagcctgggaaagcccctgcccctcctctccctcatcaaggacacgggcctgtccacaggcttctgagcagcgagcctgctagtggccgaaccagaaccaattattttcatccttgtcttattcccttcctgccagcccctgccattgtagcgtctttcttttttggccatctgctcctggatctccctgagatgggcttcccaagggctgccggggcagccccctcacagtattgctcacccagtgccctctcccctcagcctctcccctgcctgccctggtgacatcaggtttttcccggacttagaaaaccagctcagcactgcctgctcccatcctgtgtgttaagctctgctattaggccagcaagcggggatgtccctgggagggacatgcttagcagtccccttccctccaagaaggatttggtccgtcataacccaaggtaccatcctaggctgacacctaactcttctttcatttcttctacaactcatacactcgtatgatacttcgacactgttcttagctcaatgagcatgtttagactttaacataagctatttttctaactacaaaggtttaaatgaacaagagaagcattctcattggaaatttagcattgtagtgctttgagagagaaaggactcctgaaaaaaaacctgagatttattaaagaaaaaaatgtattttatgttatatataaatatattattacttgtaaatataaagacgttttataagcatcattatttatgtattgtgcaatgtgtataaacaagaaaaataaagaaaagatgcactttgctttaatataaatgcaaataacaaatgccaaattaaaaaagataaacacaagattggtgtttttttctatgggtgttatcacctagctgaatgtttttctaaaggagtttatgttccattaaacgatttttaaaatgta

SEQ ID NO: 50343 - DNA, 423 bp, Homo sapiens
gtgcaaagacttaggatacccagaatttgttttgaaaatgaagaataaggttggaacttttacactctctaatttcaagatttattataaaatcttcaagaatgaaagtattgtggtcttaccataataataaacatatagatcaatggagcagaatatagccctcaaatagacccacgttatacggtcaattgttttttagtcaacaaatgatgttaaaacaactggatattggtatgggaaaaaatgaaccttgtctacttgacctttccctcataaaatacataaaaactaatttgaagtggctcataggcctaaatagaaaagctaaaactatgaaagttttaaaagtaaacttagcacaagataatatcaactttggttaggcaaggatttcttagaacacaaaaaagtactaagtgt

SEQ ID NO: 50344 - DNA, 904 bp, Homo sapiens
tttcaacaaccctaatactttactagagaaggaaattaaggcttaaaaagcttaactttcacaatgtcatccagtgatgaggtgatgaagatgtgagacctaagtccaggttctgttcactgcacaacgctccatttacctgtataatgctgagcaccaaagaaagcaatccacaagggaatcattttgcatttaagccctccctgcaagttaggatcagagggaaggaaaaagctgactgtcattttgtttccctcacaaaggtacagactagcctagaaacggcactctttatcacttaataatcctgaaaaaatgttcccagatttcaaggctggatacatatctgcttactactagaggtcatgttccaattagaacaaaagccttgtgatgtgtaacatttttggggaaaagccttgttctgctatcattcaatagctacttgatcaaaaatataaatgtcagattgctcccagagattctgccaatagctcttccttctaatattcatcactgccaaatagctggcttataatgcaatactaatatgtaactggatatatatggagggaagagttactcattagtacagcaggaagtaaggcatgcggggagtttgtcccacactatgggaagagcaggattgatgagagccaagttgagatggtggctgacttcactgtctctcatctagacttctgctaatgtcaatgcctaatatgtaccaaccaggcaacagataccttgttatcccccacaggcatcaaggcaggcatcaatctctcactttatagctaagaaggatgaggggacaaaaattaaaaagtcatgttctattcactgctatgtaaatcttgccttaagatcccacagcctggaaataaaagaactctaattcaaa

SEQ ID NO: 50345 - DNA, 389 bp, Homo sapiens
attctcctgcctaaacctcccaagtagctgggattacaagcatgtctgaccacgcccagctaattttgtatttttagtagagacggggtttctccgtgttgggcaggctggtctcgaattccagacctcaggtgatccgcccgcctcagcctcccaaagtgctgggattacaggtgtgagacaccccgtctggccaaagtatgttttgttttgtttttttaattttctttcaaagttgtgcaaactattgaacggttggcataattctaagatttgccattgctacaaaaacactaaaaatagtaaaagcataaaaattccaattaaaaataaaaaacataaacaacaattttgcttagcataatgtaaagaacattttccattttcct

SEQ ID NO: 50346 - DNA, 480 bp, Homo sapiens
  misc_feature (420)..(420): n is a, c, g, or t
  misc_feature (438)..(438): n is a, c, g, or t
  misc_feature (462)..(462): n is a, c, g, or t
  misc_feature (468)..(468): n is a, c, g, or t
  misc_feature (480)..(480): n is a, c, g, or t
cgcacagatgggacgcggcttaggaggaatcctgggctgcaggcattccttggcctggtagtcagatttctggcacttgtagcaagctcctgggggagaaggttctggagtaacgcctggccgctgcggttcaggcatttggaagttcttgtgtgctggagatgtggctggggtttgtctcacagtggaggttacctaaccaaactcctgtaaaaccacaccacctatgcctgtgatggggactatctgaatctacagtgccctcggcatttctacaataagtgtccaatcggcattttatgggacaagattacccaatgtgtagttcccagaagcctgcctgccagaggggaagacagcttaacttgtgtgggcacccaccacctttccagatggatttaaaaaacaaaacctgttttnaagacaaggggttgaaantgcattgccttgattccaatttcntcaacntttattttgttn

SEQ ID NO: 50347 - DNA, 561 bp, Homo sapiens
ggaccaaagcgtagtacccaaaggaaactgcagtgagagcacaaagattctaggatactgtgagcaaatggggcagaggggtgctctcctgagctacagaaggagcggtctgatggttcagataaaacacaagttgctgggtgtggtggctcactgccgtaatcccagcactttgggaggttgaggcaggtggatcatgaggtcaggagatcaggaccatcctggctaacacggtgaaatcctgtctctactaaaaatacaaacaaaattagctgggcgtggtggggggcgcctgtagtctcagctacttgggaggctgaggcaggagaatggcatgaacccgggaggcagagcttgcagtgagctgagattgctccactgcgctccagcgtgggtgacagagtgagactccttctcaaaaaaaaaaaaaaaagataaaacataagtcaaactttattcaagttgtccacagttagcaatagtgatcttcttgctggtcttgccattcctggacccaaagtgctccatggcctccacagtcttcacgtcttctttcacctt

SEQ ID NO: 50348 - DNA, 718 bp, Homo sapiens
gcttaaggacaaacaaataccactatgcagaacctattttattacctgcagggttgacttatagacatttcttttgtaactccacagcatttactctgcccactgttccctcagatgcttcttcttgtactttctgtggctgaaggcatgatctgtaatccttctgttggcttggagtgtatattaatttctataaagtctgtttcatattgtttccccttgagtcatttttttccttcaggagaatatatttgagaatattcatgagacttggcaacagctcttgcacttcatgaatatgttttccggttgatagaggcaggaggcatggaaattcttggcagacaggggagggtccccagtgaaacccccacctttgagctgaaaagcctgaaacctgctgcccaaagttagaacttctatccctgttttcccactctctcctgattgcttctttctgaataatgtacttttaccaatagaatattgccttttccaaaactacctatggctcaccctgccccacatcctgtgcctataaagaccccagactcagtcagtagaagagagaaaagtggcttgactgtagagaggcaacttgactttagagggatggctggattttggaagagagacagcttgacttcagggaaagattacctgctcatcccatcccctgtccagctcccatctctgctgagagacatttccattgcta

SEQ ID NO: 50349 - DNA, 400 bp, Homo sapiens
accgaggttctccccagccaaggcgaggcggccgcagtgcgagatccacaccacagcctcggaagacaagcgagcagaaatcccatgaggggcagttgaggtttgaggaaggcgaggtgaggcacctgtggcagaaaaaaaaaaaaccgcaccacggagaagcagagcctgggtccccaacggacaaaagtgtcttcccattagcccttgcgctgggcccaggtgaccctggcattcctggttcgagaccagggtgcgcttcaggccgctaggggtacccaaaagcgggcagaaggcccatgaggtgaaggtgatgcacctggggcagagaaaaaaaaaaaacaaccgcgccgcgtataagcggggcctggctcccccacagaagaaactgtcctcacat

SEQ ID NO: 50350 - DNA, 545 bp, Homo sapiens
attaacatacacatgtgataacagtgcttcagtggctcattttagacttaaaatctaaactcctgggtggtatttttcaccaattccccaggaagtttttcatcaatggctgaatacttatggtggtttggctgtgccatgctctcctgaacctctgtatcttctcacttcttctgcccatctacctgattaacttttatttatcttttaaatctcacctgtttcctaggggaagccccctggtcttcagctacttaaacttaagttctgttgtgcccttggtcctatggccctgtgctcacgattattgaaagtctgtctccacactgtcctggaagctgctgcaaagcagggtcctgtcatttttgtgttcccaatgcctaacagtgcctggagtgctgcaggtgactggagaggtttgctgagaatggaacaagatcccaaaagggatcagattcataggtagaggaattagccttagttaagaatctccttatcttgagctaacaagctatgaaaatatgtttgacattaagaaatttcag

SEQ ID NO: 50351 - DNA, 335 bp, Homo sapiens
agtcaagtgagacgagatctggtacctcacgcactagatccctcctctccggcctggtgagaagtcagagacaattttgacagttcatagtcctgccttggctctcacgcttgcggtccatgggcgggttttaccttctctctcttcctctgcttctggcctgcttacaggccaacagcaaatgcagccattgcccgagaccactcagaactctccctgtgccatcctcttggggaacaggaggatatgtccgtagaagacttcgtggactggggaaagccacgccgggatcgggacgccggagagggtcgcccctccctaggctttttcccgtc

SEQ ID NO: 50352 - DNA, 174 bp, Homo sapiens
ctggggacctagctccctgtggggtcacctcccacccatgctgcttcctttctctttgggatgctaaggagtgagggccctgagttcctgggcactctttcctgagcttgcttggggctgatttgaattcagctacttcagagagttgaaaatccagctggaaaagctgcatgg

SEQ ID NO: 50353 - DNA, 2096 bp, Homo sapiens
gagagcgacagagcccgggccacaggcagctccttgccagctctcctcctcgcacagccgctcgaaccgcctgctgagccccatggcccgcgccacgctctccgccgcccccagcaatccccggctcctgcgggtggcgctgctgctcctgctcctggtggccgccagccggcgcgcagcaggagcgcccctggccactgaactgcgctgccagtgcttgcagaccctgcagggaattcacctcaagaacatccaaagtgtgaaggtgaagtcccccggaccccactgcgcccaaaccgaagtcatagccacactcaagaatgggcagaaagcttgtctcaaccccgcatcgcccatggttaagaaaatcatcgaaaagatgctgaaaaatggcaaatccaactgaccagaaggaaggaggaagcttattggtggctgttcctgaaggaggccctgcccttacaggaacagaagaggaaagagagacacagctgcagaggccacctggattgcgcctaatgtgtttgagcatcacttaggagaagtcttctatttatttatttatttatttatttgtttgttttagaagattctatgttaatattttatgtgtaaaataaggttatgattgaatctacttgcacactctcccattatatttattgtttattttaggtcaaacccaagttagttcaatcctgattcatatttaatttgaagatagaaggtttgcagatattctctagtcatttgttaatatttcttcgtgatgacatatcacatgtcagccactgtgatagaggctgaggaatccaagaaaatggccagtaagatcaatgtgacggcagggaaatgtatgtgtgtctattttgtaactgtaaagatgaatgtcagttgttatttattgaaatgatttcacagtgtgtggtcaacatttctcatgttgaagctttaagaactaaaatgttctaaatatcccttggacattttatgtctttcttgtaaggcatactgccttgtttaatgttaattatgcagtgtttccctctgtgttagagcagagaggtttcgatatttattgatgttttcacaaagaacaggaaaataaaatatttaaaaataaaaaaaaaaaaaaaaaaaaaaaaaaaaaaaaaaaaaaaaaaaaaaaaaaaaaaaaacacaaaaaacaagaaacaaaacaaaaaaaaaacagaaaaaaaaaaacaaaaaaaagaaacaaaaaaacaaagcgtggggcggagcggccgcggagcgacccacaaagaagaacatacaacacacacgtgggggtgggaggaggggcggacacactgagatgagagacgagaggaaaacacatatgagagagcagagcgaaaaaaaaccggacggtaaaaaaacagagaggggcagggaagaggaacaccacacaaaaacaagagaaacccgcgcggcgggcagcagaagagactcggacgtcgacagaaccaaaccaccgaggagggaggaagatacgggaaggacgacagccatgaggaggagactaaacaacaacggaggaagaacagaggaagagcggggaggcgacatagataaaaaataagcccgcgcgagcgaggggaagaggaggaataagagaacaagagagaggagatgagaagaaggacggagaaaagaagaaaagcaaacgagaagagagagaaagagaagaaagtaggacaagagaagcaaggaggaagagggaagagaaagaaaagaggaggaggagacgagaagagagagagagaagaaggcgaacagtggagagagggacggtgagagagatcagcggagggaggataagaaagagtgaagaggacgatgaggcagggggagagatagagtagtgagagctgatggagagacaggaagggggacagaagagacggtgagatgagacagtaaagatggctgtagaagatcaaatacagatggatagggagcgagggagaaagtcgaaacaaggagaaatgagaggtgaggaggaagggagagaggaggggcaggcgtaggagtggggcggtgggggagagagggatgaagggagaagacaacca

SEQ ID NO: 50354 - DNA, 3059 bp, Homo sapiens
gagagcgacagagcccgggccacaggcagctccttgccagctctcctcctcgcacagccgctcgaaccgcctgctgagccccatggcccgcgccacgctctccgccgcccccagcaatccccggctcctgcgggtggcgctgctgctcctgctcctggtggccgccagccggcgcgcagcagcgagtctcttcttccctaggagcgcccctggccactgaactgcgctgccagtgcttgcagaccctgcagggaattcacctcaagaacatccaaagtgtgaaggtgaagtcccccggaccccactgcgcccaaaccgaagtcatgtaagtctcgcccatcgctgccgctgccactgctggggtccccgactctcccgctgccccaaaccctgtcctcagcccgacctcctgtctcacgagattcccttctctctgcagagccacactcaagaatgggcagaaagcttgtctcaaccccgcatcgcccatggttaagaaaatcatcgaaaagatgctgaaaaaagtaagttataatttccatgtacacaggcgactggagctgttggtcagaaatactggcgtctgccccctaaaaagtaaatcaggaaaacccagggttagctgcaggactgaaaaaattattattttcacaaagttgccattaaggttattaatctgttctggtgccagaggatattcccagtgcccagggtcaccacccaggttcttccctcctgccagtgaatgtaggtaaaactgctttcatgtaaggtctcattggagtttgccagttgtgctgaagtgttttccacctgttaaaaaacacaagcttcatttcccctagttcctactgactttcagacctgaaaagcagaccccctggttttttgtaaaagtttagggttgaagtgcagagatttcacaataatattgcactgggtatataactggttgccaccacctattagccatgtcactcagagacaatattatttagtttatctgagactcagcaaaacagggaaaataatggtagctacatcatgaggttgctttgaggctcaagtgaggcccagtatgacaaagagcaataggctctggctgttttagccagtaaaacagtgtagactgccactcctccaccccacgtcacccccattcctaaaagagcatcccaagcctagaggtccttgccacacagcacagctgtcacaggcagtacccacttgggtgccaggctggggaaactgcattcagaaaactctagagcctggggaaacaggacaggagaagactgttgtgcagtcagctttcctgagcacctactcagggcacccattttctcattacagtggcaaatccaactgaccagaaggaaggaggaagcttattggtggctgttcctgaaggaggccctgcccttacaggaacagaagaggaaagagagacacagctgcagaggccacctggattgcgcctaatgtgtttgagcatcacttaggagaagtcttctatttatttatttatttatttatttgtttgttttagaagattctatgttaatattttatgtgtaaaataaggttatgattgaatctacttgcacactctcccattatatttattgtttattttaggtcaaacccaagttagttcaatcctgattcatatttaatttgaagatagaaggtttgcagatattctctagtcatttgttaatatttcttcgtgatgacatatcacatgtcagccactgtgatagaggctgaggaatccaagaaaatggccagtaagatcaatgtgacggcagggaaatgtatgtgtgtctattttgtaactgtaaagatgaatgtcagttgttatttattgaaatgatttcacagtgtgtggtcaacatttctcatgttgaagctttaagaactaaaatgttctaaatatcccttggacattttatgtctttcttgtaaggcatactgccttgtttaatgttaattatgcagtgtttccctctgtgttagagcagagaggtttcgatatttattgatgttttcacaaagaacaggaaaataaaatatttaaaaataaaaaaaaaaaaaaaaaaaaaaaaaaaaaaaaaaaaaaaaaaaaaaaaaaaaaaaaacacaaaaaacaagaaacaaaacaaaaaaaaaacagaaaaaaaaaaacaaaaaaaagaaacaaaaaaacaaagcgtggggcggagcggccgcggagcgacccacaaagaagaacatacaacacacacgtgggggtgggaggaggggcggacacactgagatgagagacgagaggaaaacacatatgagagagcagagcgaaaaaaaaccggacggtaaaaaaacagagaggggcagggaagaggaacaccacacaaaaacaagagaaacccgcgcggcgggcagcagaagagactcggacgtcgacagaaccaaaccaccgaggagggaggaagatacgggaaggacgacagccatgaggaggagactaaacaacaacggaggaagaacagaggaagagcggggaggcgacatagataaaaaataagcccgcgcgagcgaggggaagaggaggaataagagaacaagagagaggagatgagaagaaggacggagaaaagaagaaaagcaaacgagaagagagagaaagagaagaaagtaggacaagagaagcaaggaggaagagggaagagaaagaaaagaggaggaggagacgagaagagagagagagaagaaggcgaacagtggagagagggacggtgagagagatcagcggagggaggataagaaagagtgaagaggacgatgaggcagggggagagatagagtagtgagagctgatggagagacaggaagggggacagaagagacggtgagatgagacagtaaagatggctgtagaagatcaaatacagatggatagggagcgagggagaaagtcgaaacaaggagaaatgagaggtgaggaggaagggagagaggaggggcaggcgtaggagtggggcggtgggggagagagggatgaagggagaagacaacca

SEQ ID NO: 50355 - DNA, 2194 bp, Homo sapiens
gagagcgacagagcccgggccacaggcagctccttgccagctctcctcctcgcacagccgctcgaaccgcctgctgagccccatggcccgcgccacgctctccgccgcccccagcaatccccggctcctgcgggtggcgctgctgctcctgctcctggtggccgccagccggcgcgcagcaggtgggtcccggcgccctggggtccccgggccggacgcggctggggtgggcgccccgcgccgacagccccgctcaatcagcgagtctcttcttccctaggagcgcccctggccactgaactgcgctgccagtgcttgcagaccctgcagggaattcacctcaagaacatccaaagtgtgaaggtgaagtcccccggaccccactgcgcccaaaccgaagtcatagccacactcaagaatgggcagaaagcttgtctcaaccccgcatcgcccatggttaagaaaatcatcgaaaagatgctgaaaaatggcaaatccaactgaccagaaggaaggaggaagcttattggtggctgttcctgaaggaggccctgcccttacaggaacagaagaggaaagagagacacagctgcagaggccacctggattgcgcctaatgtgtttgagcatcacttaggagaagtcttctatttatttatttatttatttatttgtttgttttagaagattctatgttaatattttatgtgtaaaataaggttatgattgaatctacttgcacactctcccattatatttattgtttattttaggtcaaacccaagttagttcaatcctgattcatatttaatttgaagatagaaggtttgcagatattctctagtcatttgttaatatttcttcgtgatgacatatcacatgtcagccactgtgatagaggctgaggaatccaagaaaatggccagtaagatcaatgtgacggcagggaaatgtatgtgtgtctattttgtaactgtaaagatgaatgtcagttgttatttattgaaatgatttcacagtgtgtggtcaacatttctcatgttgaagctttaagaactaaaatgttctaaatatcccttggacattttatgtctttcttgtaaggcatactgccttgtttaatgttaattatgcagtgtttccctctgtgttagagcagagaggtttcgatatttattgatgttttcacaaagaacaggaaaataaaatatttaaaaataaaaaaaaaaaaaaaaaaaaaaaaaaaaaaaaaaaaaaaaaaaaaaaaaaaaaaaaacacaaaaaacaagaaacaaaacaaaaaaaaaacagaaaaaaaaaaacaaaaaaaagaaacaaaaaaacaaagcgtggggcggagcggccgcggagcgacccacaaagaagaacatacaacacacacgtgggggtgggaggaggggcggacacactgagatgagagacgagaggaaaacacatatgagagagcagagcgaaaaaaaaccggacggtaaaaaaacagagaggggcagggaagaggaacaccacacaaaaacaagagaaacccgcgcggcgggcagcagaagagactcggacgtcgacagaaccaaaccaccgaggagggaggaagatacgggaaggacgacagccatgaggaggagactaaacaacaacggaggaagaacagaggaagagcggggaggcgacatagataaaaaataagcccgcgcgagcgaggggaagaggaggaataagagaacaagagagaggagatgagaagaaggacggagaaaagaagaaaagcaaacgagaagagagagaaagagaagaaagtaggacaagagaagcaaggaggaagagggaagagaaagaaaagaggaggaggagacgagaagagagagagagaagaaggcgaacagtggagagagggacggtgagagagatcagcggagggaggataagaaagagtgaagaggacgatgaggcagggggagagatagagtagtgagagctgatggagagacaggaagggggacagaagagacggtgagatgagacagtaaagatggctgtagaagatcaaatacagatggatagggagcgagggagaaagtcgaaacaaggagaaatgagaggtgaggaggaagggagagaggaggggcaggcgtaggagtggggcggtgggggagagagggatgaagggagaagacaacca

SEQ ID NO: 50356 - DNA, 3084 bp, Homo sapiens
gagagcgacagagcccgggccacaggcagctccttgccagctctcctcctcgcacagccgctcgaaccgcctgctgagccccatggcccgcgccacgctctccgccgcccccagcaatccccggctcctgcgggtggcgctgctgctcctgctcctggtggccgccagccggcgcgcagcaggtgggtcccggcgccctggggtccccgggccggacgcggctggggtgggcgccccgcgccgacagccccgctcaatcagcgagtctcttcttccctaggagcgcccctggccactgaactgcgctgccagtgcttgcagaccctgcagggaattcacctcaagaacatccaaagtgtgaaggtgaagtcccccggaccccactgcgcccaaaccgaagtcatgtaagtctcgcccatcgctgccgctgccactgctggggtccccgactctcccgctgccccaaaccctgtcctcagcccgacctcctgtctcacgagattcccttctctctgcagagccacactcaagaatgggcagaaagcttgtctcaaccccgcatcgcccatggttaagaaaatcatcgaaaagatgctgaaaaaagtaagttataatttccatgtacacaggcgactggagctgttggtcagaaatactggcgtctgccccctaaaaagtaaatcaggaaaacccagggttagctgcaggactgaaaaaggatattcccagtgcccagggtcaccacccaggttcttccctcctgccagtgaatgtaggtaaaactgctttcatgtaaggtctcattggagtttgccagttgtgctgaagtgttttccacctgttaaaaaacacaagcttcatttcccctagttcctactgactttcagacctgaaaagcagaccccctggttttttgtaaaagtttagggttgaagtgcagagatttcacaataatattgcactgggtatataactggttgccaccacctattagccatgtcactcagagacaatattatttagtttatctgagactcagcaaaacagggaaaataatggtagctacatcatgaggttgctttgaggctcaagtgaggcccagtatgacaaagagcaataggctctggctgttttagccagtaaaacagtgtagactgccactcctccaccccacgtcacccccattcctaaaagagcatcccaagcctagaggtccttgccacacagcacagctgtcacaggcagtacccacttgggtgccaggctggggaaactgcattcagaaaactctagagcctggggaaacaggacaggagaagactgttgtgcagtcagctttcctgagcacctactcagggcacccattttctcattacagtggcaaatccaactgaccagaaggaaggaggaagcttattggtggctgttcctgaaggaggccctgcccttacaggaacagaagaggaaagagagacacagctgcagaggccacctggattgcgcctaatgtgtttgagcatcacttaggagaagtcttctatttatttatttatttatttatttgtttgttttagaagattctatgttaatattttatgtgtaaaataaggttatgattgaatctacttgcacactctcccattatatttattgtttattttaggtcaaacccaagttagttcaatcctgattcatatttaatttgaagatagaaggtttgcagatattctctagtcatttgttaatatttcttcgtgatgacatatcacatgtcagccactgtgatagaggctgaggaatccaagaaaatggccagtaagatcaatgtgacggcagggaaatgtatgtgtgtctattttgtaactgtaaagatgaatgtcagttgttatttattgaaatgatttcacagtgtgtggtcaacatttctcatgttgaagctttaagaactaaaatgttctaaatatcccttggacattttatgtctttcttgtaaggcatactgccttgtttaatgttaattatgcagtgtttccctctgtgttagagcagagaggtttcgatatttattgatgttttcacaaagaacaggaaaataaaatatttaaaaataaaaaaaaaaaaaaaaaaaaaaaaaaaaaaaaaaaaaaaaaaaaaaaaaaaaaaaaacacaaaaaacaagaaacaaaacaaaaaaaaaacagaaaaaaaaaaacaaaaaaaagaaacaaaaaaacaaagcgtggggcggagcggccgcggagcgacccacaaagaagaacatacaacacacacgtgggggtgggaggaggggcggacacactgagatgagagacgagaggaaaacacatatgagagagcagagcgaaaaaaaaccggacggtaaaaaaacagagaggggcagggaagaggaacaccacacaaaaacaagagaaacccgcgcggcgggcagcagaagagactcggacgtcgacagaaccaaaccaccgaggagggaggaagatacgggaaggacgacagccatgaggaggagactaaacaacaacggaggaagaacagaggaagagcggggaggcgacatagataaaaaataagcccgcgcgagcgaggggaagaggaggaataagagaacaagagagaggagatgagaagaaggacggagaaaagaagaaaagcaaacgagaagagagagaaagagaagaaagtaggacaagagaagcaaggaggaagagggaagagaaagaaaagaggaggaggagacgagaagagagagagagaagaaggcgaacagtggagagagggacggtgagagagatcagcggagggaggataagaaagagtgaagaggacgatgaggcagggggagagatagagtagtgagagctgatggagagacaggaagggggacagaagagacggtgagatgagacagtaaagatggctgtagaagatcaaatacagatggatagggagcgagggagaaagtcgaaacaaggagaaatgagaggtgaggaggaagggagagaggaggggcaggcgtaggagtggggcggtgggggagagagggatgaagggagaagacaacca

SEQ ID NO: 50357 - DNA, 3084 bp, Homo sapiens
gagagcgacagagcccgggccacaggcagctccttgccagctctcctcctcgcacagccgctcgaaccgcctgctgagccccatggcccgcgccacgctctccgccgcccccagcaatccccggctcctgcgggtggcgctgctgctcctgctcctggtggccgccagccggcgcgcagcaggtgggtcccggcgccctggggtccccgggccggacgcggctggggtgggcgccccgcgccgacagccccgctcaatcagcgagtctcttcttccctaggagcgcccctggccactgaactgcgctgccagtgcttgcagaccctgcagggaattcacctcaagaacatccaaagtgtgaaggtgaagtcccccggaccccactgcgcccaaaccgaagtcatgtaagtctcgcccatcgctgccgctgccactgctggggtccccgactctcccgctgccccaaaccctgtcctcagcccgacctcctgtctcacgagattcccttctctctgcagagccacactcaagaatgggcagaaagcttgtctcaaccccgcatcgcccatggttaagaaaatcatcgaaaagatgctgaaaaaagtaagttataatttccatgtacacaggcgactggagctgttggtcagaaatactggcgtctgccccctaaaaagtaaatcaggaaaacccagggttagctgcaggactgaaaaaattattattttcacaaagttgccattaaggttattaatctgttctggtgccagaggatattcccagtgcccagggtcaccacccaggttcttccctcctgccagtgaatgtaggtaaaactgctttcatgtaaggtctcattggagtttgccagttgtgctgaagtgttttccacctgttaaaaaacacaagcttcatttcccctagttcctactgactttcagacctgaaaagcagaccccctggttttttgtaaaagtttagggttgaagtgcagagatttcacaataatattgcactgggtatataactggttgccaccacctattagccatgtcactcagagacaatattatttagtttatctgagactcagcaaaacagggaaaataatggtagctacatcatgaggttgctttgaggctcaagtgaggcccagtatgacaaagagcaataggctctggctgttttagccagtaaaacagtgtagactgccactcctccaccccacgtcacccccattcctaaaagagcatcccaagcctagaggtccttgccacacagcacagctgtcacaggcagtacccacttgggtgccaggctggggaaactgcattcagaaaactctagagcctggggaaacaggacaggagaagactgttgtgcagtcagctttcctgagcacctactcagggcacccattttctcattacagtggcaaatccaactgaccagaaggaaggaggaagcttattggtggctgttcctgaaggaggccctgcccttacaggaacagaagaggaaagagagacacagctgcagaggccacctggattgcgcctaatgtgtttgagcatcacttaggagaagtcttctatttatttatttatttatttatttgtttgttttagaagattctatgttaatattttatgtgttattttaggtcaaacccaagttagttcaatcctgattcatatttaatttgaagatagaaggtttgcagatattctctagtcatttgttaatatttcttcgtgatgacatatcacatgtcagccactgtgatagaggctgaggaatccaagaaaatggccagtaagatcaatgtgacggcagggaaatgtatgtgtgtctattttgtaactgtaaagatgaatgtcagttgttatttattgaaatgatttcacagtgtgtggtcaacatttctcatgttgaagctttaagaactaaaatgttctaaatatcccttggacattttatgtctttcttgtaaggcatactgccttgtttaatgttaattatgcagtgtttccctctgtgttagagcagagaggtttcgatatttattgatgttttcacaaagaacaggaaaataaaatatttaaaaataaaaaaaaaaaaaaaaaaaaaaaaaaaaaaaaaaaaaaaaaaaaaaaaaaaaaaaaacacaaaaaacaagaaacaaaacaaaaaaaaaacagaaaaaaaaaaacaaaaaaaagaaacaaaaaaacaaagcgtggggcggagcggccgcggagcgacccacaaagaagaacatacaacacacacgtgggggtgggaggaggggcggacacactgagatgagagacgagaggaaaacacatatgagagagcagagcgaaaaaaaaccggacggtaaaaaaacagagaggggcagggaagaggaacaccacacaaaaacaagagaaacccgcgcggcgggcagcagaagagactcggacgtcgacagaaccaaaccaccgaggagggaggaagatacgggaaggacgacagccatgaggaggagactaaacaacaacggaggaagaacagaggaagagcggggaggcgacatagataaaaaataagcccgcgcgagcgaggggaagaggaggaataagagaacaagagagaggagatgagaagaaggacggagaaaagaagaaaagcaaacgagaagagagagaaagagaagaaagtaggacaagagaagcaaggaggaagagggaagagaaagaaaagaggaggaggagacgagaagagagagagagaagaaggcgaacagtggagagagggacggtgagagagatcagcggagggaggataagaaagagtgaagaggacgatgaggcagggggagagatagagtagtgagagctgatggagagacaggaagggggacagaagagacggtgagatgagacagtaaagatggctgtagaagatcaaatacagatggatagggagcgagggagaaagtcgaaacaaggagaaatgagaggtgaggaggaagggagagaggaggggcaggcgtaggagtggggcggtgggggagagagggatgaagggagaagacaacca

SEQ ID NO: 50358 - DNA, 1820 bp, Homo sapiens
ccccgcggctgcaggatacggcacgagcccaaaccctgtcctcagcccgacctcctgtctcacgagattcccttctctctgcagagccacactcaagaatgggcagaaagcttgtctcaaccccgcatcgcccatggttaagaaaatcatcgaaaagatgctgaaaaatggcaaatccaactgaccagaaggaaggaggaagcttattggtggctgttcctgaaggaggccctgcccttacaggaacagaagaggaaagagagacacagctgcagaggccacctggattgcgcctaatgtgtttgagcatcacttaggagaagtcttctatttatttatttatttatttatttgtttgttttagaagattctatgttaatattttatgtgttattttaggtcaaacccaagttagttcaatcctgattcatatttaatttgaagatagaaggtttgcagatattctctagtcatttgttaatatttcttcgtgatgacatatcacatgtcagccactgtgatagaggctgaggaatccaagaaaatggccagtaagatcaatgtgacggcagggaaatgtatgtgtgtctattttgtaactgtaaagatgaatgtcagttgttatttattgaaatgatttcacagtgtgtggtcaacatttctcatgttgaagctttaagaactaaaatgttctaaatatcccttggacattttatgtctttcttgtaaggcatactgccttgtttaatgttaattatgcagtgtttccctctgtgttagagcagagaggtttcgatatttattgatgttttcacaaagaacaggaaaataaaatatttaaaaataaaaaaaaaaaaaaaaaaaaaaaaaaaaaaaaaaaaaaaaaaaaaaaaaaaaaaaaacacaaaaaacaagaaacaaaacaaaaaaaaaacagaaaaaaaaaaacaaaaaaaagaaacaaaaaaacaaagcgtggggcggagcggccgcggagcgacccacaaagaagaacatacaacacacacgtgggggtgggaggaggggcggacacactgagatgagagacgagaggaaaacacatatgagagagcagagcgaaaaaaaaccggacggtaaaaaaacagagaggggcagggaagaggaacaccacacaaaaacaagagaaacccgcgcggcgggcagcagaagagactcggacgtcgacagaaccaaaccaccgaggagggaggaagatacgggaaggacgacagccatgaggaggagactaaacaacaacggaggaagaacagaggaagagcggggaggcgacatagataaaaaataagcccgcgcgagcgaggggaagaggaggaataagagaacaagagagaggagatgagaagaaggacggagaaaagaagaaaagcaaacgagaagagagagaaagagaagaaagtaggacaagagaagcaaggaggaagagggaagagaaagaaaagaggaggaggagacgagaagagagagagagaagaaggcgaacagtggagagagggacggtgagagagatcagcggagggaggataagaaagagtgaagaggacgatgaggcagggggagagatagagtagtgagagctgatggagagacaggaagggggacagaagagacggtgagatgagacagtaaagatggctgtagaagatcaaatacagatggatagggagcgagggagaaagtcgaaacaaggagaaatgagaggtgaggaggaagggagagaggaggggcaggcgtaggagtggggcggtgggggagagagggatgaagggagaagacaacca

SEQ ID NO: 50359 - DNA, 3138 bp, Homo sapiens
gagagcgacagagcccgggccacaggcagctccttgccagctctcctcctcgcacagccgctcgaaccgcctgctgagccccatggcccgcgccacgctctccgccgcccccagcaatccccggctcctgcgggtggcgctgctgctcctgctcctggtggccgccagccggcgcgcagcaggtgggtcccggcgccctggggtccccgggccggacgcggctggggtgggcgccccgcgccgacagccccgctcaatcagcgagtctcttcttccctaggagcgcccctggccactgaactgcgctgccagtgcttgcagaccctgcagggaattcacctcaagaacatccaaagtgtgaaggtgaagtcccccggaccccactgcgcccaaaccgaagtcatgtaagtctcgcccatcgctgccgctgccactgctggggtccccgactctcccgctgccccaaaccctgtcctcagcccgacctcctgtctcacgagattcccttctctctgcagagccacactcaagaatgggcagaaagcttgtctcaaccccgcatcgcccatggttaagaaaatcatcgaaaagatgctgaaaaaagtaagttataatttccatgtacacaggcgactggagctgttggtcagaaatactggcgtctgccccctaaaaagtaaatcaggaaaacccagggttagctgcaggactgaaaaaattattattttcacaaagttgccattaaggttattaatctgttctggtgccagaggatattcccagtgcccagggtcaccacccaggttcttccctcctgccagtgaatgtaggtaaaactgctttcatgtaaggtctcattggagtttgccagttgtgctgaagtgttttccacctgttaaaaaacacaagcttcatttcccctagttcctactgactttcagacctgaaaagcagaccccctggttttttgtaaaagtttagggttgaagtgcagagatttcacaataatattgcactgggtatataactggttgccaccacctattagccatgtcactcagagacaatattatttagtttatctgagactcagcaaaacagggaaaataatggtagctacatcatgaggttgctttgaggctcaagtgaggcccagtatgacaaagagcaataggctctggctgttttagccagtaaaacagtgtagactgccactcctccaccccacgtcacccccattcctaaaagagcatcccaagcctagaggtccttgccacacagcacagctgtcacaggcagtacccacttgggtgccaggctggggaaactgcattcagaaaactctagagcctggggaaacaggacaggagaagactgttgtgcagtcagctttcctgagcacctactcagggcacccattttctcattacagtggcaaatccaactgaccagaaggaaggaggaagcttattggtggctgttcctgaaggaggccctgcccttacaggaacagaagaggaaagagagacacagctgcagaggccacctggattgcgcctaatgtgtttgagcatcacttaggagaagtcttctatttatttatttatttatttatttgtttgttttagaagattctatgttaatattttatgtgtaaaataaggttatgattgaatctacttgcacactctcccattatatttattgtttattttaggtcaaacccaagttagttcaatcctgattcatatttaatttgaagatagaaggtttgcagatattctctagtcatttgttaatatttcttcgtgatgacatatcacatgtcagccactgtgatagaggctgaggaatccaagaaaatggccagtaagatcaatgtgacggcagggaaatgtatgtgtgtctattttgtaactgtaaagatgaatgtcagttgttatttattgaaatgatttcacagtgtgtggtcaacatttctcatgttgaagctttaagaactaaaatgttctaaatatcccttggacattttatgtctttcttgtaaggcatactgccttgtttaatgttaattatgcagtgtttccctctgtgttagagcagagaggtttcgatatttattgatgttttcacaaagaacaggaaaataaaatatttaaaaataaaaaaaaaaaaaaaaaaaaaaaaaaaaaaaaaaaaaaaaaaaaaaaaaaaaaaaaacacaaaaaacaagaaacaaaacaaaaaaaaaacagaaaaaaaaaaacaaaaaaaagaaacaaaaaaacaaagcgtggggcggagcggccgcggagcgacccacaaagaagaacatacaacacacacgtgggggtgggaggaggggcggacacactgagatgagagacgagaggaaaacacatatgagagagcagagcgaaaaaaaaccggacggtaaaaaaacagagaggggcagggaagaggaacaccacacaaaaacaagagaaacccgcgcggcgggcagcagaagagactcggacgtcgacagaaccaaaccaccgaggagggaggaagatacgggaaggacgacagccatgaggaggagactaaacaacaacggaggaagaacagaggaagagcggggaggcgacatagataaaaaataagcccgcgcgagcgaggggaagaggaggaataagagaacaagagagaggagatgagaagaaggacggagaaaagaagaaaagcaaacgagaagagagagaaagagaagaaagtaggacaagagaagcaaggaggaagagggaagagaaagaaaagaggaggaggagacgagaagagagagagagaagaaggcgaacagtggagagagggacggtgagagagatcagcggagggaggataagaaagagtgaagaggacgatgaggcagggggagagatagagtagtgagagctgatggagagacaggaagggggacagaagagacggtgagatgagacagtaaagatggctgtagaagatcaaatacagatggatagggagcgagggagaaagtcgaaacaaggagaaatgagaggtgaggaggaagggagagaggaggggcaggcgtaggagtggggcggtgggggagagagggatgaagggagaagacaacca

SEQ ID NO: 50360 - DNA, 3084 bp, Homo sapiens
gagagcgacagagcccgggccacaggcagctccttgccagctctcctcctcgcacagccgctcgaaccgcctgctgagccccatggcccgcgccacgctctccgccgcccccagcaatccccggctcctgcgggtggcgctgctgctcctgctcctggtggccgccagccggcgcgcagcaggtgggtcccggcgccctggggtccccgggccggacgcggctggggtgggcgccccgcgccgacagccccgctcaatcagcgagtctcttcttccctaggagcgcccctggccactgaactgcgctgccagtgcttgcagaccctgcagggaattcacctcaagaacatccaaagtgtgaaggtgaagtcccccggaccccactgcgcccaaaccgaagtcatgtaagtctcgcccatcgctgccgctgccactgctggggtccccgactctcccgctgccccaaaccctgtcctcagcccgacctcctgtctcacgagattcccttctctctgcagagccacactcaagaatgggcagaaagcttgtctcaaccccgcatcgcccatggttaagaaaatcatcgaaaagatgctgaaaaaagtaagttataatttccatgtacacaggcgactggagctgttggtcagaaatactggcgtctgccccctaaaaagtaaatcaggaaaacccagggttagctgcaggactgaaaaaattattattttcacaaagttgccattaaggttattaatctgttctggtgccagaggatattcccagtgcccagggtcaccacccaggttcttccctcctgccagtgaatgtaggtaaaactgctttcatgtaaggtctcattggagtttgccagttgtgctgaagtgttttccacctgttaaaaaacacaagcttcatttcccctagttcctactgactttcagacctgaaaagcagaccccctggttttttgtaaaagtttagggttgaagtgcagagatttcacaataatattgcactgggtatataactggttgccaccacctattagccatgtcactcagagacaatattatttagtttatctgagactcagcaaaacagggaaaataatggtagctacatcatgaggttgctttgaggctcaagtgaggcccagtatgacaaagagcaataggctctggctgttttagccagtaaaacagtgtagactgccactcctccaccccacgtcacccccattcctaaaagagcatcccaagcctagaggtccttgccacacagcacagctgtcacaggcagtacccacttgggtgccaggctggggaaactgcattcagttcctgagcacctactcagggcacccattttctcattacagtggcaaatccaactgaccagaaggaaggaggaagcttattggtggctgttcctgaaggaggccctgcccttacaggaacagaagaggaaagagagacacagctgcagaggccacctggattgcgcctaatgtgtttgagcatcacttaggagaagtcttctatttatttatttatttatttatttgtttgttttagaagattctatgttaatattttatgtgtaaaataaggttatgattgaatctacttgcacactctcccattatatttattgtttattttaggtcaaacccaagttagttcaatcctgattcatatttaatttgaagatagaaggtttgcagatattctctagtcatttgttaatatttcttcgtgatgacatatcacatgtcagccactgtgatagaggctgaggaatccaagaaaatggccagtaagatcaatgtgacggcagggaaatgtatgtgtgtctattttgtaactgtaaagatgaatgtcagttgttatttattgaaatgatttcacagtgtgtggtcaacatttctcatgttgaagctttaagaactaaaatgttctaaatatcccttggacattttatgtctttcttgtaaggcatactgccttgtttaatgttaattatgcagtgtttccctctgtgttagagcagagaggtttcgatatttattgatgttttcacaaagaacaggaaaataaaatatttaaaaataaaaaaaaaaaaaaaaaaaaaaaaaaaaaaaaaaaaaaaaaaaaaaaaaaaaaaaaacacaaaaaacaagaaacaaaacaaaaaaaaaacagaaaaaaaaaaacaaaaaaaagaaacaaaaaaacaaagcgtggggcggagcggccgcggagcgacccacaaagaagaacatacaacacacacgtgggggtgggaggaggggcggacacactgagatgagagacgagaggaaaacacatatgagagagcagagcgaaaaaaaaccggacggtaaaaaaacagagaggggcagggaagaggaacaccacacaaaaacaagagaaacccgcgcggcgggcagcagaagagactcggacgtcgacagaaccaaaccaccgaggagggaggaagatacgggaaggacgacagccatgaggaggagactaaacaacaacggaggaagaacagaggaagagcggggaggcgacatagataaaaaataagcccgcgcgagcgaggggaagaggaggaataagagaacaagagagaggagatgagaagaaggacggagaaaagaagaaaagcaaacgagaagagagagaaagagaagaaagtaggacaagagaagcaaggaggaagagggaagagaaagaaaagaggaggaggagacgagaagagagagagagaagaaggcgaacagtggagagagggacggtgagagagatcagcggagggaggataagaaagagtgaagaggacgatgaggcagggggagagatagagtagtgagagctgatggagagacaggaagggggacagaagagacggtgagatgagacagtaaagatggctgtagaagatcaaatacagatggatagggagcgagggagaaagtcgaaacaaggagaaatgagaggtgaggaggaagggagagaggaggggcaggcgtaggagtggggcggtgggggagagagggatgaagggagaagacaacca

SEQ ID NO: 50361 - DNA, 2046 bp, Homo sapiens
gagagcgacagagcccgggccacaggcagctccttgccagctctcctcctcgcacagccgctcgaaccgcctgctgagccccatggcccgcgccacgctctccgccgcccccagcaatccccggctcctgcgggtggcgctgctgctcctgctcctggtggccgccagccggcgcgcagcaggagcgcccctggccactgaactgcgctgccagtgcttgcagaccctgcagggaattcacctcaagaacatccaaagtgtgaaggtgaagtcccccggaccccactgcgcccaaaccgaagtcatagccacactcaagaatgggcagaaagcttgtctcaaccccgcatcgcccatggttaagaaaatcatcgaaaagatgctgaaaaacctgaaggaggccctgcccttacaggaacagaagaggaaagagagacacagctgcagaggccacctggattgcgcctaatgtgtttgagcatcacttaggagaagtcttctatttatttatttatttatttatttgtttgttttagaagattctatgttaatattttatgtgtaaaataaggttatgattgaatctacttgcacactctcccattatatttattgtttattttaggtcaaacccaagttagttcaatcctgattcatatttaatttgaagatagaaggtttgcagatattctctagtcatttgttaatatttcttcgtgatgacatatcacatgtcagccactgtgatagaggctgaggaatccaagaaaatggccagtaagatcaatgtgacggcagggaaatgtatgtgtgtctattttgtaactgtaaagatgaatgtcagttgttatttattgaaatgatttcacagtgtgtggtcaacatttctcatgttgaagctttaagaactaaaatgttctaaatatcccttggacattttatgtctttcttgtaaggcatactgccttgtttaatgttaattatgcagtgtttccctctgtgttagagcagagaggtttcgatatttattgatgttttcacaaagaacaggaaaataaaatatttaaaaataaaaaaaaaaaaaaaaaaaaaaaaaaaaaaaaaaaaaaaaaaaaaaaaaaaaaaaaacacaaaaaacaagaaacaaaacaaaaaaaaaacagaaaaaaaaaaacaaaaaaaagaaacaaaaaaacaaagcgtggggcggagcggccgcggagcgacccacaaagaagaacatacaacacacacgtgggggtgggaggaggggcggacacactgagatgagagacgagaggaaaacacatatgagagagcagagcgaaaaaaaaccggacggtaaaaaaacagagaggggcagggaagaggaacaccacacaaaaacaagagaaacccgcgcggcgggcagcagaagagactcggacgtcgacagaaccaaaccaccgaggagggaggaagatacgggaaggacgacagccatgaggaggagactaaacaacaacggaggaagaacagaggaagagcggggaggcgacatagataaaaaataagcccgcgcgagcgaggggaagaggaggaataagagaacaagagagaggagatgagaagaaggacggagaaaagaagaaaagcaaacgagaagagagagaaagagaagaaagtaggacaagagaagcaaggaggaagagggaagagaaagaaaagaggaggaggagacgagaagagagagagagaagaaggcgaacagtggagagagggacggtgagagagatcagcggagggaggataagaaagagtgaagaggacgatgaggcagggggagagatagagtagtgagagctgatggagagacaggaagggggacagaagagacggtgagatgagacagtaaagatggctgtagaagatcaaatacagatggatagggagcgagggagaaagtcgaaacaaggagaaatgagaggtgaggaggaagggagagaggaggggcaggcgtaggagtggggcggtgggggagagagggatgaagggagaagacaacca

SEQ ID NO: 50362 - DNA, 2042 bp, Homo sapiens
gagagcgacagagcccgggccacaggcagctccttgccagctctcctcctcgcacagccgctcgaaccgcctgctgagccccatggcccgcgccacgctctccgccgcccccagcaatccccggctcctgcgggtggcgctgctgctcctgctcctggtggccgccagccggcgcgcagcaggagcgcccctggccactgaactgcgctgccagtgcttgcagaccctgcagggaattcacctcaagaacatccaaagtgtgaaggtgaagtcccccggaccccactgcgcccaaaccgaagtcatagccacactcaagaatgggcagaaagcttgtctcaaccccgcatcgcccatggttaagaaaatcatcgaaaagatgctgaaaaatggcaaatccaactgaccagaaggaaggaggaagcttattggtggctgttcctgaaggaggccctgcccttacaggaacagaagaggaaagagagacacagctgcagaggccacctggattgcgcctaatgtgtttgagcatcacttaggagaagtcttctatttatttatttatttatttatttgtttgttttagaagattctatgttaatattttatgtgttattttaggtcaaacccaagttagttcaatcctgattcatatttaatttgaagatagaaggtttgcagatattctctagtcatttgttaatatttcttcgtgatgacatatcacatgtcagccactgtgatagaggctgaggaatccaagaaaatggccagtaagatcaatgtgacggcagggaaatgtatgtgtgtctattttgtaactgtaaagatgaatgtcagttgttatttattgaaatgatttcacagtgtgtggtcaacatttctcatgttgaagctttaagaactaaaatgttctaaatatcccttggacattttatgtctttcttgtaaggcatactgccttgtttaatgttaattatgcagtgtttccctctgtgttagagcagagaggtttcgatatttattgatgttttcacaaagaacaggaaaataaaatatttaaaaataaaaaaaaaaaaaaaaaaaaaaaaaaaaaaaaaaaaaaaaaaaaaaaaaaaaaaaaacacaaaaaacaagaaacaaaacaaaaaaaaaacagaaaaaaaaaaacaaaaaaaagaaacaaaaaaacaaagcgtggggcggagcggccgcggagcgacccacaaagaagaacatacaacacacacgtgggggtgggaggaggggcggacacactgagatgagagacgagaggaaaacacatatgagagagcagagcgaaaaaaaaccggacggtaaaaaaacagagaggggcagggaagaggaacaccacacaaaaacaagagaaacccgcgcggcgggcagcagaagagactcggacgtcgacagaaccaaaccaccgaggagggaggaagatacgggaaggacgacagccatgaggaggagactaaacaacaacggaggaagaacagaggaagagcggggaggcgacatagataaaaaataagcccgcgcgagcgaggggaagaggaggaataagagaacaagagagaggagatgagaagaaggacggagaaaagaagaaaagcaaacgagaagagagagaaagagaagaaagtaggacaagagaagcaaggaggaagagggaagagaaagaaaagaggaggaggagacgagaagagagagagagaagaaggcgaacagtggagagagggacggtgagagagatcagcggagggaggataagaaagagtgaagaggacgatgaggcagggggagagatagagtagtgagagctgatggagagacaggaagggggacagaagagacggtgagatgagacagtaaagatggctgtagaagatcaaatacagatggatagggagcgagggagaaagtcgaaacaaggagaaatgagaggtgaggaggaagggagagaggaggggcaggcgtaggagtggggcggtgggggagagagggatgaagggagaagacaacca

SEQ ID NO: 50363 - DNA, 385 bp, Homo sapiens
agaatattaattacatttcttggtcattgttttagtggtagcctttgagtatgaaatatacactataacaatctactttcaaacaacactattccacttcattaatggtgctggtactttataacacagcatttccaatccttctgtcttattttgtattacattattatcattcattttacttattcataagccataatcacccaatacattgttagtattatttagagctgttacctattacatcaattaagaagaagacactagattttattttaaattttttcttctctaatgctcctacctttctttatgtatttctgtgtttttgacctatattgtttttcttttctctgaggaacttctattaacatggcttgcaagg

SEQ ID NO: 50364 - DNA, 997 bp, Homo sapiens
cagaacttttatttttaaaaactgaagctgaaggtgaagccatgctccaaagaattaaagaaatcagtggctaacaggtattcttgaacttacaagatggcagataagaaacagcttgctaaagccctctccacttgcaagataacaaaactgactgaaattggctggaactaatatgaccaactagagtctgtgcagactgagcttgctgacatcacagcccaaatttccacatttcattccagctactccagaatttgcacatgtggcccataaagaggcatgaagagacaactgtgcacgtcgaaggacttttcagacttcctctttccttccccagaatctaccccctaaacctttcctaataaacatactaccttaaggccaatttgcggggagacagatttgagctggactcctgtcttccttgttggttatctaagtaaagctttcctttcttcaaaaacctggtgccccctaagtttggaggtttgcttgagcccaggagtttgagattagcctgagcaacatggcaaaaccccacgtgtacaaaaaaataacaaaaattaaccaggcatggtggttagcgcctgtggtcccagctaccagggaggctgaagtgggaggatcaccccagctggggagactctgtctttaaaaaaataacaaataaaaaaaactcctcttcactcatgtttgtatcacctcctcccctctttgggcctcttctcttcattctggccaactgccaattttgtgtcacaggattcttcacccagtccttcccatcactggctctgttccaccctgaagttataatgtccacatttctgaggaaagaggtactaatgtgatgttggccccacactttctgcccaccttgtggtttgtttgtttatttatttgtcagagtcttgctctgtctcccagggtggagttgcagtgagctgagatcgtaccactgcactcctgcctgggtgacagattgagactttgt

SEQ ID NO: 50365 - DNA, 414 bp, Homo sapiens
gggtcgaccaattatatagttgttttgaatgcagtgctgcttgtttgcatcagaagtcagatatgttgagaccacaaattgtttctttcttcagttataattagtgggagtttttggtaaaaaattaaaagattggctggtcacggtggctcacacctgtaatcccagtactttgggaaggctgaggccggcagatcacctgaggtcaggagctcgagaccagcctggccaacatggtgaaaccccgtctctactaaaaacacaaaaattagccgggtgtgatggcgggcacatgtaatcccagctactcgggaagctgaggcagaagaatcgcttgaacctgggagggggaggttgcagtgagctgagatcgtaccactgcactcctgcctgggtgacagattgagactttgt

SEQ ID NO: 50366 - DNA, 437 bp, Homo sapiens
ttttcaaggagtctgcagactggcaaatgtaacagtcaattttatgtatcaacttgattggactaatggatgctgagatagctggtaaaacattatttctgaatgtgtctgggagggtgtttcttggaagcagttagcctttgaatttgtagactgaataaagaagagccaacctcactaatattgagtggtgaagccggctgaacttcctgggtccagtggggacttggagaacttttctgtgcctagctaaaggtttgtaaatgcaccaattagcactctgtaaaaacgcaccaatcagcactctgtaaaatggaccaatcagcaggatgtgggcagggccaaataagggaataaaacctggccaccccagccatgggcggcaacccactcaggtccccttccagactgtggcaggtttgttcttttactcttca

SEQ ID NO: 50367 - DNA, 593 bp, Homo sapiens
aaaaaagacagtagttgtggagtttgctttatagggaaggagatggcttctgcaaacatctgttctgaaggggcttgtgtgttggacactaaacatttatgtaaatttttagaggagacattgaattaggcacgtgtagcccaaagtgaggtcagatagtatagcatttgagtatctgagaaaagagataaaatattacacagctgtaggggtttggcaggtattggaaatgtgtaaggcagaacaaatgtgacaaagggaagtggcagcgactgtggacagtggtggtggtgacatcagcagcagtagctttagtaggggaagaggaagaggagaatgatcgtaataaataatagttaatatttatacagttatataggacctgttgaatacttgcatagctcatttagtatttatgataatcccatcagatgaaaagggcctaattgaggctgttaataatgaaagaaaaagcagtcagttttaaaggaaccaatctaaagaaatgaaccggctctccgggttgcatagctgttaagtctaaggtcaggatggcgcccaggcaggctccatccactgtcctccccggcact

SEQ ID NO: 50368 - DNA, 322 bp, Homo sapiens
atatgtttgataacttccataagaaaaacctctaagtgggtacatataaaaggattgtccatttcctatatatattattttaaatcagttattactctatgtatttattagaattatttcggttacaatgaacagaaaccccaattcacattggcttaaacaataaagggaatgtatagattcacgtagctgaaaagtactgggcagttctaggtatgaggtgatgcttgatcctacagctcaatgatgttaccaaggactgaatttctatcactctattctgctttctatgatgctgatttcatcctaaggctcatctatg

SEQ ID NO: 50369 - DNA, 578 bp, Homo sapiens
cctgagcttaagcttattttaacagtaaatctacttctgcatagtaagtaatcttaagagatgaaccaagaggttgtaatatgcctagtctatattttaagcatttattgcaattgtttggttattataagttgcttcatgtgaatcattttcttggatttaatgttcaactagaaacttgtagtgttttgttttgttttttgttttttttgaaatggagtcttgctctgttgcccaggctggagtgcagtggcactatctcagctcactgcagcctccgcctcccgaattcaagtgattcttctgcctcagcctcctgagtagcagggattacaagtgggtgccaccacacctggctaatttttgtatttttagtagagatggagtttcgccatgttggccaggctgatctcgaactcttgacctcaggtgatccactctccttggcctcccaaagtgctgggattacaggcatgagcatcatgcctggcctctatatttttatcttttcttccaggagccaaagctgctgctttttctccttttttttttttatgcttctctcctacctcctttaa

SEQ ID NO: 50370 - DNA, 299 bp, Homo sapiens
aactattactgctgtcccactttggaacatttataaccctaaaaagaaatctcccactccccatttcctcctgtttcccctaaccctaagcaaccaccagtctcctttctgtctctatgaatttgcctattctgaacctttcgtataaatgggatcatataatgtatggcctttcatgattggctgccttcaagtgaaattaatagtcctaaatatgcacctaataacagagcttcaagatacatgaatcagaaactgatagaacttgaaaggataagtagatctaaaattatagttgg

SEQ ID NO: 50371 - DNA, 261 bp, Homo sapiens
gtacattgaattggaaagtcttcaaaaagcagcagtgatgaattttttgagatttttaacaattacaaaaattcagggttttttctaatggatgccacctgagactttattttctgttattttcttgtaataactaaccaaacaagctcatgttgaaaaatgattactaaatttgagctaattgcaatgactggtttcaaaattttccacagtgtatttgagttaaaatttcactgtgaagagtactacgatcactctcgc

SEQ ID NO: 50372 - DNA, 1274 bp, Homo sapiens
ggcacgaggggtccaccccggcctggcctagcggagcccccgcgtccgcccgccgcagccgccgctccatccccagccccggccccgcatccagaggcgggtcctggatattcgcgccgaacccagcactccggttcgacggggctgcagtttgcagggcccggataaccgaggcagtggcccctcccgcgtccccaggtttcaaggacgctaggactctccgcggccctgaggcttcgcactggggagtggggccgccaggatggacgtgttcatgaagggcctgtccatggccaaggagggcgttgtggcagccgcggagaaaaccaagcagggggtcaccgaggcggcggagaagaccaaggagggcgtcctctacgtcggaagcaagacccgagaaggtgtggtacaaggtgtggcttcagtggctgaaaaaaccaaggaacaggcctcacatctgggaggagctgtgttctctggggcagggaacatcgcagcagccacaggactggtgaagagggaggaattccctactgatctgaagccagaggaagtggcccaggaagctgctgaagaaccactgattgagcccctgatggagccagaaggggagagttatgaggacccaccccaggaggaatatcaggagtatgagccagaggcgtaggggcccaggagagcccccaccagcagcacaattctgtccctgtccctgccccgccccccagagccagggctgtccttagactccttctccccaatcacgagatcttccttccgctctgaggcaaccccctcggagcctgtgttagtgtctgtccatctgtctgtcctacccgcccgcgtccaaccccggggcatggacagggccagggttgcggtcgcggctgggagcctcgcccctccagtgttgcctcctcccatccagcgtctgcgcggatgtagcatgttctatgtgtttttaaacgaagatccgagcgacggctcctccccgatccccgacagtggctctccaagcggcccccgggcagccccagagcaccccgcccgactcccattaacctcgagaacctttttttttttaaccaaaaccaggagccaggctgtgccatgtcccccgccccccatcccagccggcccggtccgaacgcgggcgtcgtgtgttgtgattgtggcatggagagtccccatcccccccatgtgagcgtgtcccgggcgggtgggcccggccgccccccgagagtccatgaataaagctaatctgtctgtagcca

SEQ ID NO: 50373 - DNA, 1207 bp, Homo sapiens
gaccgtgtgactgtgccgtgcgtgtacaggcgggtcctggatattcgcgccgaacccagcactccggttcgacggggctgcagtttgcagggcccggataaccgaggcagtggcccctcccgcgtccccaggtttcaaggacgctaggactctccgcggccctgaggcttcgcactggggagtggggccgccaggatggacgtgttcatgaagggcctgtccatggccaaggagggcgttgtggcagccgcggagaaaaccaagcagggggtcaccgaggcggcggagaagaccaaggagggcgtcctctacgtcggaagcaagacccgagaaggtgtggtacaaggtgtggcttcagtggctgaaaaaaccaaggaacaggcctcacatctgggaggagctgtgttctctggggcagggaacatcgcagcagccacaggactggtgaagagggaggaattccctactgatctgaagccagaggaagtggcccaggaagctgctgaagaaccactgattgagcccctgatggagccagaaggggagagttatgaggacccaccccaggaggaatatcaggagtatgagccagaggcgtaggggcccaggagagcccccaccagcagcacaattctgtccctgtccctgccccgccccccagagccagggctgtccttagactccttctccccaatcacgagatcttccttccgctctgaggcaaccccctcggagcctgtgttagtgtctgtccatctgtctgtcctacccgcccgcgtccaaccccggggcatggacagggccagggttgcggtcgcggctgggagcctcgcccctccagtgttgcctcctcccatccagcgtctgcgcggatgtagcatgttctatgtgtttttaaacgaagatccgagcgacggctcctccccgatccccgacagtggctctccaagcggcccccgggcagccccagagcaccccgcccgactcccattaacctcgagaacctttttttttttaaccaaaaccaggagccaggctgtgccatgtcccccgccccccatcccagccggcccggtccgaacgcgggcgtcgtgtgttgtgattgtggcatggagagtccccatcccccccatgtgagcgtgtcccgggcgggtgggcccggccgccccccgagagtccatgaataaagctaatctgtctgtagcca

SEQ ID NO: 50374 - DNA, 1309 bp, Homo sapiens
ggcggcgcggccgccagcgggggcgctgagctcagagctgccgcagcgccggagccggagccggagccggagcgcgcgagctcgcagggcgcgaggaacgagcggtggctggctacgcacccgagacccgggcactgctgcgctcctgctcaggacccgcgacccgagcgcctgatcccggccctatcccccctccggcccctggtccaccccggcctggcctagcggagcccccgcgtccgcccgccgcagccgccgctccatccccagccccggccccgcatccaggccgccaggatggacgtgttcatgaagggcctgtccatggccaaggagggcgttgtggcagccgcggagaaaaccaagcagggggtcaccgaggcggcggagaagaccaaggagggcgtcctctacgtcggaagcaagacccgagaaggtgtggtacaaggtgtggcttcagtggctgaaaaaaccaaggaacaggcctcacatctgggaggagctgtgttctctggggcagggaacatcgcagcagccacaggactggtgaagagggaggaattccctactgatctgaagccagaggaagtggcccaggaagctgctgaagaaccactgattgagcccctgatggagccagaaggggagagttatgaggacccaccccaggaggaatatcaggagtatgagccagaggcgtaggggcccaggagagcccccaccagcagcacaattctgtccctgtccctgccccgccccccagagccagggctgtccttagactccttctccccaatcacgagatcttccttccgctctgaggcaaccccctcggagcctgtgttagtgtctgtccatctgtctgtcctacccgcccgcgtccaaccccggggcatggacagggccagggttgcggtcgcggctgggagcctcgcccctccagtgttgcctcctcccatccagcgtctgcgcggatgtagcatgttctatgtgtttttaaacgaagatccgagcgacggctcctccccgatccccgacagtggctctccaagcggcccccgggcagccccagagcaccccgcccgactcccattaacctcgagaacctttttttttttaaccaaaaccaggagccaggctgtgccatgtcccccgccccccatcccagccggcccggtccgaacgcgggcgtcgtgtgttgtgattgtggcatggagagtccccatcccccccatgtgagcgtgtcccgggcgggtgggcccggccgccccccgagagtccatgaataaagctaatctgtctgtagcca

SEQ ID NO: 50375 - DNA, 576 bp, Homo sapiens
gagagtatctagaggatccctcccgactagccgacaggctgtccttagactccttctccccaatcacgagatcttccttccgctctgaggcaaccccctcggagcctgtgttagtgtctgtccatctgtctgtcctacccgcccgcgtccaaccccggggcatggacagggccagggttgcggtcgcggctgggagcctcgcccctccagtgttgcctcctcccatccagcgtctgcgcggatgtagcatgttctatgtgtttttaaacgaagatccgagcgacggctcctccccgatccccgacagtggctctccaagcggcccccgggcagccccagagcaccccgcccgactcccattaacctcgagaacctttttttttttaaccaaaaccaggagccaggctgtgccatgtcccccgccccccatcccagccggcccggtccgaacgcgggcgtcgtgtgttgtgattgtggcatggagagtccccatcccccccatgtgagcgtgtcccgggcgggtgggcccggccgccccccgagagtccatgaataaagctaatctgtctgtagcca

SEQ ID NO: 50376 - DNA, 541 bp, Homo sapiens
cggtgtggtgtgggttaggtgagatggaatcgtccttcgtgctggagtgcataacgcgtgtgagtgtatggaactgaaatggactgtttctgcctgtgtgacaggttcgtaatattttgctgttgttttggggaaaaaaaaaacccgtttttccacagagagcctatctctggcagaagtagccaacgagctggacacggagaccctgcggaggctgaagcgggagtgtgggggcctgcagacgctgctccggaacagccaccaggtgttccaagaccctgtattcagtggatcagctggcaccacccaaatagataaattggcccatctggtcttgtggcccccacccaggaatggactcagctcaagaggacagcttcagctccctaagattttatcttggacccgaacaatcagcactcccgacttactggccctctactcaccaagttatccttaaaaacctcaatccctgagttttcagagagactgatttgaataataataaaactccggtcttccacacggccgactctgcatg

SEQ ID NO: 50377 - DNA, 2690 bp, Homo sapiens
ggagcgccgccctgccctgcgcggaggcccgcggccccgggactagcgcaggctcggagcagaaggagcggggtccgggacccggccagggttcccccggagggggcccgggtcccaggtcgctatcaggacccgagcagggcacggcatgttgcgaacttgaggaggcccagggccagtgccagcaagaggaggcacagagggaagccgcctcagtgcccctgagggactccgggcaccccggccatgctgaaggaagggagggcgacttccccgccgcagatctggattcgctttgggaggatttctcccaaagtctcgcccgtggcaattcggagttgctggccttcctcaccagctccggggcgggatcgcagccagaggcgcagcgtgagctcgacgtggttctcagaaccgtcatcccgaaaactagcccacattgcccccttacaactcccaggagggaaatagtcgtgcaagatgtcctcaatggaaccataacgtttttgcctttggaagaagatgatgaggggaacctaaaggttaagatgagcaatgtgtatcaaattcagctcagtcatagcaaagaagaatggttcatatctgttttaattttctgtccagaaagatggcattcagatggaatcgtgtatcccaaacccacgtggcttggagaagagttgctggccaagttggccaagtggtctgtagagaacaagaagagtgactttaaaagcaccctttccctcatctccattatgaagtatagcaaggcttaccaggaacttaaagagaagtataaggaaatggttaaggtgtggcctgaagtcactgatcctgagaagttcgtgtatgaagatgtggctatcgcagcatacctgctgattctatgggaagaagaaagggctgagaggggactaactgccaggcagtcctttgtggacctgggatgtggaaatggcctcctggtccacatcctgagcagtgaggggcatccaggcagagggattgatgtccgaagaagaaaaatctgggacatgtatggaccacaaactcagttagaggaagatgcaatcacacccaatgataagacccttttccctgatgttgattggttaatcggtaaccattctgatgaactcacaccatggatacctgtcattgcagccaggtcttcctacaattgccgcttctttgtcctcccctgctgcttctttgacttcattggaagatactcccggaggcagagtaagaagactcagtaccgggaataccttgacttcattaaagaagtgggcttcacctgtgggtttcacgtggacgaagactgcctcaggattccttcaaccaaaagagtctgtctcgttggaaaatccagaacatacccttcctccagagaagcttccgtggatgaaaagaggactcagtacattaagagcaggcggggctgccctgtaagcccacctggctgggagctttccccttctccacgctgggttgctgctggcagtgctggtcactgtgacggtcagcaagctctggacgccagggtcgggtgtgtaaccagggcctgggccgctgagcatggagcagggccccaggctgaaggaccctggctacctggatttcatcccagagaaaaggctgagcgtgtgaggaactgtgccgccctgccacgagattttattgaccaagtggttttgcaagtagcgaatttactgttaggtggaaagcaattaaacacaagaagttctcgaaatgggagtttgaagacctggaatgggggagagagcctatctctggcagaagtagccaacgagctggacacggagaccctgcggaggctgaagcgggagtgtgggggcctgcagacgctgctccggaacagccaccaggtgttccaaggttgtgaatgggagagttcacatccgcgactggcgagaggagacactgtggaagacaaagcaaccggaagcgaaacagagactgctctctgaagcctgcaaaacccgcctctgctggttcttcatgcatcaccctgatggctgcgctctgtccacggactgctgcccgtttgcccatgggcctgcggagctgcggccaccccggaccaccccgaggaagaagatttcatgagctgcatccttgccagccgaggcctggttggggaggccaaaccaaggagagcttccccagcagtcgtcagtgctgtggtctctgctctggctgtgtttcagcccacctcctcccagctttctccacatcctcacagtgatgaaccgtatttcataaacatcacacgccagagaagccacagttactcggaagcccccagctgactgcctggcttgtttcagatgcagccgcttgaaacgtgcgcagcatcttcatatcataaagattgtgcacggatccttacaatgtctcctgggggagagcggctgaggctgccttgcacaggcccttcccagggcgctgtccgacgcctgccccaccatgtccacatctgtgaagaggatggggctcctcgagaagtaagaccgtatctgccagcgtttctcaccacactggagagcagctgctctggagcagggatccaccagattggtatttttaaaaaaggtgtcaggcttgctatgttgaggttgtttttagagttacagagaataaaaacactcataatttcctga

SEQ ID NO: 50378 - DNA, 3081 bp, Homo sapiens
ggagcgccgccctgccctgcgcggaggcccgcggccccgggactagcgcaggctcggagcagaaggagcggggtccgggacccggccagggttcccccggagggggcccgggtcccaggtcgctatcaggacccgagcagggcacggcatgttgcgaacttgaggaggcccagggccagtgccagcaagaggaggcacagagggaagccgcctcagtgcccctgagggactccgggcaccccggccatgctgaaggaagggagggcgacttccccgccgcagatctggattcgctttgggaggatttctcccaaagtctcgcccgtggcaattcggagttgctggccttcctcaccagctccggggcgggatcgcagccagaggcgcagcgtgagctcgacgtggttctcagaaccgtcatcccgaaaactagcccacattgcccccttacaactcccaggagggaaatagtcgtgcaagatgtcctcaatggaaccataacgtttttgcctttggaagaagatgatgaggggaacctaaaggttaagatgagcaatgtgtatcaaattcagctcagtcatagcaaagaagaatggttcatatctgttttaattttctgtccagaaagatggcattcagatggaatcgtgtatcccaaacccacgtggcttggagaagagttgctggccaagttggccaagtggtctgtagagaacaagaagagtgactttaaaagcaccctttccctcatctccattatgaagtatagcaaggcttaccaggaacttaaagagaagtataaggaaatggttaaggtgtggcctgaagtcactgatcctgagaagttcgtgtatgaagatgtggctatcgcagcatacctgctgattctatgggaagaagaaagggctgagaggggactaactgccaggcagtcctttgtggacctgggatgtggaaatggcctcctggtccacatcctgagcagtgaggggcatccaggcagagggattgatgtccgaagaagaaaaatctgggacatgtatggaccacaaactcagttagaggaagatgcaatcacacccaatgataagacccttttccctgatgttgattggttaatcggtaaccattctgatgaactcacaccatggatacctgtcattgcagccaggtcttcctacaattgccgcttctttgtcctcccctgctgcttctttgacttcattggaagatactcccggaggcagagtaagaagactcagtaccgggaataccttgacttcattaaagaagtgggcttcacctgtgggtttcacgtggacgaagactgcctcaggattccttcaaccaaaagagtctgtctcgttggaaaatccagaacatacccttcctccagagaagcttccgtggatgaaaagaggactcagtacattaagagcaggcggggctgccctgtaagcccacctggctgggagctttccccttctccacgctgggttgctgctggcagtgctggtcactgtgacggtcagcaagctctggacgccagggtcgggtgtgtaaccagggcctgggccgctgagcatggagcagggccccaggctgaaggaccctggctacctggatttcatcccagagaaaaggctgagcgtgtgaggaactgtgccgccctgccacgagattttattgaccaagtggttttgcaagtagcgaatttactgttaggtggaaagcaattaaacacaagaagttctcgaaatgggagtttgaagacctggaatgggggagagagcctatctctggcagaagtagccaacgagctggacacggagaccctgcggaggctgaagcgggagtgtgggggcctgcagacgctgctccggaacagccaccaggtgttccaaggttgtgaatgggagagttcacatccgcgactggcgagaggagacactgtggaagacaaagcaaccggaagcgaaacagagactgctctctgaagcctgcaaaacccgcctctgctggttcttcatgcatcaccctgatggctgcgctctgtccacggactgctgcccgtttgcccatgggcctgcggagctgcggccaccccggaccaccccgaggaagaagatttcatgagctgcatccttgccagccgaggcctggttggggaggccaaaccaaggagagcttccccagcagtcgtcagtgctgtggtctctgctctggctgtgtttcagcccacctcctcccagctttctccacatcctcacagtgatgaaccgtatttcataaacatcacacgccagagaagccacagttactcggaagcccccagctgactgcctggcttgtttcagatgcagccgcttgaaacgtgcgcagcatcttcatatcataaagattgtgcacggatccttacaatgtctcctgggggagagcggctgaggctgccttgcacaggcccttcccagggcgctgtccgacgcctgccccaccatgtccacatctgtgaagaggatggggctcctcgagaagtaagaccgtatctgccagcgtttctcaccacactggagagcagctgctctggagcagggatccaccagattggtatttttaaaaaaggtgtcaggcttgctatgttgaggttgtttttagagttacagagaataaaaacactcataatttcctgacatgggccactctaagtggcatgaaaaaaaaatcctaagtgaattgttgacagggctttaaaaatgtaaatatcacagatgacaaaggtaagacctacaccttcctccctcctccatgagaccctctccccagaaatactgcagcagtcctttttagtccttccagaaaaaaaaatcctgatttgtttctcttttatttttatgaagtgatagggtcttgatctctcgcccaggctggagtgcagtggcaagatcatagctcactgcagctttgaactcctgggctcaagccatccttctgcctcagcctgtcaagtgactgggactgtagatgcacgccaccatgcctggccaagattttactcatcgggggtcctctagaacgccgcgc

SEQ ID NO: 50379 - DNA, 1298 bp, Homo sapiens
agcacagatgttttctcgtgtttcggctctcacaccgtggtccctccttcctccactcaagtgatccttctaaaatggtggctctgcaggacctgcctctcagccagagggaaggtcggtggcctcaatgatgaggccacaagggacccagctctgtcctctgccctcccctctggctgtccctcgaatgtggccagtcctggtgcagtctgtcctgggacactcgggtttgctgctgctttgcctaaaatgctcttcctgggtctgcgcagggctgccgctcacttcccgcagggctcaccttccccggccttgcctgaagacacatcccatacctcagtcactcccactggaggcagactcactgtgaccagcaggaactctaggctgtgttccggttgtatccctgaccctggattggcacctcccgtggcgtgggagctaaagagaggctggtgaattaaggaactttcaggtttacttctcagtgtgtcttctctgttccaaaccacagttgtgaatgggagagttcacatccgcgactggcgagaggagacactgtggaagacaaagcaaccggaagcgaaacagagactgctctctgaagcctgcaaaacccgcctctgctggttcttcatgcatcaccctgatggctgcgctctgtccacggactgctgcccgtttgcccatgggcctgcggagctgcggccaccccggaccaccccgaggaagaagatttcatgagctgcatccttgccagccgaggcctggttggggaggccaaaccaaggagagcttccccagcagtcgtcagtgctgtggtctctgctctggctgtgtttcagcccacctcctcccagctttctccacatcctcacagtgatgaaccgtatttcataaacatcacacgccagagaagccacagttactcggaagcccccagctgactgcctggcttgtttcagatgcagccgcttgaaacgtgcgcagcatcttcatatcataaagattgtgcacggatccttacaatgtctcctgggggagagcggctgaggctgccttgcacaggcccttcccagggcgctgtccgacgcctgccccaccatgtccacatctgtgaagaggatggggctcctcgagaagtaagaccgtatctgccagcgtttctcaccacactggagagcagctgctctggagcagggatccaccagattggtatttttaaaaaaggtgtcaggcttgctatgttgaggttgtttttagagttacagagaataaaaacactcataatttcctga

SEQ ID NO: 50380 - DNA, 846 bp, Homo sapiens
acagtcagctcggtacccctcctcagcagacgcagttccggaacagccaccaggtgatccagttgtgaatgggagagttcacatccgcgactggcgagaggagacactgtggaagacaaagcaaccggaagcgaaacagagactgctctctgaagcctgcaaaacccgcctctgctggttcttcatgcatcaccctgatggctgcgctctgtccacggactgctgcccgtttgcccatgggcctgcggagctgcggccaccccggaccaccccgaggaagaagatttcatgagctgcatccttgccagccgaggcctggttggggaggccaaaccaaggagagcttccccagcagtcgtcagtgctgtggtctctgctctggctgtgtttcagcccacctcctcccagctttctccacatcctcacagtgatgaaccgtatttcataaacatcacacgccagagaagccacagttactcggaagcccccagctgactgcctggcttgtttcagatgcagccgcttgaaacgtgcgcagcatcttcatatcataaagattgtgcacggatccttacaatgtctcctgggggagagcggctgaggctgccttgcacaggcccttcccagggcgctgtccgacgcctgccccaccatgtccacatctgtgaagaggatggggctcctcgagaagtaagaccgtatctgccagcgtttctcaccacactggagagcagctgctctggagcagggatccaccagattggtatttttaaaaaaggtgtcaggcttgctatgttgaggttgtttttagagttacagagaataaaaacactcataatttcctga

SEQ ID NO: 50381 - DNA, 2546 bp, Homo sapiens
ggagcgccgccctgccctgcgcggaggcccgcggccccgggactagcgcaggctcggagcagaaggagcggggtccgggacccggccagggttcccccggagggggcccgggtcccaggtcgctatcaggacccgagcagggcacggcatgttgcgaacttgaggaggcccagggccagtgccagcaagaggaggcacagagggaagccgcctcagtgcccctgagggactccgggcaccccggccatgctgaaggaagggagggcgacttccccgccgcagatctggattcgctttgggaggatttctcccaaagtctcgcccgtggcaattcggagttgctggccttcctcaccagctccggggcgggatcgcagccagaggcgcagcgtgagctcgacgtggttctcagaaccgtcatcccgaaaactagcccacattgcccccttacaactcccaggagggaaatagtcgtgcaagaaagatggcattcagatggaatcgtgtatcccaaacccacgtggcttggagaagagttgctggccaagttggccaagtggtctgtagagaacaagaagagtgactttaaaagcaccctttccctcatctccattatgaagtatagcaaggcttaccaggaacttaaagagaagtataaggaaatggttaaggtgtggcctgaagtcactgatcctgagaagttcgtgtatgaagatgtggctatcgcagcatacctgctgattctatgggaagaagaaagggctgagaggggactaactgccaggcagtcctttgtggacctgggatgtggaaatggcctcctggtccacatcctgagcagtgaggggcatccaggcagagggattgatgtccgaagaagaaaaatctgggacatgtatggaccacaaactcagttagaggaagatgcaatcacacccaatgataagacccttttccctgatgttgattggttaatcggtaaccattctgatgaactcacaccatggatacctgtcattgcagccaggtcttcctacaattgccgcttctttgtcctcccctgctgcttctttgacttcattggaagatactcccggaggcagagtaagaagactcagtaccgggaataccttgacttcattaaagaagtgggcttcacctgtgggtttcacgtggacgaagactgcctcaggattccttcaaccaaaagagtctgtctcgttggaaaatccagaacatacccttcctccagagaagcttccgtggatgaaaagaggactcagtacattaagagcaggcggggctgccctgtaagcccacctggctgggagctttccccttctccacgctgggttgctgctggcagtgctggtcactgtgacggtcagcaagctctggacgccagggtcgggtgtgtaaccagggcctgggccgctgagcatggagcagggccccaggctgaaggaccctggctacctggatttcatcccagagaaaaggctgagcgtgtgaggaactgtgccgccctgccacgagattttattgaccaagtggttttgcaagtagcgaatttactgttaggtggaaagcaattaaacacaagaagttctcgaaatgggagtttgaagacctggaatgggggagagagcctatctctggcagaagtagccaacgagctggacacggagaccctgcggaggctgaagcgggagtgtgggggcctgcagacgctgctccggaacagccaccaggtgttccaaggttgtgaatgggagagttcacatccgcgactggcgagaggagacactgtggaagacaaagcaaccggaagcgaaacagagactgctctctgaagcctgcaaaacccgcctctgctggttcttcatgcatcaccctgatggctgcgctctgtccacggactgctgcccgtttgcccatgggcctgcggagctgcggccaccccggaccaccccgaggaagaagatttcatgagctgcatccttgccagccgaggcctggttggggaggccaaaccaaggagagcttccccagcagtcgtcagtgctgtggtctctgctctggctgtgtttcagcccacctcctcccagctttctccacatcctcacagtgatgaaccgtatttcataaacatcacacgccagagaagccacagttactcggaagcccccagctgactgcctggcttgtttcagatgcagccgcttgaaacgtgcgcagcatcttcatatcataaagattgtgcacggatccttacaatgtctcctgggggagagcggctgaggctgccttgcacaggcccttcccagggcgctgtccgacgcctgccccaccatgtccacatctgtgaagaggatggggctcctcgagaagtaagaccgtatctgccagcgtttctcaccacactggagagcagctgctctggagcagggatccaccagattggtatttttaaaaaaggtgtcaggcttgctatgttgaggttgtttttagagttacagagaataaaaacactcataatttcctga

SEQ ID NO: 50382 - DNA, 1071 bp, Homo sapiens
ctgcactcatggcagagcaggcctttcctccttgaacatgtagacaagtctcagagaggtcagtgcgccggcccgatgtctcccagtgagtggagaggccacgccacagtccgggccaggtctgacccagcactggcacccctgagcctatggcatcatccgaggactgtaatcctcaacccgttcctcagagcaacttggtgaaagggagtgtctgtctgctgtcagaagcagtggtggagatggcggctcctgtgctgaggtagagtcccaggggatgcgcacggttgtgaatgggagagttcacatccgcgactggcgagaggagacactgtggaagacaaagcaaccggaagcgaaacagagactgctctctgaagcctgcaaaacccgcctctgctggttcttcatgcatcaccctgatggctgcgctctgtccacggactgctgcccgtttgcccatgggcctgcggagctgcggccaccccggaccaccccgaggaagaagatttcatgagctgcatccttgccagccgaggcctggttggggaggccaaaccaaggagagcttccccagcagtcgtcagtgctgtggtctctgctctggctgtgtttcagcccacctcctcccagctttctccacatcctcacagtgatgaaccgtatttcataaacatcacacgccagagaagccacagttactcggaagcccccagctgactgcctggcttgtttcagatgcagccgcttgaaacgtgcgcagcatcttcatatcataaagattgtgcacggatccttacaatgtctcctgggggagagcggctgaggctgccttgcacaggcccttcccagggcgctgtccgacgcctgccccaccatgtccacatctgtgaagaggatggggctcctcgagaagtaagaccgtatctgccagcgtttctcaccacactggagagcagctgctctggagcagggatccaccagattggtatttttaaaaaaggtgtcaggcttgctatgttgaggttgtttttagagttacagagaataaaaacactcataatttcctga

SEQ ID NO: 50383 - DNA, 2253 bp, Homo sapiens
ggagcgccgccctgccctgcgcggaggcccgcggccccgggactagcgcaggctcggagcagaaggagcggggtccgggacccggccagggttcccccggagggggcccgggtcccaggtcgctatcaggacccgagcagggcacggcatgttgcgaacttgaggaggcccagggccagtgccagcaagaggaggcacagagggaagccgcctcagtgcccctgagggactccgggcaccccggccatgctgaaggaagggagggcgacttccccgccgcagatctggattcgctttgggaggatttctcccaaagtctcgcccgtggcaattcggagttgctggccttcctcaccagctccggggcgggatcgcagccagaggcgcagcgtgagctcgacgtggttctcagaaccgtcatcccgaaaactagcccacattgcccccttacaactcccaggagggaaatagtcgtgcaagatgtcctcaatggaaccataacgtttttgcctttggaagaagatgatgaggggaacctaaaggttaagatgagcaatgtgtatcaaattcagctcagtcatagcaaagaagaatggttcatatctgttttaattttctgtccagaaagatggcattcagatggaatcgtgtatcccaaacccacgtggcttggagaagagttgctggccaagttggccaagtggtctgtagagaacaagaagagtgactttaaaagcaccctttccctcatctccattatgaagtatagcaaggcttaccaggaacttaaagagaagtataaggaaatggttaaggtgtggcctgaagtcactgatcctgagaagttcgtgtatgaagatgtggctatcgcagcatacctgctgattctatgggaagaagaaagggctgagaggggactaactgccaggcagtcctttgtggacctgggatgtggaaatggcctcctggtccacatcctgagcagtgaggggcatccaggcagagggattgatgtccgaagaagaaaaatctgggacatgtatggaccacaaactcagttagaggaagatgcaatcacacccaatgataagacccttttccctgatgttgattggttaatcggtaaccattctgatgaactcacaccatggatacctgtcattgcagccaggtcttcctacaattgccgcttctttgtcctcccctgctgcttctttgacttcattggaagatactcccggaggcagagtaagaagactcagtaccgggaataccttgacttcattaaagaagtgggcttcacctgtgggtttcacgtggacgaagactgcctcaggattccttcaaccaaaagagtctgtctcgttggaaaatccagaacatacccttcctccagagaagcttccgtggatgaaaagaggactcagtacattaagagcaggcggggctgccctgtaagcccacctggctgggagctttccccttctccacgctgggttgctgctggcagtgctggtcactgtgacggtcagcaagctctggacgccagggtcgggtgtgtaaccagggcctgggccgctgagcatggagcagggccccaggctgaaggaccctggctacctggatttcatcccagagaaaaggctgagcgtgtgaggaactgtgccgccctgccacgagattttattgaccaagtggttttgcaagtagcgaatttactgttaggtggaaagcaattaaacacaagaagttctcgaaatgggagtttgaagacctggaatgggggaggtaagctgtccaccatcttagggaggggctagcacgctcccaggcttgagggcaggaattcacgtcttcagaaccgacatgaaatggtgtggccctgtgactacacactttgaaaaagccattgatggtgggtgcataggctctcttcaagcaaattctttaaaattttccaaatagctcttataaacataaaggactttgttatttccagggagtgacagagtttggacccttaattaacttttaccaaacatgcaggtttaggggctagaactactcattttcaatctagaaattatccaaagagaaaacaggttactgagtgcaagcaaaatgcactgtccccttgagtatgtggtaagatttggagctgttgtgattcgataatttaattctctttgaaatccccaaaacacaacaatcatccatggcaaaaggagaaaattacatcgattgttctcatgg

SEQ ID NO: 50384 - DNA, 4340 bp, Homo sapiens
gcgggcgggcatctctgccgaaaacacctacagcgcccgctccctcggtccttcgagcagtgatccctccgcggccaacctccccagggaaaccagcgattcgcggttcagatagcgaccttcgcccgcaggttcctgctctgccttcagacttcggcttcagtggcacctgctcagcgaggcctcgtctaaccaagccatccgaattaactacccactcactcgccatcacatcaccccgatttaattcgcagcggggcactgactttacactcgtgtgtcttctgtgtttatttatggtctgtttctggaatgtccgctcctgggactgggaccatgattttctggcgcagtgcgggtgtctcggcgtccgggatcgggcgggtcgcagtagggctccacatttgttgagtgactgaacaccgttcccggccggggagagcgccgcagccgggtccacttcaggtaggggctgggctttcccggccccgcctaggccccgcccccagcgcgaacccgctcccacctcgcctgtccgcggagcagcagggggtttgactgtgcttttccctcttgcttccctcgctctttctgcagctgccacgaaaacccggaacggcggagcggcgccgcccctcgcggcacctccctggcagcccttggaggccgcgctgggcatgctcagtcagctgggccgcctcagctctcggagtaggaagctcgggcgctccggctgtaaggagccgcggcggggggaaaatggagcccttcaccaatgatcggcttcagctccccaggaatatgattgaaaacagcatgtttgaggaagaaccagatgtggtggatttagccaaagagccttgtttacatcctctagagcctgatgaggtggaatatgagccccggggttcccgactgctggtgcggggtcttggtgagcatgagatggaggaggatgaagaggattatgagtcatcagcaaagctgctgggcatgtccttcatgaatagaagctcaggccttcggaacagtgcaactggttacaggcagagcccagatggggcttgttcagtaccctctgcaaggaccatggtggtctgtgcttttgtcatcgtggttgctgtttctgtaatcatggtgatttacttactgcccagatgtacctttaccaaagaaggctgccataaaaaaaaccagtcaattggactaattcagccatttgcaacaaatgggaaattgtttccatgggcacagatcaggcttcccactgccgttgtgccactacgctatgaactcagcctacacccgaacctaacctcgatgacattcaggggttctgtgacaatttcagttcaggctcttcaggtcacatggaatatcattcttcatagcacaggtcataatatttcaagagtgacctttatgtcagcagtttcaagccaagaaaaacaagctgagatcctggaatatgcatatcatggacagatcgccattgttgcccccgaagcccttctagcagggcacaattatacgttgaagatagagtactcggcaaatatatctagttcttattatgggttttatggcttctcctacacagatgaaagtaatgagaaaaagtactttgcagcaactcagtttgaacccctggcagcaagatctgcttttccttgttttgatgaaccagcatttaaagccacttttatcatcaagatcataagggatgagcaatacaccgctttatcaaatatgcctaagaagtcatcagtcgttctagatgatggacttgttcaggatgagttttctgagagtgtgaagatgagcacttacttggttgctttcattgtgggagagatgaagaacctgagtcaggacgtaaatggaaccctggtttctatatatgctgtaccagaaaatattggtcaagttcattatgccttggaaacaactgtgaagcttcttgagttttttcaaaactactttgaaattcagtacccacttaagaaattggatttggtggctattcctgactttgaagcaggagcaatggaaaattggggtttgctcaccttccgagaggagacacttctgtatgacagtaacacttcttcaatggcggatagaaagctggtgactaaaatcattgctcatgagctggcccaccagtggtttggcaatctggtaacaatgaagtggtggaatgacctatggctaaatgaaggttttgccactttcatggagtatttctctttggaaaaaatattcaaagagctttctagttatgaagatttcttagatgctcgatttaaaaccatgaagaaagattccttaaattcatctcatccaatatcatcatctgttcagtcttcagaacaaattgaagaaatgtttgattctctttcctattttaagggatcttctctcttgttgatgttgaaaacttaccttagtgaagatgtgtttcaacatgctgttgtcctttacctgcataatcacagctatgcatctattcaaagtgatgatctgtgggatagttttaatgaggtcacaaaccaaacactagatgtaaagagaatgatgaaaacctggaccctgcagaaaggatttcctttagtgactgttcaaaagaaaggaaaggaactttttatacaacaagagagattctttttaaatatgaagcctgaaattcagccttcagatacaagctacctgtggcatattccactatcctatgtcactgaaggaagaaattattcaaaatatcaatcggtatcattactggataagaaatcaggtgtcatcaatcttacagaagaagtgctgtgggtcaaagtgaatataaacatgaatggttattatattgtacactatgcagatgatgattgggaagcactaatccatcagttgaaaataaatccttatgttctgagtgacaaagaccgagccaaccttatcaacaacatctttgaacttgcaggcctaggcaaggtacctctcaagagggcctttgatttgattaattatcttggaaatgagaaccatactgcacccatcaccgaagccctgtttcagacagacctcatctataacctccttgaaaaactgggatacatggatctggcctcaagactggtgactagggtatttaaattacttcaaaaccaaattcaacaacaaacttggactgatgagggcactccatctatgcgagagcttcggtcagccctgctagagtttgcttgcacccacaacctggggaactgctctactactgccatgaaactgtttgatgactggatggcatccaatggaactcaaagcctacctactgatgtcatgacaactgtgttcaaagttggagcaaaaactgacaaaggctggtcattccttttgggcaaatacatttctataggctctgaagcagagaagaacaaaatactagaagcacttgccagctcagaggatgtgcggaagctttactggttaatgaaaagtagcctgaatggagataacttccgaacacagaagctgtcttttatcattagaacagtgggtcgacattttcctggacacttactggcatgggattttgtcaaagagaactggaataagcttgtacagaagttccctctggggtcctataccatacaaaatattgttgctggatcaacttacctgttttcaacaaagacacatttatctgaggttcaggcattctttgaaaatcagtcagaggcaaccttccggcttcgttgtgtccaggaggctttggaagtcattcagttgaatatccagtggatggagaagaacctcaaaagtctcacatggtggctgtagcatgcacaaccgcacctcattttgttgcccattcagagagcttgtaagcttgggctctgccgcttttgcaaaagccaaggtaaagccaggatcgctgccaagttgtttgcactctttggagttctagttagctcagggcctgactgtatttttcatccatcttttctgaagtgtctttgggcagtatgtagttatttattacaaaattatattcacctaaatgccaaccatctacaaaaacaatgagtaatttttctactttgaagatacacagatggggacaaaaaccctgttttggaattctgttctattcctcagtatccagaaagttactgacacagtaaaacaaggaaagttctaccctaagagccgccatcacttcaggccgctggtttgtcagccatctgttgcttcttattgatagatggcattggaatgtggtacaaagttagctctgaagaatatggtaacgaagacaataaagcatgcactgtaagaactga

SEQ ID NO: 50385 - DNA, 397 bp, Homo sapiens
gtacagataaattaaaatgtaaaattttttaaaccaatttttatttttaaggaaaaagttttatatatatatatatatattttgtaggtcacaaaccaaacactagatgtaaagagaatgatgaaaacctggaccctgcagaaaggatttcctttagtgactgttcaaaagaaaggaaaggaactttttatacaacaagagagattctttttaaatatgaagcctgaaattcagccttcagatacaaggtacatgccctctttcttttcatgccatctcttttgcactctcaggtggaaatatttttaagtgttttataatcataagttcttgtgaaacctaacaagattatcccttcctaggaatagcttaaccttcctaccaaattaaaaaaaaa

SEQ ID NO: 50386 - DNA, 481 bp, Homo sapiens
gggcctctgaagccagagaagacaccaaaattactagaagccacttgccagcctcagaggatgtgccggaaaaggccttttttaaacttgggtttaattggaaaaattcccaaccatgaaatcaccgaggaatatgatatacagaaaccaaaagaatacaaacactgtgctcttggtcaggagctcatttttgaggggatctcttttccccacttctgttacaggccaggcctaagttggacagtgtggtgaggagactacaggtgctgggctttatctttatggacaagcagaaaatcctttgcccaaaagggattacaagatgtcaggagtcacagccccctcctactccttgctcaaaaagtcttcctccccttggaatgttgtcttatacaccacaattggtactccatagtttaggaccaaggcattgctttgtgcaagctgtcattttaaaaatgtaggcatttcagaaaaaaaa

SEQ ID NO: 50387 - DNA, 8712 bp, Homo sapiens
gcgggcgggcatctctgccgaaaacacctacagcgcccgctccctcggtccttcgagcagtgatccctccgcggccaacctccccagggaaaccagcgattcgcggttcagatagcgaccttcgcccgcaggttcctgctctgccttcagacttcggcttcagtggcacctgctcagcgaggcctcgtctaaccaagccatccgaattaactacccactcactcgccatcacatcaccccgatttaattcgcagcggggcactgactttacactcgtgtgtcttctgtgtttatttatggtctgtttctggaatgtccgctcctgggactgggaccatgattttctggcgcagtgcgggtgtctcggcgtccgggatcgggcgggtcgcagtagggctccacatttgttgagtgactgaacaccgttcccggccggggagagcgccgcagccgggtccacttcaggtaggggctgggctttcccggccccgcctaggccccgcccccagcgcgaacccgctcccacctcgcctgtccgcggagcagcagggggtttgactgtgcttttccctcttgcttccctcgctctttctgcagctgccacgaaaacccggaacggcggagcggcgccgcccctcgcggcacctccctggcagcccttggaggccgcgctgggcatgctcagtcagctgggccgcctcagctctcggagtaggaagctcgggcgctccggctgtaaggagccgcggcggggggaaaatggagcccttcaccaatgatcggcttcagctccccaggaatatgattgaaaacagcatgtttgaggaagaaccagatgtggtggatttagccaaagagccttgtttacatcctctagagcctgatgaggtggaatatgagccccggggttcccgactgctggtgcggggtcttggtgagcatgagatggaggaggatgaagaggattatgagtcatcagcaaagctgctgggcatgtccttcatgaatagaagctcaggccttcggaacagtgcaactggttacaggcagagcccagatggggcttgttcagtaccctctgcaaggaccatggtggtctgtgcttttgtcatcgtggttgctgtttctgtaatcatggtgatttacttactgcccagatgtacctttaccaaagaaggctgccataaaaaaaaccagtcaattggactaattcagccatttgcaacaaatgggaaattgtttccatgggcacagatcaggcttcccactgccgttgtgccactacgctatgaactcagcctacacccgaacctaacctcgatgacattcaggggttctgtgacaatttcagttcaggctcttcaggtcacatggaatatcattcttcatagcacaggtcataatatttcaagagtgacctttatgtcagcagtttcaagccaagaaaaacaagctgagatcctggaatatgcatatcatggacagatcgccattgttgcccccgaagcccttctagcagggcacaattatacgttgaagatagagtactcggcaaatatatctagttcttattatgggttttatggcttctcctacacagatgaaagtaatgagaaaaagtactttgcagcaactcagtttgaacccctggcagcaagatctgcttttccttgttttgatgaaccagcatttaaagccacttttatcatcaagatcataagggatgagcaatacaccgctttatcaaatatgcctaagaagtcatcagtcgttctagatgatggacttgttcaggatgagttttctgagagtgtgaagatgagcacttacttggttgctttcattgtgggagagatgaagaacctgagtcaggacgtaaatggaaccctggtttctatatatgctgtaccagaaaatattggtcaagttcattatgccttggaaacaactgtgaagcttcttgagttttttcaaaactactttgaaattcagtacccacttaagaaattggatttggtggctattcctgactttgaagcaggagcaatggaaaattggggtttgctcaccttccgagaggagacacttctgtatgacagtaacacttcttcaatggcggatagaaagctggtgactaaaatcattgctcatgagctggcccaccagtggtttggcaatctggtaacaatgaagtggtggaatgacctatggctaaatgaaggttttgccactttcatggagtatttctctttggaaaaaatattcaaagagctttctagttatgaagatttcttagatgctcgatttaaaaccatgaagaaagattccttaaattcatctcatccaatatcatcatctgttcagtcttcagaacaaattgaagaaatgtttgattctctttcctattttaagggatcttctctcttgttgatgttgaaaacttaccttagtgaagatgtgtttcaacatgctgttgtcctttacctgcataatcacagctatgcatctattcaaagtgatgatctgtgggatagttttaatgaggtcacaaaccaaacactagatgtaaagagaatgatgaaaacctggaccctgcagaaaggatttcctttagtgactgttcaaaagaaaggaaaggaactttttatacaacaagagagattctttttaaatatgaagcctgaaattcagccttcagatacaagctacctgtggcatattccactatcctatgtcactgaaggaagaaattattcaaaatatcaatcggtatcattactggataagaaatcaggtgtcatcaatcttacagaagaagtgctgtgggtcaaagtgaatataaacatgaatggttattatattgtacactatgcagatgatgattgggaagcactaatccatcagttgaaaataaatccttatgttctgagtgacaaagaccgagccaaccttatcaacaacatctttgaacttgcaggcctaggcaaggtacctctcaagagggcctttgatttgattaattatcttggaaatgagaaccatactgcacccatcaccgaagccctgtttcagacagacctcatctataacctccttgaaaaactgggatacatggatctggcctcaagactggtgactagggtatttaaattacttcaaaaccaaattcaacaacaaacttggactgatgagggcactccatctatgcgagagcttcggtcagccctgctagagtttgcttgcacccacaacctggggaactgctctactactgccatgaaactgtttgatgactggatggcatccaatggaactcaaagcctacctactgatgtcatgacaactgtgttcaaagttggagcaaaaactgacaaaggctggtcattccttttgggcaaatacatttctataggctctgaagcagagaagaacaaaatactagaagcacttgccagctcagaggatgtgcggaagctttactggttaatgaaaagtagcctgaatggagataacttccgaacacagaagctgtcttttatcattagaacagtgggtcgacattttcctggacacttactggcatgggattttgtcaaagagaactggaataagcttgtacagaagttccctctggggtcctataccatacaaaatattgttgctggatcaacttacctgttttcaacaaagacacatttatctgaggttcaggcattctttgaaaatcagtcagaggcaaccttccggcttcgttgtgtccaggaggctttggaagtcattcagttgaatatccagtggatggagaagaacctcaaaagtctcacatggtggctgtagcatgcacaaccgcacctcattttgttgcccattcagagagcttgtaagcttgggctctgccgcttttgcaaaagccaaggtaaagccaggatcgctgccaagttgtttgcactctttggagttctagttagctcagggcctgactgtatttttcatccatcttttctgaagtgtctttgggcagtatgtagttatttattacaaaattatattcacctaaatgccaaccatctacaaaaacaatgagtaatttttctactttgaagatacacagatggggacaaaaaccctgttttggaattctgttctattcctcagtatccagaaagttactgacacagtaaaacaaggaaagttctaccctaagagccgccatcacttcaggccgctggtttgtcagccatctgttgcttcttattgatagatggcattggaatgtggtacaaagttagctctgaagaatatggtaacgaagacaataaagcatgcactgtaagaactgacctcaggtgtgcagatctactttgatttggggttttgattaattctttatttttctgaaaaaaagtttaaataatgtctgtaactattgtgtttttttcctgccgaatagccaggtgctacagatttttaaaatttttgttgtattgaaaagctaaacaaggccaaaaggttaaattttttgaatatttaagactttctttttcatcttttatagcgttaccataggaaactgttccaaactgagttagctttaattataattattttattcataaatggtgatagtccccagatctgtacacctttatcactccctgccgtagatatactttaggttagtatttctacattcgtggcaagcattttggtaacaccagtggttttcattgtgacttttatcactatcactaagaatgcaatttaagttgccttttggcatcatagatcatagaaactttctctctgaatcatacccatgtgtgaattttcattttatatgatagtgtagcatattagaagcatattttaaaacagagctttgaatttttttcactatcaaaaatagtgcttttgtttagttaaaaattgtagtttttctttttttgtgtgtccaaactaacataaaaggagtggtcaaagaaggaaagaagaaaaatgagggaggatgtccgaaactgtatggcattttactccttctgaaagagaaatactgtacttgaatttttgagctatgcagacttatacctagattgttgtgtttctttgattcttaggagaaaagctttcttcctaataattcttgagaactttatattttgtttgaaaacagtttctatgtacataaaaagggtatttacccatttgtgagcacttaaaacactccacagagtcagacagtgggaaaggtcaccctttttttattcggcaggtatcaagttagaatgtatggaattgtgaataaaattatattttattttatgaaaatatttttatataataaaatttaaaaggctggtaagctaaaaaaatagtcttctttaatcctagtgtgttttccccaatttagtcttttctaaaatttatctgttttagagtagaaaatattatatcctgagaatcacagaatcatctaaatatgtcttattcaactgaagtgattgtaagtctttattcttgtgctttggttaaatgaatgataatttagttgatagtgaaagttaatgtgtttttatatttttagagtgagggaaaaatactaaacttttgagagttttgttgtcgttgctggttttttaccatgtggtactaaattccactttgatacaaaatttaaattttgtaacttctcaaaatcacttaagattcttcagttttacctgtgcttcttgacatcgctcctataatgtatgttagttaactctgcatatggcaaatcttgtcttgaattatatcatttctctccctctctctctctctctgtgtgtgtgtgtgtgtgtgtgtgtgtgtgtgtgtgtgtgtagtgtggggggtattgttatgagtaaaactttatcaaaacttggcctgaaaaagagataactcatgatccattgctatctttattactcaaaggctgttcattcccataataccagatccataatagttgtagtttttttgatgttgttgcccttaccttaattatttgtagttttagtaggccttgcctcagtttttcccacagaattccataattttaatgttgaactaacccatctatataggacttctaaaaactacgtcaggaatgtaaggttaaatgagaggtagaacttgtagtgtaataggtataatggtagctttcaaagttttatcttctcaaaacattgtcttagccagtgtatttctgagaactcagactgaagcacagaagtcacagtatgcttcttttatttaagcacacagattcatgacacaagtacttgttgaacaagtgttctcattgcagagagatctacttgaatataaaagggtcatcatactagattattaaaaaagaattggaaatcttgagttgtggaagaaatgtttatgctttggagatctaaaaaagttatgaatgtaggaattagataagtccagtttgttctgttaatataaaatggttagatatattaaactgcaagtagtatcagcttcaccataagcttgggccttcctccatcttgttttatttaagtctctttaaatgaaattttgttgtcattgtttcagcattcatgaactttcttactatcacaggttctactttaattttccttgccatatgtgtttccattttgtgggacattagccaccacaggaacacaagagttgtcagaagactcctgggtgtacagagcaaatcaagctgcatcagtattataggataccaaacagaatcctttctattaggaaataagaaatcagttaagtgttggctgggcgcggtggcttatgcctgtaatcccagcattttgggatgccaaggtgggcagaccatttgaggccaggagttctaaaccagtttggccaacatggcaaaaccccatctctactaaaaatataaaaattagctgggcatggtggtgcacacctgtaatcccagctacctgggaggcacgagaatcacttgaacccaggaggcggaggttgcagtgagccaaggttgtgccactgcactccagcctgggtgacaaagcgagactgtctcaaaaaacaaaaaacaaaaaaaaaagagttaagtgttgattttgttggattactgacagtttgttgagatggattttaaaaagagtctatttaaaccaaagtacctggaaccataatctgccatcagattgctaaacattcacataatccccatgtttcatggggcttcagggaaggcaaatacatctgagatgagccacctccaaggacagcatttcctgggctgcaaaactagatgtggattttgttacttaggcctctctaaaaactgaggccatggatatgacatagcttttcttctcacctatgcctttgttacttttgtatttattggaattaaatctctttttaaagagcttccttcccccttcatcccatttgtatttttaaaaactaagttatatatatatttgcttgtttttgcattcttttattttgtgctccattccctgctttgccagttaagtactacctgaaaagtagcggttcaaaagtatggtaaatctcctcccttaaccttattgcctgtgtgggtgacagctaatggaaaagttgatcgatttttttcagtggtttttttgggagtatatactttaaaaatgtacatacatgtttttgatagtttttatattatttcattttgtatatttttttcctgatgaagagtgatatatcatcctatgaaaatttcatctacccttcccattttacctgtatgggcagtagctacagactagttatttggtttccttctttggaagaaggtggtgatgttgagaggagagcaagctatattcttttaaaagtgtgtacagatgtttttgctattttgtgttatttcattttgtatttcattcatccattttgtggacgtgtagataaaacgcggtggtccaaaagcatgacagatgtcccctttgcgtttctccttattgttcgcatggacaataactgacagagtagtcctagttgctgttgttttgatctagtcttggggctggggttgtatattattctttcaagtgtgtataaatattgtgccacctttttatacttcattttatacttgtttccttgtatggatgcatatatacttaatgaaaattgaggttcagagtatgacaaatctcttttcccttttccttactgcctatttaggcaatagctaatagagtagtttgttttgttttggggtgtgggggagagtggagtatgtacttaatgtatataaataaacttgctactacattgtattactaatttggttcacactgtgtccttctcatggatgtgaaagtaccaatgaaatgtggagatctcgatgtataacagtctcccattctcctcatcccttattgactgctgggcagtagctaacagagtagttgtcaagtggcgtatttgaggtgagggggagggacggggaaggtaggaaaatgcacttaatgtatatacatgtttttactactacattgtattaattcatcgggtgcccagactgaaaggtacctaatgaaccatggagttccggatgtataacagtctcctcttttccctttcccttattgcccatgtgggcaatacttaagagtagtttgggtttattgaagattttttgctaggagagagaaaattttttgc

SEQ ID NO: 50388 - DNA, 8818 bp, Homo sapiens
gcgggcgggcatctctgccgaaaacacctacagcgcccgctccctcggtccttcgagcagtgatccctccgcggccaacctccccagggaaaccagcgattcgcggttcagatagcgaccttcgcccgcaggttcctgctctgccttcagacttcggcttcagtggcacctgctcagcgaggcctcgtctaaccaagccatccgaattaactacccactcactcgccatcacatcaccccgatttaattcgcagcggggcactgactttacactcgtgtgtcttctgtgtttatttatggtctgtttctggaatgtccgctcctgggactgggaccatgattttctggcgcagtgcgggtgtctcggcgtccgggatcgggcgggtcgcagtagggctccacatttgttgagtgactgaacaccgttcccggccggggagagcgccgcagccgggtccacttcaggtaggggctgggctttcccggccccgcctaggccccgcccccagcgcgaacccgctcccacctcgcctgtccgcggagcagcagggggtttgactgtgcttttccctcttgcttccctcgctctttctgcagctgccacgaaaacccggaacggcggagcggcgccgcccctcgcggcacctccctggcagcccttggaggccgcgctgggcatgctcagtcagctgggccgcctcagctctcggagtaggaagctcgggcgctccggctgtaaggagccgcggcggggggaaaatggagcccttcaccaatgatcggcttcagctccccaggaatatgattgaaaacagcatgtttgaggaagaaccagatgtggtggatttagccaaagagccttgtttacatcctctagagcctgatgaggtggaatatgagccccggggttcccgactgctggtgcggggtcttggtgagcatgagatggaggaggatgaagaggattatgagtcatcagcaaagctgctgggcatgtccttcatgaatagaagctcaggccttcggaacagtgcaactggttacaggcagagcccagatggggcttgttcagtaccctctgcaaggaccatggtggtctgtgcttttgtcatcgtggttgctgtttctgtaatcatggtgatttacttactgcccagatgtacctttaccaaagaaggctgccataaaaaaaaccagtcaattggactaattcagccatttgcaacaaatgggaaattgtttccatgggcacagatcaggcttcccactgccgttgtgccactacgctatgaactcagcctacacccgaacctaacctcgatgacattcaggggttctgtgacaatttcagttcaggctcttcaggtcacatggaatatcattcttcatagcacaggtcataatatttcaagagtgacctttatgtcagcagtttcaagccaagaaaaacaagctgagatcctggaatatgcatatcatggacagatcgccattgttgcccccgaagcccttctagcagggcacaattatacgttgaagatagagtactcggcaaatatatctagttcttattatgggttttatggcttctcctacacagatgaaagtaatgagaaaaagtactttgcagcaactcagtttgaacccctggcagcaagatctgcttttccttgttttgatgaaccagcatttaaagccacttttatcatcaagatcataagggatgagcaatacaccgctttatcaaatatgcctaagaagtcatcagtcgttctagatgatggacttgttcaggatgagttttctgagagtgtgaagatgagcacttacttggttgctttcattgtgggagagatgaagaacctgagtcaggacgtaaatggaaccctggtttctatatatgctgtaccagaaaatattggtcaagttcattatgccttggaaacaactgtgaagcttcttgagttttttcaaaactactttgaaattcagtacccacttaagaaattggatttggtggctattcctgactttgaagcaggagcaatggaaaattggggtttgctcaccttccgagaggagacacttctgtatgacagtaacacttcttcaatggcggatagaaagctggtgactaaaatcattgctcatgagctggcccaccagtggtttggcaatctggtaacaatgaagtggtggaatgacctatggctaaatgaaggttttgccactttcatggagtatttctctttggaaaaaatattcaaagagctttctagttatgaagatttcttagatgctcgatttaaaaccatgaagaaagattccttaaattcatctcatccaatatcatcatctgttcagtcttcagaacaaattgaagaaatgtttgattctctttcctattttaagggatcttctctcttgttgatgttgaaaacttaccttagtgaagatgtgtttcaacatgctgttgtcctttacctgcataatcacagctatgcatctattcaaagtgatgatctgtgggatagttttaatgaggtcacaaaccaaacactagatgtaaagagaatgatgaaaacctggaccctgcagaaaggatttcctttagtgactgttcaaaagaaaggaaaggaactttttatacaacaagagagattctttttaaatatgaagcctgaaattcagccttcagatacaagctacctgtggcatattccactatcctatgtcactgaaggaagaaattattcaaaatatcaatcggtatcattactggataagaaatcaggtgtcatcaatcttacagaagaagtgctgtgggtcaaagtgaatataaacatgaatggttattatattgtacactatgcagatgatgattgggaagcactaatccatcagttgaaaataaatccttatgttctgagtgacaaagaccgagccaaccttatcaacaacatctttgaacttgcaggcctaggcaaggtacctctcaagagggcctttgatttgattaattatcttggaaatgagaaccatactgcacccatcaccgaagccctgtttcagacagacctcatctataacctccttgaaaaactgggatacatggatctggcctcaagactggtgactagggtatttaaattacttcaaaaccaaattcaacaacaaacttggactgatgagggcactccatctatgcgagagcttcggtcagccctgctagagtttgcttgcacccacaacctggggaactgctctactactgccatgaaactgtttgatgactggatggcatccaatggaactcaaagcctacctactgatgtcatgacaactgtgttcaaagttggagcaaaaactgacaaaggctggtcattccttttgggcaaatacatttctataggctctgaagcagagaagaacaaaatactagaagcacttgccagctcagaggatgtgcggaagctttactggttaatgaaaagtagcctgaatggagataacttccgaacacagaagctgtcttttatcattagaacagtgggtcgacattttcctggacacttactggcatgggattttgtcaaagagaactggaataagcttgtacagaagttccctctggggtcctataccatacaaaatattgttgctggatcaacttacctgttttcaacaaagacacatttatctgaggttcaggcattctttgaaaatcagtcagaggcaaccttccggcttcgttgtgtccaggaggctttggaagtcattcagttgaatatccagtggatggagaagaacctcaaaagtctcacatggtggctgtagcatgcacaaccgcacctcattttgttgcccattcagagagcttgtaagcttgggctctgccgcttttgcaaaagccaaggtaaagccaggatcgctgccaagttgtttgcactctttggagttctagttagctcagggcctgactgtatttttcatccatcttttctgaagtgtctttgggcagtatgtagttatttattacaaaattatattcacctaaatgccaaccatctacaaaaacaatgagtaatttttctactttgaagatacacagatggggacaaaaaccctgttttggaattctgttctattcctcagtatccagaaagttactgacacagtaaaacaaggaaagttctaccctaagagccgccatcacttcaggccgctggtttgtcagccatctgttgcttcttattgatagatggcattggaatgtggtacaaagttagctctgaagaatatggtaacgaagacaataaagcatgcactgtaagaactgacctcaggtgtgcagatctactttgatttggggttttgattaattctttatttttctgaaaaaaagtttaaataatgtctgtaactattgtgtttttttcctgccgaatagccaggtgctacagatttttaaaatttttgttgtattgaaaagctaaacaaggccaaaaggttaaattttttgaatatttaagactttctttttcatcttttatagcgttaccataggaaactgttccaaactgagttagctttaattataattattttattcataaatggtgatagtccccagatctgtacacctttatcactccctgccgtagatatactttaggttagtatttctacattcgtggcaagcattttggtaacaccagtggttttcattgtgacttttatcactatcactaagaatgcaatttaagttgccttttggcatcatagatcatagaaactttctctctgaatcatacccatgtgtgaattttcattttatatgatagtgtagcatattagaagcatattttaaaacagagcctttgagaaattgaaaaacaattatttgaagttcaccatagtaccttaaaggaacaaagagaatgtgggataggagtaacttgaattcgtgtttagtatggtgggctttgaatttttttcactatcaaaaatagtgcttttgtttagttaaaaattgtagtttttctttttttgtgtgtccaaactaacataaaaggagtggtcaaagaaggaaagaagaaaaatgagggaggatgtccgaaactgtatggcattttactccttctgaaagagaaatactgtacttgaatttttgagctatgcagacttatacctagattgttgtgtttctttgattcttaggagaaaagctttcttcctaataattcttgagaactttatattttgtttgaaaacagtttctatgtacataaaaagggtatttacccatttgtgagcacttaaaacactccacagagtcagacagtgggaaaggtcaccctttttttattcggcaggtatcaagttagaatgtatggaattgtgaataaaattatattttattttatgaaaatatttttatataataaaatttaaaaggctggtaagctaaaaaaatagtcttctttaatcctagtgtgttttccccaatttagtcttttctaaaatttatctgttttagagtagaaaatattatatcctgagaatcacagaatcatctaaatatgtcttattcaactgaagtgattgtaagtctttattcttgtgctttggttaaatgaatgataatttagttgatagtgaaagttaatgtgtttttatatttttagagtgagggaaaaatactaaacttttgagagttttgttgtcgttgctggttttttaccatgtggtactaaattccactttgatacaaaatttaaattttgtaacttctcaaaatcacttaagattcttcagttttacctgtgcttcttgacatcgctcctataatgtatgttagttaactctgcatatggcaaatcttgtcttgaattatatcatttctctccctctctctctctctctgtgtgtgtgtgtgtgtgtgtgtgtgtgtgtgtgtgtgtgtagtgtggggggtattgttatgagtaaaactttatcaaaacttggcctgaaaaagagataactcatgatccattgctatctttattactcaaaggctgttcattcccataataccagatccataatagttgtagtttttttgatgttgttgcccttaccttaattatttgtagttttagtaggccttgcctcagtttttcccacagaattccataattttaatgttgaactaacccatctatataggacttctaaaaactacgtcaggaatgtaaggttaaatgagaggtagaacttgtagtgtaataggtataatggtagctttcaaagttttatcttctcaaaacattgtcttagccagtgtatttctgagaactcagactgaagcacagaagtcacagtatgcttcttttatttaagcacacagattcatgacacaagtacttgttgaacaagtgttctcattgcagagagatctacttgaatataaaagggtcatcatactagattattaaaaaagaattggaaatcttgagttgtggaagaaatgtttatgctttggagatctaaaaaagttatgaatgtaggaattagataagtccagtttgttctgttaatataaaatggttagatatattaaactgcaagtagtatcagcttcaccataagcttgggccttcctccatcttgttttatttaagtctctttaaatgaaattttgttgtcattgtttcagcattcatgaactttcttactatcacaggttctactttaattttccttgccatatgtgtttccattttgtgggacattagccaccacaggaacacaagagttgtcagaagactcctgggtgtacagagcaaatcaagctgcatcagtattataggataccaaacagaatcctttctattaggaaataagaaatcagttaagtgttggctgggcgcggtggcttatgcctgtaatcccagcattttgggatgccaaggtgggcagaccatttgaggccaggagttctaaaccagtttggccaacatggcaaaaccccatctctactaaaaatataaaaattagctgggcatggtggtgcacacctgtaatcccagctacctgggaggcacgagaatcacttgaacccaggaggcggaggttgcagtgagccaaggttgtgccactgcactccagcctgggtgacaaagcgagactgtctcaaaaaacaaaaaacaaaaaaaaaagagttaagtgttgattttgttggattactgacagtttgttgagatggattttaaaaagagtctatttaaaccaaagtacctggaaccataatctgccatcagattgctaaacattcacataatccccatgtttcatggggcttcagggaaggcaaatacatctgagatgagccacctccaaggacagcatttcctgggctgcaaaactagatgtggattttgttacttaggcctctctaaaaactgaggccatggatatgacatagcttttcttctcacctatgcctttgttacttttgtatttattggaattaaatctctttttaaagagcttccttcccccttcatcccatttgtatttttaaaaactaagttatatatatatttgcttgtttttgcattcttttattttgtgctccattccctgctttgccagttaagtactacctgaaaagtagcggttcaaaagtatggtaaatctcctcccttaaccttattgcctgtgtgggtgacagctaatggaaaagttgatcgatttttttcagtggtttttttgggagtatatactttaaaaatgtacatacatgtttttgatagtttttatattatttcattttgtatatttttttcctgatgaagagtgatatatcatcctatgaaaatttcatctacccttcccattttacctgtatgggcagtagctacagactagttatttggtttccttctttggaagaaggtggtgatgttgagaggagagcaagctatattcttttaaaagtgtgtacagatgtttttgctattttgtgttatttcattttgtatttcattcatccattttgtggacgtgtagataaaacgcggtggtccaaaagcatgacagatgtcccctttgcgtttctccttattgttcgcatggacaataactgacagagtagtcctagttgctgttgttttgatctagtcttggggctggggttgtatattattctttcaagtgtgtataaatattgtgccacctttttatacttcattttatacttgtttccttgtatggatgcatatatacttaatgaaaattgaggttcagagtatgacaaatctcttttcccttttccttactgcctatttaggcaatagctaatagagtagtttgttttgttttggggtgtgggggagagtggagtatgtacttaatgtatataaataaacttgctactacattgtattactaatttggttcacactgtgtccttctcatggatgtgaaagtaccaatgaaatgtggagatctcgatgtataacagtctcccattctcctcatcccttattgactgctgggcagtagctaacagagtagttgtcaagtggcgtatttgaggtgagggggagggacggggaaggtaggaaaatgcacttaatgtatatacatgtttttactactacattgtattaattcatcgggtgcccagactgaaaggtacctaatgaaccatggagttccggatgtataacagtctcctcttttccctttcccttattgcccatgtgggcaatacttaagagtagtttgggtttattgaagattttttgctaggagagagaaaattttttgc

SEQ ID NO: 50389 - DNA, 5260 bp, Homo sapiens
gggaggatggacacatctacattccgaagagaaaatcgccgtctagacaatctccttgtgttatctgccacacttgtgccaccctcggcagtgtcagaggattaagctacgttgcttttgcctgaactgcgccgatttggttggggcaagacagcaagcagtattgaaatggttccctctggggtcctataccatacaaaatattgttgctggatcaacttacctgttttcaacaaagacacatttatctgaggttcaggcattctttgaaaatcagtcagaggcaaccttccggcttcgttgtgtccaggaggctttggaagtcattcagttgaatatccagtggatggagaagaacctcaaaagtctcacatggtggctgtagcatgcacaaccgcacctcattttgttgcccattcagagagcttgtaagcttgggctctgccgcttttgcaaaagccaaggtaaagccaggatcgctgccaagttgtttgcactctttggagttctagttagctcagggcctgactgtatttttcatccatcttttctgaagtgtctttgggcagtatgtagttatttattacaaaattatattcacctaaatgccaaccatctacaaaaacaatgagtaatttttctactttgaagatacacagatggggacaaaaaccctgttttggaattctgttctattcctcagtatccagaaagttactgacacagtaaaacaaggaaagttctaccctaagagccgccatcacttcaggccgctggtttgtcagccatctgttgcttcttattgatagatggcattggaatgtggtacaaagttagctctgaagaatatggtaacgaagacaataaagcatgcactgtaagaactgacctcaggtgtgcagatctactttgatttggggttttgattaattctttatttttctgaaaaaaagtttaaataatgtctgtaactattgtgtttttttcctgccgaatagccaggtgctacagatttttaaaatttttgttgtattgaaaagctaaacaaggccaaaaggttaaattttttgaatatttaagactttctttttcatcttttatagcgttaccataggaaactgttccaaactgagttagctttaattataattattttattcataaatggtgatagtccccagatctgtacacctttatcactccctgccgtagatatactttaggttagtatttctacattcgtggcaagcattttggtaacaccagtggttttcattgtgacttttatcactatcactaagaatgcaatttaagttgccttttggcatcatagatcatagaaactttctctctgaatcatacccatgtgtgaattttcattttatatgatagtgtagcatattagaagcatattttaaaacagagctttgaatttttttcactatcaaaaatagtgcttttgtttagttaaaaattgtagtttttctttttttgtgtgtccaaactaacataaaaggagtggtcaaagaaggaaagaagaaaaatgagggaggatgtccgaaactgtatggcattttactccttctgaaagagaaatactgtacttgaatttttgagctatgcagacttatacctagattgttgtgtttctttgattcttaggagaaaagctttcttcctaataattcttgagaactttatattttgtttgaaaacagtttctatgtacataaaaagggtatttacccatttgtgagcacttaaaacactccacagagtcagacagtgggaaaggtcaccctttttttattcggcaggtatcaagttagaatgtatggaattgtgaataaaattatattttattttatgaaaatatttttatataataaaatttaaaaggctggtaagctaaaaaaatagtcttctttaatcctagtgtgttttccccaatttagtcttttctaaaatttatctgttttagagtagaaaatattatatcctgagaatcacagaatcatctaaatatgtcttattcaactgaagtgattgtaagtctttattcttgtgctttggttaaatgaatgataatttagttgatagtgaaagttaatgtgtttttatatttttagagtgagggaaaaatactaaacttttgagagttttgttgtcgttgctggttttttaccatgtggtactaaattccactttgatacaaaatttaaattttgtaacttctcaaaatcacttaagattcttcagttttacctgtgcttcttgacatcgctcctataatgtatgttagttaactctgcatatggcaaatcttgtcttgaattatatcatttctctccctctctctctctctctgtgtgtgtgtgtgtgtgtgtgtgtgtgtgtgtgtgtgtgtagtgtggggggtattgttatgagtaaaactttatcaaaacttggcctgaaaaagagataactcatgatccattgctatctttattactcaaaggctgttcattcccataataccagatccataatagttgtagtttttttgatgttgttgcccttaccttaattatttgtagttttagtaggccttgcctcagtttttcccacagaattccataattttaatgttgaactaacccatctatataggacttctaaaaactacgtcaggaatgtaaggttaaatgagaggtagaacttgtagtgtaataggtataatggtagctttcaaagttttatcttctcaaaacattgtcttagccagtgtatttctgagaactcagactgaagcacagaagtcacagtatgcttcttttatttaagcacacagattcatgacacaagtacttgttgaacaagtgttctcattgcagagagatctacttgaatataaaagggtcatcatactagattattaaaaaagaattggaaatcttgagttgtggaagaaatgtttatgctttggagatctaaaaaagttatgaatgtaggaattagataagtccagtttgttctgttaatataaaatggttagatatattaaactgcaagtagtatcagcttcaccataagcttgggccttcctccatcttgttttatttaagtctctttaaatgaaattttgttgtcattgtttcagcattcatgaactttcttactatcacaggttctactttaattttccttgccatatgtgtttccattttgtgggacattagccaccacaggaacacaagagttgtcagaagactcctgggtgtacagagcaaatcaagctgcatcagtattataggataccaaacagaatcctttctattaggaaataagaaatcagttaagtgttggctgggcgcggtggcttatgcctgtaatcccagcattttgggatgccaaggtgggcagaccatttgaggccaggagttctaaaccagtttggccaacatggcaaaaccccatctctactaaaaatataaaaattagctgggcatggtggtgcacacctgtaatcccagctacctgggaggcacgagaatcacttgaacccaggaggcggaggttgcagtgagccaaggttgtgccactgcactccagcctgggtgacaaagcgagactgtctcaaaaaacaaaaaacaaaaaaaaaagagttaagtgttgattttgttggattactgacagtttgttgagatggattttaaaaagagtctatttaaaccaaagtacctggaaccataatctgccatcagattgctaaacattcacataatccccatgtttcatggggcttcagggaaggcaaatacatctgagatgagccacctccaaggacagcatttcctgggctgcaaaactagatgtggattttgttacttaggcctctctaaaaactgaggccatggatatgacatagcttttcttctcacctatgcctttgttacttttgtatttattggaattaaatctctttttaaagagcttccttcccccttcatcccatttgtatttttaaaaactaagttatatatatatttgcttgtttttgcattcttttattttgtgctccattccctgctttgccagttaagtactacctgaaaagtagcggttcaaaagtatggtaaatctcctcccttaaccttattgcctgtgtgggtgacagctaatggaaaagttgatcgatttttttcagtggtttttttgggagtatatactttaaaaatgtacatacatgtttttgatagtttttatattatttcattttgtatatttttttcctgatgaagagtgatatatcatcctatgaaaatttcatctacccttcccattttacctgtatgggcagtagctacagactagttatttggtttccttctttggaagaaggtggtgatgttgagaggagagcaagctatattcttttaaaagtgtgtacagatgtttttgctattttgtgttatttcattttgtatttcattcatccattttgtggacgtgtagataaaacgcggtggtccaaaagcatgacagatgtcccctttgcgtttctccttattgttcgcatggacaataactgacagagtagtcctagttgctgttgttttgatctagtcttggggctggggttgtatattattctttcaagtgtgtataaatattgtgccacctttttatacttcattttatacttgtttccttgtatggatgcatatatacttaatgaaaattgaggttcagagtatgacaaatctcttttcccttttccttactgcctatttaggcaatagctaatagagtagtttgttttgttttggggtgtgggggagagtggagtatgtacttaatgtatataaataaacttgctactacattgtattactaatttggttcacactgtgtccttctcatggatgtgaaagtaccaatgaaatgtggagatctcgatgtataacagtctcccattctcctcatcccttattgactgctgggcagtagctaacagagtagttgtcaagtggcgtatttgaggtgagggggagggacggggaaggtaggaaaatgcacttaatgtatatacatgtttttactactacattgtattaattcatcgggtgcccagactgaaaggtacctaatgaaccatggagttccggatgtataacagtctcctcttttccctttcccttattgcccatgtgggcaatacttaagagtagtttgggtttattgaagattttttgctaggagagagaaaattttttgc

SEQ ID NO: 50390 - DNA, 5083 bp, Homo sapiens
gcgggcgggcatctctgccgaaaacacctacagcgcccgctccctcggtccttcgagcagtgatccctccgcggccaacctccccagggaaaccagcgattcgcggttcagatagcgaccttcgcccgcaggttcctgctctgccttcagacttcggcttcagtggcacctgctcagcgaggcctcgtctaaccaagccatccgaattaactacccactcactcgccatcacatcaccccgatttaattcgcagcggggcactgactttacactcgtgtgtcttctgtgtttatttatggtctgtttctggaatgtccgctcctgggactgggaccatgattttctggcgcagtgcgggtgtctcggcgtccgggatcgggcgggtcgcagtagggctccacatttgttgagtgactgaacaccgttcccggccggggagagcgccgcagccgggtccacttcaggtaggggctgggctttcccggccccgcctaggccccgcccccagcgcgaacccgctcccacctcgcctgtccgcggagcagcagggggtttgactgtgcttttccctcttgcttccctcgctctttctgcagctgccacgaaaacccggaacggcggagcggcgccgcccctcgcggcacctccctggcagcccttggaggccgcgctgggcatgctcagtcagctgggccgcctcagctctcggagtaggaagctcgggcgctccggctgtaaggagccgcggcggggggaaaatggagcccttcaccaatgatcggcttcagctccccaggaatatgattgaaaacagcatgtttgaggaagaaccagatgtggtggatttagccaaagagccttgtttacatcctctagagcctgatgaggtggaatatgagccccggggttcccgactgctggtgcggggtcttggtgagcatgagatggaggaggatgaagaggattatgagtcatcagcaaagctgctgggcatgtccttcatgaatagaagctcaggccttcggaacagtgcaactggttacaggcagagcccagatggggcttgttcagtaccctctgcaaggaccatggtggtctgtgcttttgtcatcgtggttgctgtttctgtaatcatggtgatttacttactgcccagatgtacctttaccaaagaaggctgccataaaaaaaaccagtcaattggactaattcagccatttgcaacaaatgggaaattgtttccatgggcacagatcaggcttcccactgccgttgtgccactacgctatgaactcagcctacacccgaacctaacctcgatgacattcaggggttctgtgacaatttcagttcaggctcttcaggtcacatggaatatcattcttcatagcacaggtcataatatttcaagagtgacctttatgtcagcagtttcaagccaagaaaaacaagctgagatcctggaatatgcatatcatggacagatcgccattgttgcccccgaagcccttctagcagggcacaattatacgttgaagatagagtactcggcaaatatatctagttcttattatgggttttatggcttctcctacacagatgaaagtaatgagaaaaagtactttgcagcaactcagtttgaacccctggcagcaagatctgcttttccttgttttgatgaaccagcatttaaagccacttttatcatcaagatcataagggatgagcaatacaccgctttatcaaatatgcctaagaagtcatcagtcgttctagatgatggacttgttcaggatgagttttctgagagtgtgaagatgagcacttacttggttgctttcattgtgggagagatgaagaacctgagtcaggacgtaaatggaaccctggtttctatatatgctgtaccagaaaatattggtcaagttcattatgccttggaaacaactgtgaagcttcttgagttttttcaaaactactttgaaattcagtacccacttaagaaattggatttggtggctattcctgactttgaagcaggagcaatggaaaattggggtttgctcaccttccgagaggagacacttctgtatgacagtaacacttcttcaatggcggatagaaagctggtgactaaaatcattgctcatgagctggcccaccagtggtttggcaatctggtaacaatgaagtggtggaatgacctatggctaaatgaaggttttgccactttcatggagtatttctctttggaaaaaatattcaaagagctttctagttatgaagatttcttagatgctcgatttaaaaccatgaagaaagattccttaaattcatctcatccaatatcatcatctgttcagtcttcagaacaaattgaagaaatgtttgattctctttcctattttaagggatcttctctcttgttgatgttgaaaacttaccttagtgaagatgtgtttcaacatgctgttgtcctttacctgcataatcacagctatgcatctattcaaagtgatgatctgtgggatagttttaatgaggtcacaaaccaaacactagatgtaaagagaatgatgaaaacctggaccctgcagaaaggatttcctttagtgactgttcaaaagaaaggaaaggaactttttatacaacaagagagattctttttaaatatgaagcctgaaattcagccttcagatacaagctacctgtggcatattccactatcctatgtcactgaaggaagaaattattcaaaatatcaatcggtatcattactggataagaaatcaggtgtcatcaatcttacagaagaagtgctgtgggtcaaagtgaatataaacatgaatggttattatattgtacactatgcagatgatgattgggaagcactaatccatcagttgaaaataaatccttatgttctgagtgacaaagaccgagccaaccttatcaacaacatctttgaacttgcaggcctaggcaaggtacctctcaagagggcctttgatttgattaattatcttggaaatgagaaccatactgcacccatcaccgaagccctgtttcagacagacctcatctataacctccttgaaaaactgggatacatggatctggcctcaagactggtgactagggtatttaaattacttcaaaaccaaattcaacaacaaacttggactgatgagggcactccatctatgcgagagcttcggtcagccctgctagagtttgcttgcacccacaacctggggaactgctctactactgccatgaaactgtttgatgactggatggcatccaatggaactcaaagcctacctactgatgtcatgacaactgtgttcaaagttggagcaaaaactgacaaaggctggtcattccttttgggcaaatacatttctataggctctgaagcagagaagaacaaaatactagaagcacttgccagctcagaggatgtgcggaagctttactggttaatgaaaagtagcctgaatggagataacttccgaacacagaagctgtcttttatcattagaacagtgggtcgacattttcctggacacttactggcatgggattttgtcaaagagaactggaataagcttgtacagaagttccctctggggtcctataccatacaaaatattgttgctggatcaacttacctgttttcaacaaagacacatttatctgaggttcaggcattctttgaaaatcagtcagaggcaaccttccggcttcgttgtgtccaggaggctttggaagtcattcagttgaatatccagtggatggagaagaacctcaaaagtctcacatggtggctgtagcatgcacaaccgcacctcattttgttgcccattcagagagcttgtaagcttgggctctgccgcttttgcaaaagccaaggtaaagccaggatcgctgccaagttgtttgcactctttggagttctagttagctcagggcctgactgtatttttcatccatcttttctgaagtgtctttgggcagtatgtagttatttattacaaaattatattcacctaaatgccaaccatctacaaaaacaatgagtaatttttctactttgaagatacacagatggggacaaaaaccctgttttggaattctgttctattcctcagtatccagaaagttactgacacagtaaaacaaggaaagttctaccctaagagccgccatcacttcaggccgctggtttgtcagccatctgttgcttcttattgatagatggcattggaatgtggtacaaagttagctctgaagaatatggtaacgaagacaataaagcatgcactgtaagaactgacctcaggtgtgcagatctactttgatttggggttttgattaattctttatttttctgaaaaaaagtttaaataatgtctgtaactattgtgtttttttcctgccgaatagccaggtgctacagatttttaaaatttttgttgtattgaaaagctaaacaaggccaaaaggttaaattttttgaatatttaagactttctttttcatcttttatagcgttaccataggaaactgttccaaactgagttagctttaattataattattttattcataaatggtgatagtccccagatctgtacacctttatcactccctgccgtagatatactttaggttagtatttctacattcgtggcaagcattttggtaacaccagtggttttcattgtgacttttatcactatcactaagaatgcaatttaagttgccttttggcatcatagatcatagaaactttctctctgaatcatacccatgtgtgaattttcattttatatgatagtgtagcatattagaagcatattttaaaacagagcctttgagaaattgaaaaacaattatttgaagttcaccatagtaccttaaaggaacaaagagaatgtgggataggagtaacttgaattcgtgtttagtatggtgggctttgaatttttttcactatcaaaaatagtgcttttgtttagttaaaaattgtagtttttctttttttgtgtgtccaaactaacataaaaggagtggtca

SEQ ID NO: 50391 - DNA, 3679 bp, Homo sapiens
gcgggcgggcatctctgccgaaaacacctacagcgcccgctccctcggtccttcgagcagtgatccctccgcggccaacctccccagggaaaccagcgattcgcggttcagatagcgaccttcgcccgcaggttcctgctctgccttcagacttcggcttcagtggcacctgctcagcgaggcctcgtctaaccaagccatccgaattaactacccactcactcgccatcacatcaccccgatttaattcgcagcggggcactgactttacactcgtgtgtcttctgtgtttatttatggtctgtttctggaatgtccgctcctgggactgggaccatgattttctggcgcagtgcgggtgtctcggcgtccgggatcgggcgggtcgcagtagggctccacatttgttgagtgactgaacaccgttcccggccggggagagcgccgcagccgggtccacttcaggtaggggctgggctttcccggccccgcctaggccccgcccccagcgcgaacccgctcccacctcgcctgtccgcggagcagcagggggtttgactgtgcttttccctcttgcttccctcgctctttctgcagctgccacgaaaacccggaacggcggagcggcgccgcccctcgcggcacctccctggcagcccttggaggccgcgctgggcatgctcagtcagctgggccgcctcagctctcggagtaggaagctcgggcgctccggctgtaaggagccgcggcggggggaaaatggagcccttcaccaatgatcggcttcagctccccaggaatatgattgaaaacagcatgtttgaggaagaaccagatgtggtggatttagccaaagagccttgtttacatcctctagagcctgatgaggtggaatatgagccccggggttcccgactgctggtgcggggtcttggtgagcatgagatggaggaggatgaagaggattatgagtcatcagcaaagctgctgggcatgtccttcatgaatagaagctcaggccttcggaacagtgcaactggttacaggcagagcccagatggggcttgttcagtaccctctgcaaggaccatggtggtctgtgcttttgtcatcgtggttgctgtttctgtaatcatggtgatttacttactgcccagatgtacctttaccaaagaaggctgccataaaaaaaaccagtcaattggactaattcagccatttgcaacaaatgggaaattgtttccatgggcacagatcaggcttcccactgccgttgtgccactacgctatgaactcagcctacacccgaacctaacctcgatgacattcaggggttctgtgacaatttcagttcaggctcttcaggtcacatggaatatcattcttcatagcacaggtcataatatttcaagagtgacctttatgtcagcagtttcaagccaagaaaaacaagctgagatcctggaatatgcatatcatggacagatcgccattgttgcccccgaagcccttctagcagggcacaattatacgttgaagatagagtactcggcaaatatatctagttcttattatgggttttatggcttctcctacacagatgaaagtaatgagaaaaagtactttgcagcaactcagtttgaacccctggcagcaagatctgcttttccttgttttgatgaaccagcatttaaagccacttttatcatcaagatcataagggatgagcaatacaccgctttatcaaatatgcctaagaagtcatcagtcgttctagatgatggacttgttcaggatgagttttctgagagtgtgaagatgagcacttacttggttgctttcattgtgggagagatgaagaacctgagtcaggacgtaaatggaaccctggtttctatatatgctgtaccagaaaatattggtcaagttcattatgccttggaaacaactgtgaagcttcttgagttttttcaaaactactttgaaattcagtacccacttaagaaattggatttggtggctattcctgactttgaagcaggagcaatggaaaattggggtttgctcaccttccgagaggagacacttctgtatgacagtaacacttcttcaatggcggatagaaagctggtgactaaaatcattgctcatgagctggcccaccagtggtttggcaatctggtaacaatgaagtggtggaatgacctatggctaaatgaaggttttgccactttcatggagtatttctctttggaaaaaatattcaaagagctttctagttatgaagatttcttagatgctcgatttaaaaccatgaagaaagattccttaaattcatctcatccaatatcatcatctgttcagtcttcagaacaaattgaagaaatgtttgattctctttcctattttaagggatcttctctcttgttgatgttgaaaacttaccttagtgaagatgtgtttcaacatgctgttgtcctttacctgcataatcacagctatgcatctattcaaagtgatgatctgtgggatagttttaatgaggtcacaaaccaaacactagatgtaaagagaatgatgaaaacctggaccctgcagaaaggatttcctttagtgactgttcaaaagaaaggaaaggaactttttatacaacaagagagattctttttaaatatgaagcctgaaattcagccttcagatacaagctacctgtggcatattccactatcctatgtcactgaaggaagaaattattcaaaatatcaatcggtatcattactggataagaaatcaggtgtcatcaatcttacagaagaagtgctgtgggtcaaagtgaatataaacatgaatggttattatattgtacactatgcagatgatgattgggaagcactaatccatcagttgaaaataaatccttatgttctgagtgacaaagaccgagccaaccttatcaacaacatctttgaacttgcaggcctaggcaaggtacctctcaagagggcctttgatttgattaattatcttggaaatgagaaccatactgcacccatcaccgaagccctgtttcagacagacctcatctataacctccttgaaaaactgggatacatggatctggcctcaagactggtgactagggtatttaaattacttcaaaaccaaattcaacaacaaacttggactgatgagggcactccatctatgcgagagcttcggtcagccctgctagagtttgcttgcacccacaacctggggaactgctctactactgccatgaaactgtttgatgactggatggcatccaatggaactcaaaggtgaagtatacctctactcagatgaattatcttctttttctttatttcacatcataaatgttataaaactgagtgtcagtgtaggtgaactctatgtatctgcattctcaaacaagactttttttttttttattatactttaagttttagggtacatgtgcacaatgtgcaggttagttacatacgtatacatgtgccatgctggtgtgctgcacccattaactcgtcatttagcattaggtatatctcctaatgctatccctcccccctccccccaccccacaacagtccccagagtgtgatgttccccttcctgtgtccatgtgttctcattgttcaattcccacctatgagtgaga

SEQ ID NO: 50392 - DNA, 2854 bp, Homo sapiens
gcgggcgggcatctctgccgaaaacacctacagcgcccgctccctcggtccttcgagcagtgatccctccgcggccaacctccccagggaaaccagcgattcgcggttcagatagcgaccttcgcccgcaggttcctgctctgccttcagacttcggcttcagtggcacctgctcagcgaggcctcgtctaaccaagccatccgaattaactacccactcactcgccatcacatcaccccgatttaattcgcagcggggcactgactttacactcgtgtgtcttctgtgtttatttatggtctgtttctggaatgtccgctcctgggactgggaccatgattttctggcgcagtgcgggtgtctcggcgtccgggatcgggcgggtcgcagtagggctccacatttgttgagtgactgaacaccgttcccggccggggagagcgccgcagccgggtccacttcaggtaggggctgggctttcccggccccgcctaggccccgcccccagcgcgaacccgctcccacctcgcctgtccgcggagcagcagggggtttgactgtgcttttccctcttgcttccctcgctctttctgcagctgccacgaaaacccggaacggcggagcggcgccgcccctcgcggcacctccctggcagcccttggaggccgcgctgggcatgctcagtcagctgggccgcctcagctctcggagtaggaagctcgggcgctccggctgtaaggagccgcggcggggggaaaatggagcccttcaccaatgatcggcttcagctccccaggaatatgattgaaaacagcatgtttgaggaagaaccagatgtggtggatttagccaaagagccttgtttacatcctctagagcctgatgaggtggaatatgagccccggggttcccgactgctggtgcggggtcttggtgagcatgagatggaggaggatgaagaggattatgagtcatcagcaaagctgctgggcatgtccttcatgaatagaagctcaggccttcggaacagtgcaactggttacaggcagagcccagatggggcttgttcagtaccctctgcaaggaccatggtggtctgtgcttttgtcatcgtggttgctgtttctgtaatcatggtgatttacttactgcccagatgtacctttaccaaagaaggctgccataaaaaaaaccagtcaattggactaattcagccatttgcaacaaatgggaaattgtttccatgggcacagatcaggcttcccactgccgttgtgccactacgctatgaactcagcctacacccgaacctaacctcgatgacattcaggggttctgtgacaatttcagttcaggctcttcaggtcacatggaatatcattcttcatagcacaggtcataatatttcaagagtgacctttatgtcagcagtttcaagccaagaaaaacaagctgagatcctggaatatgcatatcatggacagatcgccattgttgcccccgaagcccttctagcagggcacaattatacgttgaagatagagtactcggcaaatatatctagttcttattatgggttttatggcttctcctacacagatgaaagtaatgagaaaaagtactttgcagcaactcagtttgaacccctggcagcaagatctgcttttccttgttttgatgaaccagcatttaaagccacttttatcatcaagatcataagggatgagcaatacaccgctttatcaaatatgcctaagaagtcatcagtcgttctagatgatggacttgttcaggatgagttttctgagagtgtgaagatgagcacttacttggttgctttcattgtgggagagatgaagaacctgagtcaggacgtaaatggaaccctggtttctatatatgctgtaccagaaaatattggtcaagttcattatgccttggaaacaactgtgaagcttcttgagttttttcaaaactactttgaaattcagtacccacttaagaaattggatttggtggctattcctgactttgaagcaggagcaatggaaaattggggtttgctcaccttccgagaggagacacttctgtatgacagtaacacttcttcaatggcggatagaaagctggtgactaaaatcattgctcatgagctggcccaccagtggtttggcaatctggtaacaatgaagtggtggaatgacctatggctaaatgaaggttttgccactttcatggagtatttctctttggaaaaaatattcaaagagctttctagttatgaagatttcttagatgctcgatttaaaaccatgaagaaagattccttaaattcatctcatccaatatcatcatctgttcagtcttcagaacaaattgaagaaatgtttgattctctttcctattttaagggatcttctctcttgttgatgttgaaaacttaccttagtgaagatgtgtttcaacatgctgttgtcctttacctgcataatcacagctatgcatctattcaaagtgatgatctgtgggatagttttaatgaggtcacaaaccaaacactagatgtaaagagaatgatgaaaacctggaccctgcagaaaggatttcctttagtgactgttcaaaagaaaggaaaggaactttttatacaacaagagagattctttttaaatatgaagcctgaaattcagccttcagatacaaggtacatgccctctttcttttcatgccatctcttttgcactctcaggtggaaatatttttaagtgttttataatcataagttcttgtgaaacctaacaagattatcccttcctaggaatagcttaaccttcctaccaaattaaaaaaaaa

SEQ ID NO: 50393 - DNA, 3894 bp, Homo sapiens
  misc_feature (3)..(3): n is a, c, g, or t
  misc_feature (6)..(6): n is a, c, g, or t
ggncangctcctaactccactaagtacagaagtggagccgtacagccatgaatgtcaggcatgttgtggggactagttgtattagttttctattgccaccataacaaattaccacaaacttaagcaatatagtacaaatttatcttaaagttattggcaggtcagaagcctgatacggatctcattgggctaaaacgaaggagttggcagggctgtgtgttcctttctgtaggctctgggcaggatccatttcctgcacttttttggcttttggaggtcgtccacattccttggctcctggccctgctccttcatcttcaaagctaccaaagatcggcttcagctccccaggaatatgattgaaaacagcatgtttgaggaagaaccagatgtggtggatttagccaaagagccttgtttacatcctctagagcctgatgaggtggaatatgagccccggggttcccgactgctggtgcggggtcttggtgagcatgagatggaggaggatgaagaggattatgagtcatcagcaaagctgctgggcatgtccttcatgaatagaagctcaggccttcggaacagtgcaactggttacaggcagagcccagatggggcttgttcagtaccctctgcaaggaccatggtggtctgtgcttttgtcatcgtggttgctgtttctgtaatcatggtgatttacttactgcccagatgtacctttaccaaagaaggctgccataaaaaaaaccagtcaattggactaattcagccatttgcaacaaatgggaaattgtttccatgggcacagatcaggcttcccactgccgttgtgccactacgctatgaactcagcctacacccgaacctaacctcgatgacattcaggggttctgtgacaatttcagttcaggctcttcaggtcacatggaatatcattcttcatagcacaggtcataatatttcaagagtgacctttatgtcagcagtttcaagccaagaaaaacaagctgagatcctggaatatgcatatcatggacagatcgccattgttgcccccgaagcccttctagcagggcacaattatacgttgaagatagagtactcggcaaatatatctagttcttattatgggttttatggcttctcctacacagatgaaagtaatgagaaaaagtactttgcagcaactcagtttgaacccctggcagcaagatctgcttttccttgttttgatgaaccagcatttaaagccacttttatcatcaagatcataagggatgagcaatacaccgctttatcaaatatgcctaagaagtcatcagtcgttctagatgatggacttgttcaggatgagttttctgagagtgtgaagatgagcacttacttggttgctttcattgtgggagagatgaagaacctgagtcaggacgtaaatggaaccctggtttctatatatgctgtaccagaaaatattggtcaagttcattatgccttggaaacaactgtgaagcttcttgagttttttcaaaactactttgaaattcagtacccacttaagaaattggatttggtggctattcctgactttgaagcaggagcaatggaaaattggggtttgctcaccttccgagaggagacacttctgtatgacagtaacacttcttcaatggcggatagaaagctggtgactaaaatcattgctcatgagctggcccaccagtggtttggcaatctggtaacaatgaagtggtggaatgacctatggctaaatgaaggttttgccactttcatggagtatttctctttggaaaaaatattcaaagagctttctagttatgaagatttcttagatgctcgatttaaaaccatgaagaaagattccttaaattcatctcatccaatatcatcatctgttcagtcttcagaacaaattgaagaaatgtttgattctctttcctattttaagggatcttctctcttgttgatgttgaaaacttaccttagtgaagatgtgtttcaacatgctgttgtcctttacctgcataatcacagctatgcatctattcaaagtgatgatctgtgggatagttttaatgaggtcacaaaccaaacactagatgtaaagagaatgatgaaaacctggaccctgcagaaaggatttcctttagtgactgttcaaaagaaaggaaaggaactttttatacaacaagagagattctttttaaatatgaagcctgaaattcagccttcagatacaagctacctgtggcatattccactatcctatgtcactgaaggaagaaattattcaaaatatcaatcggtatcattactggataagaaatcaggtgtcatcaatcttacagaagaagtgctgtgggtcaaagtgaatataaacatgaatggttattatattgtacactatgcagatgatgattgggaagcactaatccatcagttgaaaataaatccttatgttctgagtgacaaagaccgagccaaccttatcaacaacatctttgaacttgcaggcctaggcaaggtacctctcaagagggcctttgatttgattaattatcttggaaatgagaaccatactgcacccatcaccgaagccctgtttcagacagacctcatctataacctccttgaaaaactgggatacatggatctggcctcaagactggtgactagggtatttaaattacttcaaaaccaaattcaacaacaaacttggactgatgagggcactccatctatgcgagagcttcggtcagccctgctagagtttgcttgcacccacaacctggggaactgctctactactgccatgaaactgtttgatgactggatggcatccaatggaactcaaagcctacctactgatgtcatgacaactgtgttcaaagttggagcaaaaactgacaaaggctggtcattccttttgggcaaatacatttctataggctctgaagcagagaagaacaaaatactagaagcacttgccagctcagaggatgtgcggaagctttactggttaatgaaaagtagcctgaatggagataacttccgaacacagaagctgtcttttatcattagaacagtgggtcgacattttcctggacacttactggcatgggattttgtcaaagagaactggaataagcttgtacagaagttccctctggggtcctataccatacaaaatattgttgctggatcaacttacctgttttcaacaaagacacatttatctgaggttcaggcattctttgaaaatcagtcagaggcaaccttccggcttcgttgtgtccaggaggctttggaagtcattcagttgaatatccagtggatggagaagaacctcaaaagtctcacatggtggctgtagcatgcacaaccgcacctcattttgttgcccattcagagagcttgtaagcttgggctctgccgcttttgcaaaagccaaggtaaagccaggatcgctgccaagttgtttgcactctttggagttctagttagctcagggcctgactgtatttttcatccatcttttctgaagtgtctttgggcagtatgtagttatttattacaaaattatattcacctaaatgccaaccatctacaaaaacaatgagtaatttttctactttgaagatacacagatggggacaaaaaccctgttttggaattctgttctattcctcagtatccagaaagttactgacacagtaaaacaaggaaagttctaccctaagagccgccatcacttcaggccgctggtttgtcagccatctgttgcttcttattgatagatggcattggaatgtggtacaaagttagctctgaagaatatggtaacgaagacaataaagcatgcactgtaagaactga

SEQ ID NO: 50394 - DNA, 5374 bp, Homo sapiens
taatacaaataatttaagtggtcataaaattgtttggaagaattgcattcttggggtgaattcatagcaccaagcctttggactctactttatttattgttacttaaacatctccttggttccattttaagttagaaaaatgtatctgtgtgggagtaaaaagatttcctttttaaaatcatttcagatatcaccatacttgattgggaactccatgtagataccttgaatattaaagtacttctttctactgctttcaagatagcagcacagccatcactaagttaaagcttattttaaaagctggggttacctgaggtttatcgtccttttcttcttttgaaattcttctgtgtgaaacttacaggttcaggcattctttgaaaatcagtcagaggcaaccttccggcttcgttgtgtccaggaggctttggaagtcattcagttgaatatccagtggatggagaagaacctcaaaagtctcacatggtggctgtagcatgcacaaccgcacctcattttgttgcccattcagagagcttgtaagcttgggctctgccgcttttgcaaaagccaaggtaaagccaggatcgctgccaagttgtttgcactctttggagttctagttagctcagggcctgactgtatttttcatccatcttttctgaagtgtctttgggcagtatgtagttatttattacaaaattatattcacctaaatgccaaccatctacaaaaacaatgagtaatttttctactttgaagatacacagatggggacaaaaaccctgttttggaattctgttctattcctcagtatccagaaagttactgacacagtaaaacaaggaaagttctaccctaagagccgccatcacttcaggccgctggtttgtcagccatctgttgcttcttattgatagatggcattggaatgtggtacaaagttagctctgaagaatatggtaacgaagacaataaagcatgcactgtaagaactgacctcaggtgtgcagatctactttgatttggggttttgattaattctttatttttctgaaaaaaagtttaaataatgtctgtaactattgtgtttttttcctgccgaatagccaggtgctacagatttttaaaatttttgttgtattgaaaagctaaacaaggccaaaaggttaaattttttgaatatttaagactttctttttcatcttttatagcgttaccataggaaactgttccaaactgagttagctttaattataattattttattcataaatggtgatagtccccagatctgtacacctttatcactccctgccgtagatatactttaggttagtatttctacattcgtggcaagcattttggtaacaccagtggttttcattgtgacttttatcactatcactaagaatgcaatttaagttgccttttggcatcatagatcatagaaactttctctctgaatcatacccatgtgtgaattttcattttatatgatagtgtagcatattagaagcatattttaaaacagagctttgaatttttttcactatcaaaaatagtgcttttgtttagttaaaaattgtagtttttctttttttgtgtgtccaaactaacataaaaggagtggtcaaagaaggaaagaagaaaaatgagggaggatgtccgaaactgtatggcattttactccttctgaaagagaaatactgtacttgaatttttgagctatgcagacttatacctagattgttgtgtttctttgattcttaggagaaaagctttcttcctaataattcttgagaactttatattttgtttgaaaacagtttctatgtacataaaaagggtatttacccatttgtgagcacttaaaacactccacagagtcagacagtgggaaaggtcaccctttttttattcggcaggtatcaagttagaatgtatggaattgtgaataaaattatattttattttatgaaaatatttttatataataaaatttaaaaggctggtaagctaaaaaaatagtcttctttaatcctagtgtgttttccccaatttagtcttttctaaaatttatctgttttagagtagaaaatattatatcctgagaatcacagaatcatctaaatatgtcttattcaactgaagtgattgtaagtctttattcttgtgctttggttaaatgaatgataatttagttgatagtgaaagttaatgtgtttttatatttttagagtgagggaaaaatactaaacttttgagagttttgttgtcgttgctggttttttaccatgtggtactaaattccactttgatacaaaatttaaattttgtaacttctcaaaatcacttaagattcttcagttttacctgtgcttcttgacatcgctcctataatgtatgttagttaactctgcatatggcaaatcttgtcttgaattatatcatttctctccctctctctctctctctgtgtgtgtgtgtgtgtgtgtgtgtgtgtgtgtgtgtgtgtagtgtggggggtattgttatgagtaaaactttatcaaaacttggcctgaaaaagagataactcatgatccattgctatctttattactcaaaggctgttcattcccataataccagatccataatagttgtagtttttttgatgttgttgcccttaccttaattatttgtagttttagtaggccttgcctcagtttttcccacagaattccataattttaatgttgaactaacccatctatataggacttctaaaaactacgtcaggaatgtaaggttaaatgagaggtagaacttgtagtgtaataggtataatggtagctttcaaagttttatcttctcaaaacattgtcttagccagtgtatttctgagaactcagactgaagcacagaagtcacagtatgcttcttttatttaagcacacagattcatgacacaagtacttgttgaacaagtgttctcattgcagagagatctacttgaatataaaagggtcatcatactagattattaaaaaagaattggaaatcttgagttgtggaagaaatgtttatgctttggagatctaaaaaagttatgaatgtaggaattagataagtccagtttgttctgttaatataaaatggttagatatattaaactgcaagtagtatcagcttcaccataagcttgggccttcctccatcttgttttatttaagtctctttaaatgaaattttgttgtcattgtttcagcattcatgaactttcttactatcacaggttctactttaattttccttgccatatgtgtttccattttgtgggacattagccaccacaggaacacaagagttgtcagaagactcctgggtgtacagagcaaatcaagctgcatcagtattataggataccaaacagaatcctttctattaggaaataagaaatcagttaagtgttggctgggcgcggtggcttatgcctgtaatcccagcattttgggatgccaaggtgggcagaccatttgaggccaggagttctaaaccagtttggccaacatggcaaaaccccatctctactaaaaatataaaaattagctgggcatggtggtgcacacctgtaatcccagctacctgggaggcacgagaatcacttgaacccaggaggcggaggttgcagtgagccaaggttgtgccactgcactccagcctgggtgacaaagcgagactgtctcaaaaaacaaaaaacaaaaaaaaaagagttaagtgttgattttgttggattactgacagtttgttgagatggattttaaaaagagtctatttaaaccaaagtacctggaaccataatctgccatcagattgctaaacattcacataatccccatgtttcatggggcttcagggaaggcaaatacatctgagatgagccacctccaaggacagcatttcctgggctgcaaaactagatgtggattttgttacttaggcctctctaaaaactgaggccatggatatgacatagcttttcttctcacctatgcctttgttacttttgtatttattggaattaaatctctttttaaagagcttccttcccccttcatcccatttgtatttttaaaaactaagttatatatatatttgcttgtttttgcattcttttattttgtgctccattccctgctttgccagttaagtactacctgaaaagtagcggttcaaaagtatggtaaatctcctcccttaaccttattgcctgtgtgggtgacagctaatggaaaagttgatcgatttttttcagtggtttttttgggagtatatactttaaaaatgtacatacatgtttttgatagtttttatattatttcattttgtatatttttttcctgatgaagagtgatatatcatcctatgaaaatttcatctacccttcccattttacctgtatgggcagtagctacagactagttatttggtttccttctttggaagaaggtggtgatgttgagaggagagcaagctatattcttttaaaagtgtgtacagatgtttttgctattttgtgttatttcattttgtatttcattcatccattttgtggacgtgtagataaaacgcggtggtccaaaagcatgacagatgtcccctttgcgtttctccttattgttcgcatggacaataactgacagagtagtcctagttgctgttgttttgatctagtcttggggctggggttgtatattattctttcaagtgtgtataaatattgtgccacctttttatacttcattttatacttgtttccttgtatggatgcatatatacttaatgaaaattgaggttcagagtatgacaaatctcttttcccttttccttactgcctatttaggcaatagctaatagagtagtttgttttgttttggggtgtgggggagagtggagtatgtacttaatgtatataaataaacttgctactacattgtattactaatttggttcacactgtgtccttctcatggatgtgaaagtaccaatgaaatgtggagatctcgatgtataacagtctcccattctcctcatcccttattgactgctgggcagtagctaacagagtagttgtcaagtggcgtatttgaggtgagggggagggacggggaaggtaggaaaatgcacttaatgtatatacatgtttttactactacattgtattaattcatcgggtgcccagactgaaaggtacctaatgaaccatggagttccggatgtataacagtctcctcttttccctttcccttattgcccatgtgggcaatacttaagagtagtttgggtttattgaagattttttgctaggagagagaaaattttttgc

SEQ ID NO: 50395 - DNA, 6965 bp, Homo sapiens
gcgggcgggcatctctgccgaaaacacctacagcgcccgctccctcggtccttcgagcagtgatccctccgcggccaacctccccagggaaaccagcgattcgcggttcagatagcgaccttcgcccgcaggttcctgctctgccttcagacttcggcttcagtggcacctgctcagcgaggcctcgtctaaccaagccatccgaattaactacccactcactcgccatcacatcaccccgatttaattcgcagcggggcactgactttacactcgtgtgtcttctgtgtttatttatggtctgtttctggaatgtccgctcctgggactgggaccatgattttctggcgcagtgcgggtgtctcggcgtccgggatcgggcgggtcgcagtagggctccacatttgttgagtgactgaacaccgttcccggccggggagagcgccgcagccgggtccacttcaggtaggggctgggctttcccggccccgcctaggccccgcccccagcgcgaacccgctcccacctcgcctgtccgcggagcagcagggggtttgactgtgcttttccctcttgcttccctcgctctttctgcagctgccacgaaaacccggaacggcggagcggcgccgcccctcgcggcacctccctggcagcccttggaggccgcgctgggcatgctcagtcagctgggccgcctcagctctcggagtaggaagctcgggcgctccggctgtaaggagccgcggcggggggaaaatggagcccttcaccaatgatcggcttcagctccccaggaatatgattgaaaacagcatgtttgaggaagaaccagatgtggtggatttagccaaagagccttgtttacatcctctagagcctgatgaggtggaatatgagccccggggttcccgactgctggtgcggggtcttggtgagcatgagatggaggaggatgaagaggattatgagtcatcagcaaagctgctgggcatgtccttcatgaatagaagctcaggccttcggaacagtgcaactggttacaggcagagcccagatggggcttgttcagtaccctctgcaaggaccatggtggtctgtgcttttgtcatcgtggttgctgtttctgtaatcatggtgatttacttactgcccagatgtacctttaccaaagaaggctgccataaaaaaaaccagtcaattggactaattcagccatttgcaacaaatgggaaattgtttccatgggcacagatcaggcttcccactgccgttgtgccactacgctatgaactcagcctacacccgaacctaacctcgatgacattcaggggttctgtgacaatttcagttcaggctcttcaggtcacatggaatatcattcttcatagcacaggtcataatatttcaagagtgacctttatgtcagcagtttcaagccaagaaaaacaagctgagatcctggaatatgcatatcatggacagatcgccattgttgcccccgaagcccttctagcagggcacaattatacgttgaagatagagtactcggcaaatatatctagttcttattatgggttttatggcttctcctacacagatgaaagtaatgagaaaaagtactttgcagcaactcagtttgaacccctggcagcaagatctgcttttccttgttttgatgaaccagcatttaaagccacttttatcatcaagatcataagggatgagcaatacaccgctttatcaaatatgcctaagaagtcatcagtcgttctagatgatggacttgttcaggatgagttttctgagagtgtgaagatgagcacttacttggttgctttcattgtgggagagatgaagaacctgagtcaggacgtaaatggaaccctggtttctatatatgctgtaccagaaaatattggtcaagttcattatgccttggaaacaactgtgaagcttcttgagttttttcaaaactactttgaaattcagtacccacttaagaaattggatttggtggctattcctgactttgaagcaggagcaatggaaaattggggtttgctcaccttccgagaggagacacttctgtatgacagtaacacttcttcaatggcggatagaaagctggtgactaaaatcattgctcatgagctggcccaccagtggtttggcaatctggtaacaatgaagtggtggaatgacctatggctaaatgaaggttttgccactttcatggagtatttctctttggaaaaaatattcaaagagctttctagttatgaagatttcttagatgctcgatttaaaaccatgaagaaagattccttaaattcatctcatccaatatcatcatctgttcagtcttcagaacaaattgaagaaatgtttgattctctttcctattttaagggatcttctctcttgttgatgttgaaaacttaccttagtgaagatgtgtttcaacatgctgttgtcctttacctgcataatcacagctatgcatctattcaaagtgatgatctgtgggatagttttaatgaggtcacaaaccaaacactagatgtaaagagaatgatgaaaacctggaccctgcagaaaggatttcctttagtgactgttcaaaagaaaggaaaggaactttttatacaacaagagagattctttttaaatatgaagcctgaaattcagccttcagatacaagctacctgtggcatattccactatcctatgtcactgaaggaagaaattattcaaaatatcaatcggtatcattactggataagaaatcaggtgtcatcaatcttacagaagaagtgctgtgggtcaaagtgaatataaacatgaatggttattatattgtacactatgcagatgatgattgggaagcactaatccatcagttgaaaataaatccttatgttctgagtgacaaagaccgagccaaccttatcaacaacatctttgaacttgcaggcctaggcaaggtacctctcaagagggcctttgatttgattaattatcttggaaatgagaaccatactgcacccatcaccgaagccctgtttcagacagacctcatctataacctccttgaaaaactgggatacatggatctggcctcaagactggtgactagggtatttaaattacttcaaaaccaaattcaacaacaaacttggactgatgagggcactccatctatgcgagagcttcggtcagccctgctagagtttgcttgcacccacaacctggggaactgctctactactgccatgaaactgtttgatgactggatggcatccaatggaactcaaagcctacctactgatgtcatgacaactgtgttcaaagttggagcaaaaactgacaaaggctggtcattccttttgggcaaatacatttctataggctctgaagcagagaagaacaaaatactagaagcacttgccagctcagaggatgtgcggaagctttactggttaatgaaaagtagcctgaatggagataacttccgaacacagaagctgtcttttatcattagaacagtgggtcgacattttcctggacacttactggcatgggattttgtcaaagagaactggaataagcttgtacagaagttccctctggggtcctataccatacaaaatattgttgctggatcaacttacctgttttcaacaaagacacatttatctgaggttcaggcattctttgaaaatcagtcagaggcaaccttccggcttcgttgtgtccaggaggctttggaagtcattcagttgaatatccagtggatggagaagaacctcaaaagtctcacatggtggctgtagcatgcacaaccgcacctcattttgttgcccattcagagagcttgtaagcttgggctctgccgcttttgcaaaagccaaggtaaagccaggatcgctgccaagttgtttgcactctttggagttctagttagctcagggcctgactgtatttttcatccatcttttctgaagtgtctttgggcagtatgtagttatttattacaaaattatattcacctaaatgccaaccatctacaaaaacaatgagtaatttttctactttgaagatacacagatggggacaaaaaccctgttttggaattctgttctattcctcagtatccagaaagttactgacacagtaaaacaaggaaagttctaccctaagagccgccatcacttcaggccgctggtttgtcagccatctgttgcttcttattgatagatggcattggaatgtggtacaaagttagctctgaagaatatggtaacgaagacaataaagcatgcactgtaagaactgacctcaggtgtgcagatctactttgatttggggttttgattaattctttatttttctgaaaaaaagtttaaataatgtctgtaactattgtgtttttttcctgccgaatagccaggtgctacagatttttaaaatttttgttgtattgaaaagctaaacaaggccaaaaggttaaattttttgaatatttaagactttctttttcatcttttatagcgttaccataggaaactgttccaaactgagttagctttaattataattattttattcataaatggtgatagtccccagatctgtacacctttatcactccctgccgtagatatactttaggttagtatttctacattcgtggcaagcattttggtaacaccagtggttttcattgtgacttttatcactatcactaagaatgcaatttaagttgccttttggcatcatagatcatagaaactttctctctgaatcatacccatgtgtgaattttcattttatatgatagtgtagcatattagaagcatattttaaaacagagcctttgagaaattgaaaaacaattatttgaagttcaccatagtaccttaaaggaacaaagagaatgtgggataggagtaacttgaattcgtgtttagtatggtgggctttgaatttttttcactatcaaaaatagtgcttttgtttagttaaaaattgtagtttttctttttttgtgtgtccaaactaacataaaaggagtggtcaaagaaggaaagaagaaaaatgagggaggatgtccgaaactgtatggcattttactccttctgaaagagaaatactgtacttgaatttttgagctatgcagacttatacctagattgttgtgtttctttgattcttaggagaaaagctttcttcctaataattcttgagaactttatattttgtttgaaaacagtttctatgtacataaaaagggtatttacccatttgtgagcacttaaaacactccacagagtcagacagtgggaaaggtcaccctttttttattcggcaggtatcaagttagaatgtatggaattgtgaataaaattatattttattttatgaaaatatttttatataataaaatttaaaaggctggtaagctaaaaaaatagtcttctttaatcctagtgtgttttccccaatttagtcttttctaaaatttatctgttttagagtagaaaatattatatcctgagaatcacagaatcatctaaatatgtcttattcaactgaagtgattgtaagtctttattcttgtgctttggttaaatgaatgataatttagttgatagtgaaagttaatgtgtttttatatttttagagtgagggaaaaatactaaacttttgagagttttgttgtcgttgctggttttttaccatgtggtactaaattccactttgatacaaaatttaaattttgtaacttctcaaaatcacttaagattcttcagttttacctgtgcttcttgacatcgctcctataatgtatgttagttaactctgcatatggcaaatcttgtcttgaattatatcatttctctccctctctctctctctctgtgtgtgtgtgtgtgtgtgtgtgtgtgtgtgtgtgtgtgtagtgtggggggtattgttatgagtaaaactttatcaaaacttggcctgaaaaagagataactcatgatccattgctatctttattactcaaaggctgttcattcccataataccagatccataatagttgtagtttttttgatgttgttgcccttaccttaattatttgtagttttagtaggccttgcctcagtttttcccacagaattccataattttaatgttgaactaacccatctatataggacttctaaaaactacgtcaggaatgtaaggttaaatgagaggtagaacttgtagtgtaataggtataatggtagctttcaaagttttatcttctcaaaacattgtcttagccagtgtatttctgagaactcagactgaagcacagaagtcacagtatgcttcttttatttaagcacacagattcatgacacaagtacttgttgaacaagtgttctcattgcagagagatctacttgaatataaaagggtcatcatactagattattaaaaaagaattggaaatcttgagttgtggaagaaatgtttatgctttggagatctaaaaaagttatgaatgtaggaattagataagtccagtttgttctgttaatataaaatggttagatatattaaactgcaagtagtatcagcttcaccataagcttgggccttcctccatcttgttttatttaagtctctttaaatgaaattttgttgtcattgtttcagcattcatgaactttcttactatcacaggttctactttaattttccttgccatatgtgtttccattttgtgggacattagccaccacaggaacacaagagttgtcagaagactcctgggtgtacagagcaaatcaagctgcatcagtattataggataccaaacagaatcctttctattaggaaataagaaatcagttaagtgttggctgaaacaatgacaacaaaatttcatttaaagagacttaaataaaacaagatggagtcg

SEQ ID NO: 50396 - DNA, 3850 bp, Homo sapiens
gcgggcgggcatctctgccgaaaacacctacagcgcccgctccctcggtccttcgagcagtgatccctccgcggccaacctccccagggaaaccagcgattcgcggttcagatagcgaccttcgcccgcaggttcctgctctgccttcagacttcggcttcagtggcacctgctcagcgaggcctcgtctaaccaagccatccgaattaactacccactcactcgccatcacatcaccccgatttaattcgcagcggggcactgactttacactcgtgtgtcttctgtgtttatttatggtctgtttctggaatgtccgctcctgggactgggaccatgattttctggcgcagtgcgggtgtctcggcgtccgggatcgggcgggtcgcagtagggctccacatttgttgagtgactgaacaccgttcccggccggggagagcgccgcagccgggtccacttcaggtaggggctgggctttcccggccccgcctaggccccgcccccagcgcgaacccgctcccacctcgcctgtccgcggagcagcagggggtttgactgtgcttttccctcttgcttccctcgctctttctgcagctgccacgaaaacccggaacggcggagcggcgccgcccctcgcggcacctccctggcagcccttggaggccgcgctgggcatgctcagtcagctgggccgcctcagctctcggagtaggaagctcgggcgctccggctgtaaggagccgcggcggggggaaaatggagcccttcaccaatgatcggcttcagctccccaggaatatgattgaaaacagcatgtttgaggaagaaccagatgtggtggatttagccaaagagccttgtttacatcctctagagcctgatgaggtggaatatgagccccggggttcccgactgctggtgcggggtcttggtgagcatgagatggaggaggatgaagaggattatgagtcatcagcaaagctgctgggcatgtccttcatgaatagaagctcaggccttcggaacagtgcaactggttacaggcagagcccagatggggcttgttcagtaccctctgcaaggaccatggtggtctgtgcttttgtcatcgtggttgctgtttctgtaatcatggtgatttacttactgcccagatgtacctttaccaaagaaggctgccataaaaaaaaccagtcaattggactaattcagccatttgcaacaaatgggaaattgtttccatgggcacagatcaggcttcccactgccgttgtgccactacgctatgaactcagcctacacccgaacctaacctcgatgacattcaggggttctgtgacaatttcagttcaggctcttcaggtcacatggaatatcattcttcatagcacaggtcataatatttcaagagtgacctttatgtcagcagtttcaagccaagaaaaacaagctgagatcctggaatatgcatatcatggacagatcgccattgttgcccccgaagcccttctagcagggcacaattatacgttgaagatagagtactcggcaaatatatctagttcttattatgggttttatggcttctcctacacagatgaaagtaatgagaaaaagtactttgcagcaactcagtttgaacccctggcagcaagatctgcttttccttgttttgatgaaccagcatttaaagccacttttatcatcaagatcataagggatgagcaatacaccgctttatcaaatatgcctaagaagtcatcagtcgttctagatgatggacttgttcaggatgagttttctgagagtgtgaagatgagcacttacttggttgctttcattgtgggagagatgaagaacctgagtcaggacgtaaatggaaccctggtttctatatatgctgtaccagaaaatattggtcaagttcattatgccttggaaacaactgtgaagcttcttgagttttttcaaaactactttgaaattcagtacccacttaagaaattggatttggtggctattcctgactttgaagcaggagcaatggaaaattggggtttgctcaccttccgagaggagacacttctgtatgacagtaacacttcttcaatggcggatagaaagctggtgactaaaatcattgctcatgagctggcccaccagtggtttggcaatctggtaacaatgaagtggtggaatgacctatggctaaatgaaggttttgccactttcatggagtatttctctttggaaaaaatattcaaagagctttctagttatgaagatttcttagatgctcgatttaaaaccatgaagaaagattccttaaattcatctcatccaatatcatcatctgttcagtcttcagaacaaattgaagaaatgtttgattctctttcctattttaagggatcttctctcttgttgatgttgaaaacttaccttagtgaagatgtgtttcaacatgctgttgtcctttacctgcataatcacagctatgcatctattcaaagtgatgatctgtgggatagttttaatgaggtcacaaaccaaacactagatgtaaagagaatgatgaaaacctggaccctgcagaaaggatttcctttagtgactgttcaaaagaaaggaaaggaactttttatacaacaagagagattctttttaaatatgaagcctgaaattcagccttcagatacaagctacctgtggcatattccactatcctatgtcactgaaggaagaaattattcaaaatatcaatcggtatcattactggataagaaatcaggtgtcatcaatcttacagaagaagtgctgtgggtcaaagtgaatataaacatgaatggttattatattgtacactatgcagatgatgattgggaagcactaatccatcagttgaaaataaatccttatgttctgagtgacaaagaccgagccaaccttatcaacaacatctttgaacttgcaggcctaggcaaggtacctctcaagagggcctttgatttgattaattatcttggaaatgagaaccatactgcacccatcaccgaagccctgtttcagacagacctcatctataacctccttgaaaaactgggatacatggatctggcctcaagactggtgactagggtatttaaattacttcaaaaccaaattcaacaacaaacttggactgatgagggcactccatctatgcgagagcttcggtcagccctgctagagtttgcttgcacccacaacctggggaactgctctactactgccatgaaactgtttgatgactggatggcatccaatggaactcaaagcctacctactgatgtcatgacaactgtgttcaaagttggagcaaaaactgacaaaggctggtcattccttttgggcaaatacatttctataggctctgaagcagagaagaacaaaatactagaagcacttgccagctcagaggatgtgcggaagctttactggtatgaaatcaccgaggaatatgatatacagaaaccaaaagaatacaaacactgtgctcttggtcaggagctcatttttgaggggatctcttttccccacttctgttacaggccaggcctaagttggacagtgtggtgaggagactacaggtgctgggctttatctttatggacaagcagaaaatcctttgcccaaaagggattacaagatgtcaggagtcacagccccctcctactccttgctcaaaaagtcttcctccccttggaatgttgtcttatacaccacaattggtactccatagtttaggaccaaggcattgctttgtgcaagctgtcattttaaaaatgtaggcatttcagaaaaaaaa

SEQ ID NO: 50397 - DNA, 2054 bp, Homo sapiens
gcgggcgggcatctctgccgaaaacacctacagcgcccgctccctcggtccttcgagcagtgatccctccgcggccaacctccccagggaaaccagcgattcgcggttcagatagcgaccttcgcccgcaggttcctgctctgccttcagacttcggcttcagtggcacctgctcagcgaggcctcgtctaaccaagccatccgaattaactacccactcactcgccatcacatcaccccgatttaattcgcagcggggcactgactttacactcgtgtgtcttctgtgtttatttatggtctgtttctggaatgtccgctcctgggactgggaccatgattttctggcgcagtgcgggtgtctcggcgtccgggatcgggcgggtcgcagtagggctccacatttgttgagtgactgaacaccgttcccggccggggagagcgccgcagccgggtccacttcaggtaggggctgggctttcccggccccgcctaggccccgcccccagcgcgaacccgctcccacctcgcctgtccgcggagcagcagggggtttgactgtgcttttccctcttgcttccctcgctctttctgcagctgccacgaaaacccggaacggcggagcggcgccgcccctcgcggcacctccctggcagcccttggaggccgcgctgggcatgctcagtcagctgggccgcctcagctctcggagtaggaagctcgggcgctccggctgtaaggagccgcggcggggggaaaatggagcccttcaccaatgatcggcttcagctccccaggaatatgattgaaaacagcatgtttgaggaagaaccagatgtggtggatttagccaaagagccttgtttacatcctctagagcctgatgaggtggaatatgagccccggggttcccgactgctggtgcggggtcttggtgagcatgagatggaggaggatgaagaggattatgagtcatcagcaaagctgctgggcatgtccttcatgaatagaagctcaggccttcggaacagtgcaactggttacaggcagagcccagatggggcttgttcagtaccctctgcaaggaccatggtggtctgtgcttttgtcatcgtggttgctgtttctgtaatcatggtgatttacttactgcccagatgtacctttaccaaagaaggctgccataaaaaaaaccagtcaattggactaattcagccatttgcaacaaatgggaaattgtttccatgggcacagatcaggcttcccactgccgttgtgccactacgctatgaactcagcctacacccgaacctaacctcgatgacattcaggggttctgtgacaatttcagttcaggctcttcaggtcacatggaatatcattcttcatagcacaggtcataatatttcaagagtgacctttatgtcagcagtttcaagccaagaaaaacaagctgagatcctggaatatgcatatcatggacagatcgccattgttgcccccgaagcccttctagcagggcacaattatacgttgaagatagagtactcggcaaatatatctagttcttattatgggttttatggcttctcctacacagatgaaagtaatgagaaaaagtaggtagccctcttaaatgattctggttttacgctctgataacttctgcaatatagatccctttgtccacaccagagacacgaattgtgatttttttttttaatttaggaagttatatacaaaatagtagaatggtgatttagaacaatatattatctctcttagtcaacgccttgagcatatatcatggtggggtggagataggggtgtgctggtggaaaaggatggataaagattatatccaaaacttgttatcttgagtttttcacatttttaaggtgaatctagttttctgtcacctcatgaagtctgttgggaagcagagtaaagaggagttattctttaagacctattttcctaatgtgcagaacttttaggaggtacttagtgaaatacagaaagagggcatgaagaagtgtgaagtgtggtgtgct

SEQ ID NO: 50398 - DNA, 190 bp, Homo sapiens
gaaaagagagcctgcatgatggaaacattttttaaaacaaaagatgtatttcaattaaaagacatggagaaggccaggtgcggtggctcatgcttgcaatagtagcactttgggaggttgatgcaggaggactgcttgaggccaggagttcaagatcaatctggccaacatagcgagatgccatctcttg

SEQ ID NO: 50399 - DNA, 207 bp, Homo sapiens
aaccaattcattcagaacttgttttttgcatagtgtgatcacaagcccccagagaaaggtgacaacagagttgtacaagagacaagcgacatgacaaacatcacgagatgctttttggtgcagataactgagtatcagctactgtcaaatacccaacaatggccaacgacgtgaatgatggagcttaaaaaacagagactatacaga

SEQ ID NO: 50400 - DNA, 676 bp, Homo sapiens
tgagcattgtggatggattactatgttgagaaatgcataacaatgatgtgtaaggcagaacagtattctagtaggacggtagaacattcttgttaccttaacaagttcccctctatctttatagttagtccctctctgttaacacccaagtcctggctgccacagatctgttttctttctctgtagattggccttttccagaatgtcatatgaatggaatcatacagtgggtggcctcttgagtcaggcttcttagcacagtgcatttgagagtcatccatttccttgtttgtatcagtagttaattccttttcattgggtgagtcgttttccattgtttggctatgatcatagttttgtttatccactcatcagttgaagggtatttggattgttttcagtttttgtcaactatgatgaaagcctccctaaacactctcatataggttttcatgttaatatattttcattgctcttgggtgaatacctagaagtagaggattgctggatcatatagcagactgcatttacctttgtaagaaactaccaggcttcttctccaaagtggctgaggcagggaaatcacttgaacctggaggcagaggttacagtgaaccttgactgcaccagtggactccagtgttggcaacagagtgagattctgtaaaacaaaaca

SEQ ID NO: 50401 - DNA, 292 bp, Homo sapiens
cctattaaactttaggtaaacaattttgtgataacatttatcccctgcccctctcccctgttgattttttctggatgaggaaagcaaggctgtgccagccacgtaactcgtgtaaggacacacaacagtgcttatgtctccatcttcaggtcaaaccactttatgaagggcctactacatgccaggcaccaggctaggtgctagggaattgaaaggacccttttcataaaaccatcatgagggtctttgtgatttagagctcttctactaaaagaaactatgcatttactcc

SEQ ID NO: 50402 - DNA, 1000 bp, Homo sapiens
gacaaaataaattaatacagatacacaaacacatgtatgcaaaattatacttttaacaaagatatatgttttacttttgaaatatgtttcatttagactgcaaaacaagcaagaagatttattatgaatcagagttgtttgtgctctcaggaaggaagataatgatctaaccaatctctttcactgggaactgttttctgaatattataaggccccagggattccagatggaatacagtataattaactcttcaccaccaaatacctatgttagaagaccttgagaataaatgattgcctaatagcaaatggcatcctacttcttgactacacttgcacctgaggatacaaaaggacaaggtgtatttaaccttagaatgtctctataagatgaaaacaagtaagtgcaattatctccacttaaagtctaaagttggcaaacacttataagataaatgacttgctcaagactgactaggaagaagagttttagtataaaaacttaaactcattatctctttttacatgggactgaatggaggattgagaatggctctttatgtggaagataacatatttaatatattttcttttgttttaaggcagtattgaaatgaaaaaagaataaacttctagattctgatagtatacatggtaataatgtaatcattttagtaataattaagctatattgggtaatttttgcatgccaaacagcgtactgcatatttacatgttaaatcattccttttatgaaattttaacaatgacaatgatgtaatagcaatgattctatgaagaatctgctaagataaagaagcctaggccaggaactgtggctcatgtctgtaacctcagcacactgggacgccaaggagggagaatagcttgaggccaggagtttgagaccagcctgggcaaaacagcctagtttctacaaaacaacccagtctctacaaaaataaaaataacataaataaataaataatcctctactcaa

SEQ ID NO: 50403 - DNA, 385 bp, Homo sapiens
cactaccccttcgctcttctgtgctctttaggctcaaatcctcagtggtcagtcccttattgaagtgccttttttccctgaaagcactctagtaaatggaggtttagcattattactgaatcccagctttttctaatacatggagctcagtgcttactgtctgttccagagcaattacttatcaccattaccggagatttgagtcctctcccttggtgattagactctgaaggatagtcgttttaattttggtagttatgatttaatcttttcaagcttttattatggacaatttcaatatcaaaagcagaaagaataatgtagttcccatggacctattcctagcttagttattacccatggccagtcttgcttcatctgtact

SEQ ID NO: 50404 - DNA, 500 bp, Homo sapiens
actgtatcatggttgtccctcacattgcttgttattgcagggacggcaaactcaaaagcttacatggaaggtaaggtggaatgcaattcaaccttactgcttaaagatctgatttttcaagagaagcaatatatccgaatttttatttaaaatctatttttaaatgctggcaaacttgtgagaaatttcttaaaacaatgtgtagaatacacaaaacatgctgacagggctgaatctggcttggaatttaaaactttacaatctactttctaaaagccacttcttgagactgccagatttttttttaagttttattttgttttctataaaaattgtgttcagagctctgctctccttgttagtctttaggatgatgttcccattcctttattatataggtattccatagactcctattgttttttgtttttattcatcctcaaataacagacctgctacttatcgcaagacagggtagaaggccaccctcagtctgtcaa

SEQ ID NO: 50405 - DNA, 1112 bp, Homo sapiens
cttgaagcagcaactactgtacctgggccccaatcctgcactctcccctggctcctcatatgcaaatcaagggctggttctgcccccacaggctgccccctccccattccctcccactcctagcctggcccctaaccacgcactttaaccttgcttctttcttttatcttcttttgggagggcagagcctgtggtcattcctgccctggctctccttcccttgaactttgaggcttgtcatgaatttttaagtaagcgttttatcctttaggggaagaaacaaattaatttcctgcccatttcaaaaccacagccctagtatgtccactgtgtttcaggcatgtgtttgcatgtatatggagggagggaccatgttcttcctcctgtgccgccaagcccatagtttatctgtgctccctatctgcctccaccttccgttatgtccaagagtacccactgccccagtcactcctgatctgaagccaaagatggtaggaggggcagggccgacaagggaccgtggctactcgggacccaggcttcccctccagtgtgaggaagaagctctgacctagagagagatgaataggtactggggcttggtccctgccttcccagcagggaggaaagatgggattgagctgggggctgcactgataagatttctaaagtcgcaccccaaaagccaaactgggctggagtgaagagggggcagttttctctctaaatgtagcattgaatttggccctggtccctttaagtgctctgtccacccatctcctagtgcagcctcctggacagttggacccactcctgcagcccagtgttcccttcctcacactcaatacctcagccaggggccaagacacagaacttgaatagaggtcatgccccctccgcccccacactgcatccttgcccagtttggctgccatcagtattgtcccctgagaactggacaggcttcgtttacacagtacagggtctcccctgaggggggatccttcagcctccctcccctactcaagtttgctttattcacagtcttacccatcttttagttgtataccctgaatgtcttgccacccttgtcaagggtgggctgaggggag

SEQ ID NO: 50406 - DNA, 561 bp, Homo sapiens
ggtaaagaaattatttgtgcttgaacttgcagaaaactgccttttcccttcttctcttgcatcttaacctggagcttcccttttcttgagcctcagtgtgcttcccaactcaatttataattgacttcctgcagtttctccttaggacagggctttgttttgggggtggttaatttgtagggttcataggaaacagaccactcacagcactgctttttgccaccctcactctcagctatgagttgaggcccaggaagccttctgccagcctcagctgctgttctcagattaatctgctgagttctttttgcctagtaagaatctctgaatttaggaacacagatgttagcacttgtatttctaggttttccagttcccagggccattaaacatttttttcctttcctttccttcttccaaaaaaattggtgattcccctgggtccctgtggtttaacctcacaaaacgtccatgatgacaccctgttacattgttttgtcgtagttaataccttgttatcccagttgctcagtcagtttttgtgagagattcagggatctt

SEQ ID NO: 50407 - DNA, 524 bp, Homo sapiens
  misc_feature (1)..(2): n is a, c, g, or t
  misc_feature (4)..(5): n is a, c, g, or t
  misc_feature (7)..(7): n is a, c, g, or t
  misc_feature (9)..(9): n is a, c, g, or t
nntnntntntactttgaataatcttttatttccaattaactatgaaacaaacagttcagaaaaattccatgttgattttgcaaaaattttttttcttttgtatttttagtagagagggggtttcaccatgttggtcaggctagtcttgaactcctggcctcaggtgatccacctgccttggcctcccaaagtgctgggattacaggtgcgagccactgcacccagccaagaatttcagctccttggtgttaagagattattctttcatcaacagtgattagccaaaaacaacaaaaaaaggcttcaacggcccctttccaattctaatctcttcttcaggtacagagagcccggaggggccagatgccgtattgagacagggctcaggtgaggctcttaggcacgcagctgaagggagttcaccggcccagagggttgaagaccaacactaacattatgaacaaggcaggagttcctgctaacacacctcccactccctttcccttctcagatagaacccaact

SEQ ID NO: 50408 - DNA, 614 bp, Homo sapiens
  misc_feature (607)..(607): n is a, c, g, or t
  misc_feature (611)..(612): n is a, c, g, or t
atttgatcctttctagcattttggttttttccagacaaaaatctgtgtctataactcttgcctttattgttccttttatgtcatttatcaaggaaatctaagcatttcatgaagttctttgtttaaatgtttaccctatttttctctttactgttattcaaaatacaaactatttgtgtcttctcataaatgttcagtttagttagtgtgatgcggttatgcctccttaaaatttcaaactggaagataggaacgaggaggctacaaggtgtagtggagcaagcactggatgggcaatgcagcaatttacttataagacttcagcaaatgaactagctgtgtgactttaggcaagtcacttccctacactagatgcttcttgaaattccttttggccaaaatgttctatactttaatgaaatggaaactgatctacttcattttcataatgttttatttgtatccatacatatcaaaattataatgtagctggtattaaatgtttttaaaaagcatttcaactctatttatggcattaagaatttttttgctgatttcttgaaagaaataaaaagtacatgatttctgcttgtgtgtaaataagaanaaannaa

SEQ ID NO: 50409 - DNA, 344 bp, Homo sapiens
taccttattcaccccaggaagctaacttccatgtctcctggcttccagttgttaaccagtcgggagctctggcaagctataggagagaatggggacagaatatttctcctgctgtgcccttccctccagaattatgtcaggttggcttgtccctctgttgaagggtaacacttctctccaggaagccttctctccacaacacatttaccaacaactggtccctctggctgtagggatggcaacagctctgcttttgctagccccaggtaactgcactatctcttatgattctcttatatagcacctgtaccttcataattaatgtctttataagtgagcccccc

SEQ ID NO: 50410 - DNA, 387 bp, Homo sapiens
tcttatattttttaaaaagtatcatttttgtttgtcccaaattgtggttttggtttccctggagttaactagtatgtttcaaggactggataaaaggaaaagagctggacaacaagtggtcttcaaggtccgtttgttattcagttactcaaccatttttccaaggcaacaatgggcaatcctagctccaaaaggctgataaccactggtccagtccagtggttttcaattcactttagctgtggcatcctttctttgtgggtggcagaagagaatatgacatggtctctgaccataatgatacctgcctgagtataatcaaaatatgtgtcctccagaacctaccccaataagtataaaccctggggaatctgcccttccacggaa

SEQ ID NO: 50411 - DNA, 858 bp, Homo sapiens
aatagaagaatccaatttcttgccttgggttactgactctttcaattgtaactaagtacaatagcagttaagctcaagctgtaatagtagagctcagtggaagctaaaccaggcacagtaactgacaccatgtaggttgattatattttgcatctccctgcaagtctgttttatgttatttatagcttcctattcgtgtagacaccagcagtaaactggggaatatttgtggcaggaatttctaagaacaacctttagcatcatctcaggccctgatccatttccttttccacaaaattgtttgagattatatcgtatgtgttacagaaagaatgtttttctgtatgctcgaaactgtatactaaagtaaaataataaagttaaccagaattatccatggggaacaattccaattaaaataaaatgccagtatctggtaaaacctggtagtaatgctttttgtggtgatatccaggtaatgattagatgcagtaaacccgggtagtagggaagaagagagatgtggggacaagcagcccgaataccttgctggcatagcagctgcctacctgcacccggagacctgagcagatattactagggtattatttgacagccagcttagcagtcaagaaggacattgatttggggtagcatggcagaccacttcattggggctgaagacctgcatttattgatcacttactacatgccacgtatttcgtttaggatatatatgtgtgcatgtgtataattttaaaatataccccacggtagaggcagagctgttggcagtgagccgagatcgcgccactgcattccagcctgagcgacagagcgagactctgtctcaaaaaa

SEQ ID NO: 50412 - DNA, 967 bp, Homo sapiens
gtggtgaaaattagagagtcctactttctaaataatccaaggtgttgcataaattggtatctcagaggaataaactagcatttcatttcaaatttcaagtctttatcaaggattttacaatttaaagttacacatttgttataggaaaattaaatgcttcacttttgttttgttttgttttgttttgtaatgcagaaaaatatgatccattattcatgcaccctgatctgtcttgtggaacacacactagtagctgtgggcacattatgcatgcccattgttggcaaaggtaatgtatattcttaatatttgtcaagagaagtttatctaagggctcaatattttttaaatagaggaaatttcattctagaaaaaaggaaaagaactaaaaatgttgaaaaaatccgtatcattgcctaataaataacaaaagttatttgccctgtcatagatgtaaagtgtatgtcagatatgttttttaatttagctttatatccaagtctcttctatatcttccaaagaaggaagtggatctgtatcagtctgtggatgaagaaaagggtttttacagtaggataaactctagaagggtaatgttgtctttctttgggtccagggtggacaacttttgattccatagatgttagtacttgctttgttacttcccaaaattgtaatggctccctgtgatgagatgtcctgaatttgttctaccttggtgtttcctatgcttctacaaaaccaacaaatcaataataccattattctagaactatgctcacccagttatcatgaactacccctaacaactagccaccacattgtagtcccagctacttgggaggctgagacgggagaattgcttgaatgtgggaggtggaggttgcagtgaaccaagattgtgcaactgcactccagcctgggcgacagagcaagactccatctcaaaaacaacaacaacaacaaa

SEQ ID NO: 50413 - DNA, 6151 bp, Homo sapiens
  misc_feature (1)..(1): n is a, c, g, or t
  misc_feature (5)..(5): n is a, c, g, or t
ntcangtatgtgttaattagcaaaccaactgaatggtcagatgagctgaggcagaagttcctagaagggtttgatgcctttttggaattactaaaatgtatgcagtccaattacacgtcaagtaggacaacatattgaaatggaaccagagtgggaagcagccttcacactacaaatgaaattaacacatgtcatttcaatgatgcaggactggtgtgcttcagatgaaaaagtgttaatcgaagcttacaagaaatgtctcgctgtactgatgcagtgtcatggtggttatactgatggtgaacagccaatcacactaagcatttgtggacattcagtggaaactatcagatactgtgtttcccaagaaaaagttagcattcacctcccagtttctcgcttacttgcaggtttacatgtattattaagcaaaagtgaagtggcatataaatttccagagctcctacctctaagtgaacttagcccacccatgttgatagaacaccctcttagatgtcttgttctgtgtgcccaagtacatgccggaatgtggagaagaaatgggttctctctagtaaaccagatttattactaccataatgtgaaatgcagacgtgagatgtttgacaaggatgtagtaatgcttcagacaggtgtctccatgatggatccaaatcatttcctgatgatcatgctcagccgctttgaactttatcagattttcagtactccagactatggaaaaagatttagttctgagattacccataaggatgttgttcagcagaacaatactctaatagaagaaatgctatacctcattataatgcttgttggagagagatttagtcctggagttggacaggtaaatgctacagatgaaatcaagcgagagattatccatcagttgagtatcaagcctatggctcatagtgaattggtaaagtctttacctgaagatgagaacaaggagactggcatggagagtgtaatcgaagcagttgcccatttcaagaaacctggattaacaggacgaggcatgtatgaactgaaaccagaatgtgccaaagagttcaacttgtatttctatcacttttcaagggcagaacagtccaaggcagaagaagcgcaacggaaattgaaaagacaaaatagagaagatacagcactcccacctccggtgttgcctccattctgccctctgtttgcaagcctggttaacattttgcagtcagatgtcatgttgtgcatcatgggaacaattctgcaatgggctgtggaacataatggatatgcctggtcagagtccatgctgcaaagggtgttacatttaattggcatggcactacaagaagaaaaacaacatttagagaatgtcacggaagagcatgtagtaacatttaccttcactcagaagatatcaaaacctggtgaagcgccaaaaaattctcctagcatactagctatgctggaaacactacaaaatgctccctacctagaagtccacaaagacatgattcggtggatattgaagacttttaatgctgttaaaaagatgagggagagttcacctaccagtcccgtggcagagacagaaggaaccataatggaagagagttcaagggacaaagacaaagctgagaggaagagaaaagcagagattgccagactgcgcagagaaaagatcatggctcagatgtctgaaatgcagcggcattttattgatgaaaacaaagaactctttcagcagacattagaactggatgcctcaacctctgctgttcttgatcatagccctgtggcttcagatatgacacttacagcactgggccccacacaaactcaggttcctgaacaaagacaattcgttacatgtatattgtgtcaagaggagcaagaagttaaagtggaaagcagggcaatggtcttggcagcatttgttcagagatcaactgtattatcaaaaaacagaagtaaatttattcaagatccagaaaaatatgatccattattcatgcaccctgatctgtcttgtggaacacacactagtagctgtgggcacattatgcatgcccattgttggcaaaggtattttgattccgttcaagctaaagaacagcgaaggcaacagagattacgcttacatacgagctatgatgtagaaaacggagaattcctttgccccctttgtgaatgcttgagtaatactgttattcctctgctgcttcctccaagaaatatttttaacaacaggttaaatttttcagaccaaccaaatctgactcagtggattagaacaatatctcagcaaataaaagcattacagtttcttaggaaagaagaaagtactcctaataatgcctctacaaagaattcagaaaatgtggatgaattacagctccctgaagggttcaggcctgattttcgtcctaagatcccttattctgagagcataaaagaaatgctaacgacatttggaactgctacctacaaggtgggactaaaggttcatcccaatgaagaggatcctcgtgttcccataatgtgttggggtagctgcgcgtacaccatccaaagcatagaaagaattttgagtgatgaagataaaccattgtttggtcctttaccttgcagactggatgactgtcttaggtcattgacgagatttgccgcagcacactggacagtggcatcagtttcagtggtgcaaggacatttttgtaaactttttgcatcactggtgcctaatgacagccatgaggaacttccatgcatattagatattgacatgtttcatttattggtgggcttggtgcttgcatttcctgcgttgcagtgtcaggatttttcagggatcagccttggcactggagaccttcacattttccatctggttactatggcacacatcatacagatcttacttacctcatgtacagaagagaatggcatggatcaagaaaatcccccttgtgaagaagaatcagcagttcttgctttgtataaaacacttcaccagtatacgggaagtgccttgaaagaaataccatccggctggcatctgtggaggagtgtcagagctggaatcatgcctttcctgaagtgttctgctttattttttcattacttaaatggagttccttccccacccgacattcaagttcctggaacaagccattttgaacatttatgtagctatctttccctaccaaacaacctcatttgcctttttcaagaaaatagtgagataatgaattcactgattgaaagttggtgccgtaacagtgaagttaaaagatatctagaaggtgaaagagatgctataagatatccaagagaatctaacaaattaataaaccttccagaggattacagcagcctcattaatcaagcatccaatttctcgtgcccgaaatcaggtggtgataagagcagagccccaactctgtgccttgtgtgcggatctctgctgtgctcccagagttactgctgccagactgaactggaaggggaggatgtaggagcctgcacagctcacacctactcctgtggctctggagtgggcatcttcctgagagtacgggaatgtcaggtgctatttttagctggcaaaaccaaaggctgtttttattctcctccttaccttgatgactatggggagaccgaccagggactcagacggggaaatcctttacatttatgcaaagagcgattcaagaagattcagaagctctggcaccaacacagtgtcacagaggaaattggacatgcacaggaagccaatcagacactggttggcattgactggcaacatttataattattgcaccaccaaaaaacacaaacttggatttttttaacccagttggctttttaagaaagaaagaagttctgctgaatttggaaataaattctttatttaaactttccttcccagttttatagtttctggttctgaggactgatgaaaatcatcttccatcagcagattttcttgcactgtttgctgtgcccctcaaatataatgtcttgggttttaagatcgagcaaggagcttctcttcctagattggatcccagcccctttgtgggggtctgactgcatagtcccagccattatgtgatatttcacgttattgatgatagtgaaccgtgggtccgaagctgactcaacggaggcagggaacaaagtctctgtggtctgttgggtcatacttcctggttccactgagtggcccaacactgggactgggttggtgtcccctctgctgacaggaccctactcctaggagcaaagtggttgattttgaaggcagtgttcccttctctccattgactatgagagagttgggggacacacatgcagaagaagcccgtggggagaaggtggattcctggtgtgctggctggtttttcagggctgttagaggttttttttttcttttttttttttatggcaagacttttggctttgagaaaactcacttagagggctttccaaaaacttaggatggtctaaaaaattaggatattcttttagaattaggaagaaaaattaggatattctaaaagaatatggattaaaaatttaggatattcttttagatatcctaatatctagatgagaggccttccttcataagatctggttgtttgggctgtggttggcataagtgatatttattttggcctctgtcacatccagtttcttgagcttttaaggtaagcttcttttggctttttttcagatgttcaccaagcttaagtttaaaataataggtattctaaaagagtatcctaattttcttatctgtattcttttagaataccctaatgtttcagacagtgatattctcttgttatttctaaggctaaattggcagagtatatcatctaaagccaaacactgaagaaggtgagaacccactcccacccagccagcatttcctggaacagacaagctgctgcttccttgctggctcacttagtgcattcctgggatggtctggcacccaggctttttattctttttgatcattgttcttactgaggtgccttcctagaacaagagccacttacaaaatagcttataattattatgtaccacacaactactattgtttgatgtatgactgctgagagcttgaatacatgcagagagtgactgaagacttagtagaggaataaattctgagcctgtctaaggtggggctaaggaacagatgagtaataagaggctcttggatttttttaaccaatgcaactgaccctttcaatcagttttctttgaattacatctacaagttttgttccactcagctaccagtcaactaggcatgctccacagtatcacaggaagaaggtcagaaatctggaactgaagctaaaagaagtgaggatgtagaagccacattcctctccaaggtagtgtgtgaaagaaccgccccctcttgacaggaggatgaccgtcgccattcttgcgtgggactgactcacccagctgagaggaggaccaatagaaagaaaattcacatttgagtccacctctctccccctttttctgaccttcattcataagatctggttgtttgggctgtaggtggcataattcatgtttattttggcctctgtcacatccagtttctttagcttttaaggtaagcttcttttggctttttttcatatgttcaccaagctaaaatttaaaataataagaccaggtttctctctctacaagtggattataaacattttcaccaaatcataacaatactccagctttccggtccgacttcctaggagcctggagttagcaaaggttgtctctggatttcattctctgagaatatcacagagcctgggagaagatgaatttacatgaaattgcaacatacacacctttttattttctggtgttaagctagttgtctttcctaccttacaaatcatgttagttttatgatttgttccgcatgttttatgtttattgtagaaatgtttatataacatacgctttccatatcagggaaaatcatatctgtttaataaattggctataactttaatatctgtggacaacttgtaaaatttggaatgtatcatatgtaaaaagtttaaagatatccaaataaatgctttaggtgttggcatta

SEQ ID NO: 50414 - DNA, 744 bp, Homo sapiens
tactcttttagaacttttaatccatttggatttttaaaatcactcaaaaatcatgttaaaaataatttagtttaagattttcatttttgaactatttgtggaaacaaattattttaaatgttgaagcttatggctgtcatttatgtaaattaccattgttttgatacctcatgttctctaattgtaaaggtattttgattccgttcaagctaaagaacagcgaaggcaacagagattacgcttacatacgagctatgatgtagaaaacggagaattcctttgccccctttgtgaatgcttgagtaatactgttattcctctgctgcttcctccaagaaatatttttaacaagtaagttttggctcatgacaactattacaaagcaatagtttgctttgaagataatgaaataataaatcaaggaggaaaacttagtctaggcaattgcatagtgttttccagatattttccaaactctaatcattttcttctagcagacctgtggaatgtgattttagtttttagagaggaacaggtgaaaatttaacagtttctaagctattaaattcctatgtatttatgaaaaccaagtatctggtttatttctagggaccctacttttaatatcttccatacacttttcaagagatgctcagtaaactggtagagggagatggaacaactcaaactgactttataggacagtctaaaaatcgaataaaactttttgctgtactggccatt

SEQ ID NO: 50415 - DNA, 6107 bp, Homo sapiens
aatagctgggagagtctagaggttgtgcttttgatactaaatgtatgaggatgatcactactccaattacacgtcaagtaggacaacatattgaaatggaaccagagtgggaagcagccttcacactacaaatgaaattaacacatgtcatttcaatgatgcaggactggtgtgcttcagatgaaaaagtgttaatcgaagcttacaagaaatgtctcgctgtactgatgcagtgtcatggtggttatactgatggtgaacagccaatcacactaagcatttgtggacattcagtggaaactatcagatactgtgtttcccaagaaaaagttagcattcacctcccagtttctcgcttacttgcaggtttacatgtattattaagcaaaagtgaagtggcatataaatttccagagctcctacctctaagtgaacttagcccacccatgttgatagaacaccctcttagatgtcttgttctgtgtgcccaagtacatgccggaatgtggagaagaaatgggttctctctagtaaaccagatttattactaccataatgtgaaatgcagacgtgagatgtttgacaaggatgtagtaatgcttcagacaggtgtctccatgatggatccaaatcatttcctgatgatcatgctcagccgctttgaactttatcagattttcagtactccagactatggaaaaagatttagttctgagattacccataaggatgttgttcagcagaacaatactctaatagaagaaatgctatacctcattataatgcttgttggagagagatttagtcctggagttggacaggtaaatgctacagatgaaatcaagcgagagattatccatcagttgagtatcaagcctatggctcatagtgaattggtaaagtctttacctgaagatgagaacaaggagactggcatggagagtgtaatcgaagcagttgcccatttcaagaaacctggattaacaggacgaggcatgtatgaactgaaaccagaatgtgccaaagagttcaacttgtatttctatcacttttcaagggcagaacagtccaaggcagaagaagcgcaacggaaattgaaaagacaaaatagagaagatacagcactcccacctccggtgttgcctccattctgccctctgtttgcaagcctggttaacattttgcagtcagatgtcatgttgtgcatcatgggaacaattctgcaatgggctgtggaacataatggatatgcctggtcagagtccatgctgcaaagggtgttacatttaattggcatggcactacaagaagaaaaacaacatttagagaatgtcacggaagagcatgtagtaacatttaccttcactcagaagatatcaaaacctggtgaagcgccaaaaaattctcctagcatactagctatgctggaaacactacaaaatgctccctacctagaagtccacaaagacatgattcggtggatattgaagacttttaatgctgttaaaaagatgagggagagttcacctaccagtcccgtggcagagacagaaggaaccataatggaagagagttcaagggacaaagacaaagctgagaggaagagaaaagcagagattgccagactgcgcagagaaaagatcatggctcagatgtctgaaatgcagcggcattttattgatgaaaacaaagaactctttcagcagacattagaactggatgcctcaacctctgctgttcttgatcatagccctgtggcttcagatatgacacttacagcactgggccccacacaaactcaggttcctgaacaaagacaattcgttacatgtatattgtgtcaagaggagcaagaagttaaagtggaaagcagggcaatggtcttggcagcatttgttcagagatcaactgtattatcaaaaaacagaagtaaatttattcaagatccagaaaaatatgatccattattcatgcaccctgatctgtcttgtggaacacacactagtagctgtgggcacattatgcatgcccattgttggcaaaggtattttgattccgttcaagctaaagaacagcgaaggcaacagagattacgcttacatacgagctatgatgtagaaaacggagaattcctttgccccctttgtgaatgcttgagtaatactgttattcctctgctgcttcctccaagaaatatttttaacaacaggttaaatttttcagaccaaccaaatctgactcagtggattagaacaatatctcagcaaataaaagcattacagtttcttaggaaagaagaaagtactcctaataatgcctctacaaagaattcagaaaatgtggatgaattacagctccctgaagggttcaggcctgattttcgtcctaagatcccttattctgagagcataaaagaaatgctaacgacatttggaactgctacctacaaggtgggactaaaggttcatcccaatgaagaggatcctcgtgttcccataatgtgttggggtagctgcgcgtacaccatccaaagcatagaaagaattttgagtgatgaagataaaccattgtttggtcctttaccttgcagactggatgactgtcttaggtcattgacgagatttgccgcagcacactggacagtggcatcagtttcagtggtgcaaggacatttttgtaaactttttgcatcactggtgcctaatgacagccatgaggaacttccatgcatattagatattgacatgtttcatttattggtgggcttggtgcttgcatttcctgcgttgcagtgtcaggatttttcagggatcagccttggcactggagaccttcacattttccatctggttactatggcacacatcatacagatcttacttacctcatgtacagaagagaatggcatggatcaagaaaatcccccttgtgaagaagaatcagcagttcttgctttgtataaaacacttcaccagtatacgggaagtgccttgaaagaaataccatccggctggcatctgtggaggagtgtcagagctggaatcatgcctttcctgaagtgttctgctttattttttcattacttaaatggagttccttccccacccgacattcaagttcctggaacaagccattttgaacatttatgtagctatctttccctaccaaacaacctcatttgcctttttcaagaaaatagtgagataatgaattcactgattgaaagttggtgccgtaacagtgaagttaaaagatatctagaaggtgaaagagatgctataagatatccaagagaatctaacaaattaataaaccttccagaggattacagcagcctcattaatcaagcatccaatttctcgtgcccgaaatcaggtggtgataagagcagagccccaactctgtgccttgtgtgcggatctctgctgtgctcccagagttactgctgccagactgaactggaaggggaggatgtaggagcctgcacagctcacacctactcctgtggctctggagtgggcatcttcctgagagtacgggaatgtcaggtgctatttttagctggcaaaaccaaaggctgtttttattctcctccttaccttgatgactatggggagaccgaccagggactcagacggggaaatcctttacatttatgcaaagagcgattcaagaagattcagaagctctggcaccaacacagtgtcacagaggaaattggacatgcacaggaagccaatcagacactggttggcattgactggcaacatttataattattgcaccaccaaaaaacacaaacttggatttttttaacccagttggctttttaagaaagaaagaagttctgctgaatttggaaataaattctttatttaaactttccttcccagttttatagtttctggttctgaggactgatgaaaatcatcttccatcagcagattttcttgcactgtttgctgtgcccctcaaatataatgtcttgggttttaagatcgagcaaggagcttctcttcctagattggatcccagcccctttgtgggggtctgactgcatagtcccagccattatgtgatatttcacgttattgatgatagtgaaccgtgggtccgaagctgactcaacggaggcagggaacaaagtctctgtggtctgttgggtcatacttcctggttccactgagtggcccaacactgggactgggttggtgtcccctctgctgacaggaccctactcctaggagcaaagtggttgattttgaaggcagtgttcccttctctccattgactatgagagagttgggggacacacatgcagaagaagcccgtggggagaaggtggattcctggtgtgctggctggtttttcagggctgttagaggttttttttttcttttttttttttatggcaagacttttggctttgagaaaactcacttagagggctttccaaaaacttaggatggtctaaaaaattaggatattcttttagaattaggaagaaaaattaggatattctaaaagaatatggattaaaaatttaggatattcttttagatatcctaatatctagatgagaggccttccttcataagatctggttgtttgggctgtggttggcataagtgatatttattttggcctctgtcacatccagtttcttgagcttttaaggtaagcttcttttggctttttttcagatgttcaccaagcttaagtttaaaataataggtattctaaaagagtatcctaattttcttatctgtattcttttagaataccctaatgtttcagacagtgatattctcttgttatttctaaggctaaattggcagagtatatcatctaaagccaaacactgaagaaggtgagaacccactcccacccagccagcatttcctggaacagacaagctgctgcttccttgctggctcacttagtgcattcctgggatggtctggcacccaggctttttattctttttgatcattgttcttactgaggtgccttcctagaacaagagccacttacaaaatagcttataattattatgtaccacacaactactattgtttgatgtatgactgctgagagcttgaatacatgcagagagtgactgaagacttagtagaggaataaattctgagcctgtctaaggtggggctaaggaacagatgagtaataagaggctcttggatttttttaaccaatgcaactgaccctttcaatcagttttctttgaattacatctacaagttttgttccactcagctaccagtcaactaggcatgctccacagtatcacaggaagaaggtcagaaatctggaactgaagctaaaagaagtgaggatgtagaagccacattcctctccaaggtagtgtgtgaaagaaccgccccctcttgacaggaggatgaccgtcgccattcttgcgtgggactgactcacccagctgagaggaggaccaatagaaagaaaattcacatttgagtccacctctctccccctttttctgaccttcattcataagatctggttgtttgggctgtaggtggcataattcatgtttattttggcctctgtcacatccagtttctttagcttttaaggtaagcttcttttggctttttttcatatgttcaccaagctaaaatttaaaataataagaccaggtttctctctctacaagtggattataaacattttcaccaaatcataacaatactccagctttccggtccgacttcctaggagcctggagttagcaaaggttgtctctggatttcattctctgagaatatcacagagcctgggagaagatgaatttacatgaaattgcaacatacacacctttttattttctggtgttaagctagttgtctttcctaccttacaaatcatgttagttttatgatttgttccgcatgttttatgtttattgtagaaatgtttatataacatacgctttccatatcagggaaaatcatatctgtttaataaattggctataactttaatatctgtggacaacttgtaaaatttggaatgtatcatatgtaaaaagtttaaagatatccaaataaatgctttaggtgttggcatta

SEQ ID NO: 50416 - DNA, 4792 bp, Homo sapiens
tctacattaagtggccagttactcacaacatttaaattccaagaaatatgccactatttatctctatttgttgtagcaattttttgtctgctttttttctttaaaacaagtcagtttaagagtcttttctcttatttaaataagtgagattatagaatagttttttaattggtatttacagtgaagatatttctgctttggaaaaaaatgtgcgttttagcatctaattgtctaattgaatggagcataatttcagagttcaagggacaaagacaaagctgagaggaagagaaaagcagagattgccagactgcgcagagaaaagatcatggctcagatgtctgaaatgcagcggcattttattgatgaaaacaaagaactctttcagcagacattagaactggatgcctcaacctctgctgttcttgatcatagccctgtggcttcagatatgacacttacagcactgggccccacacaaactcaggttcctgaacaaagacaattcgttacatgtatattgtgtcaagaggagcaagaagttaaagtggaaagcagggcaatggtcttggcagcatttgttcagagatcaactgtattatcaaaaaacagaagtaaatttattcaagatccagaaaaatatgatccattattcatgcaccctgatctgtcttgtggaacacacactagtagctgtgggcacattatgcatgcccattgttggcaaaggtattttgattccgttcaagctaaagaacagcgaaggcaacagagattacgcttacatacgagctatgatgtagaaaacggagaattcctttgccccctttgtgaatgcttgagtaatactgttattcctctgctgcttcctccaagaaatatttttaacaacaggttaaatttttcagaccaaccaaatctgactcagtggattagaacaatatctcagcaaataaaagcattacagtttcttaggaaagaagaaagtactcctaataatgcctctacaaagaattcagaaaatgtggatgaattacagctccctgaagggttcaggcctgattttcgtcctaagatcccttattctgagagcataaaagaaatgctaacgacatttggaactgctacctacaaggtgggactaaaggttcatcccaatgaagaggatcctcgtgttcccataatgtgttggggtagctgcgcgtacaccatccaaagcatagaaagaattttgagtgatgaagataaaccattgtttggtcctttaccttgcagactggatgactgtcttaggtcattgacgagatttgccgcagcacactggacagtggcatcagtttcagtggtgcaaggacatttttgtaaactttttgcatcactggtgcctaatgacagccatgaggaacttccatgcatattagatattgacatgtttcatttattggtgggcttggtgcttgcatttcctgcgttgcagtgtcaggatttttcagggatcagccttggcactggagaccttcacattttccatctggttactatggcacacatcatacagatcttacttacctcatgtacagaagagaatggcatggatcaagaaaatcccccttgtgaagaagaatcagcagttcttgctttgtataaaacacttcaccagtatacgggaagtgccttgaaagaaataccatccggctggcatctgtggaggagtgtcagagctggaatcatgcctttcctgaagtgttctgctttattttttcattacttaaatggagttccttccccacccgacattcaagttcctggaacaagccattttgaacatttatgtagctatctttccctaccaaacaacctcatttgcctttttcaagaaaatagtgagataatgaattcactgattgaaagttggtgccgtaacagtgaagttaaaagatatctagaaggtgaaagagatgctataagatatccaagagaatctaacaaattaataaaccttccagaggattacagcagcctcattaatcaagcatccaatttctcgtgcccgaaatcaggtggtgataagagcagagccccaactctgtgccttgtgtgcggatctctgctgtgctcccagagttactgctgccagactgaactggaaggggaggatgtaggagcctgcacagctcacacctactcctgtggctctggagtgggcatcttcctgagagtacgggaatgtcaggtgctatttttagctggcaaaaccaaaggctgtttttattctcctccttaccttgatgactatggggagaccgaccagggactcagacggggaaatcctttacatttatgcaaagagcgattcaagaagattcagaagctctggcaccaacacagtgtcacagaggaaattggacatgcacaggaagccaatcagacactggttggcattgactggcaacatttataattattgcaccaccaaaaaacacaaacttggatttttttaacccagttggctttttaagaaagaaagaagttctgctgaatttggaaataaattctttatttaaactttccttcccagttttatagtttctggttctgaggactgatgaaaatcatcttccatcagcagattttcttgcactgtttgctgtgcccctcaaatataatgtcttgggttttaagatcgagcaaggagcttctcttcctagattggatcccagcccctttgtgggggtctgactgcatagtcccagccattatgtgatatttcacgttattgatgatagtgaaccgtgggtccgaagctgactcaacggaggcagggaacaaagtctctgtggtctgttgggtcatacttcctggttccactgagtggcccaacactgggactgggttggtgtcccctctgctgacaggaccctactcctaggagcaaagtggttgattttgaaggcagtgttcccttctctccattgactatgagagagttgggggacacacatgcagaagaagcccgtggggagaaggtggattcctggtgtgctggctggtttttcagggctgttagaggttttttttttcttttttttttttatggcaagacttttggctttgagaaaactcacttagagggctttccaaaaacttaggatggtctaaaaaattaggatattcttttagaattaggaagaaaaattaggatattctaaaagaatatggattaaaaatttaggatattcttttagatatcctaatatctagatgagaggccttccttcataagatctggttgtttgggctgtggttggcataagtgatatttattttggcctctgtcacatccagtttcttgagcttttaaggtaagcttcttttggctttttttcagatgttcaccaagcttaagtttaaaataataggtattctaaaagagtatcctaattttcttatctgtattcttttagaataccctaatgtttcagacagtgatattctcttgttatttctaaggctaaattggcagagtatatcatctaaagccaaacactgaagaaggtgagaacccactcccacccagccagcatttcctggaacagacaagctgctgcttccttgctggctcacttagtgcattcctgggatggtctggcacccaggctttttattctttttgatcattgttcttactgaggtgccttcctagaacaagagccacttacaaaatagcttataattattatgtaccacacaactactattgtttgatgtatgactgctgagagcttgaatacatgcagagagtgactgaagacttagtagaggaataaattctgagcctgtctaaggtggggctaaggaacagatgagtaataagaggctcttggatttttttaaccaatgcaactgaccctttcaatcagttttctttgaattacatctacaagttttgttccactcagctaccagtcaactaggcatgctccacagtatcacaggaagaaggtcagaaatctggaactgaagctaaaagaagtgaggatgtagaagccacattcctctccaaggtagtgtgtgaaagaaccgccccctcttgacaggaggatgaccgtcgccattcttgcgtgggactgactcacccagctgagaggaggaccaatagaaagaaaattcacatttgagtccacctctctccccctttttctgaccttcattcataagatctggttgtttgggctgtaggtggcataattcatgtttattttggcctctgtcacatccagtttctttagcttttaaggtaagcttcttttggctttttttcatatgttcaccaagctaaaatttaaaataataagaccaggtttctctctctacaagtggattataaacattttcaccaaatcataacaatactccagctttccggtccgacttcctaggagcctggagttagcaaaggttgtctctggatttcattctctgagaatatcacagagcctgggagaagatgaatttacatgaaattgcaacatacacacctttttattttctggtgttaagctagttgtctttcctaccttacaaatcatgttagttttatgatttgttccgcatgttttatgtttattgtagaaatgtttatataacatacgctttccatatcagggaaaatcatatctgtttaataaattggctataactttaatatctgtggacaacttgtaaaatttggaatgtatcatatgtaaaaagtttaaagatatccaaataaatgctttaggtgttggcatta

SEQ ID NO: 50417 - DNA, 5602 bp, Homo sapiens
aatagctgggagagtctagaggttgtgcttttgatactaaatgtatgaggatgatcactactccaattacacgtcaagtaggacaacatattgaaatggaaccagagtgggaagcagccttcacactacaaatgaaattaacacatgtcatttcaatgatgcaggactggtgtgcttcagatgaaaaagtgttaatcgaagcttacaagaaatgtctcgctgtactgatgcagtgtcatggtggttatactgatggtgaacagccaatcacactaagcatttgtggacattcagtggaaactatcagatactgtgtttcccaagaaaaagttagcattcacctcccagtttctcgcttacttgcaggtttacatgtattattaagcaaaagtgaagtggcatataaatttccagagctcctacctctaagtgaacttagcccacccatgttgatagaacaccctcttagatgtcttgttctgtgtgcccaagtacatgccggaatgtggagaagaaatgggttctctctagtaaaccagatttattactaccataatgtgaaatgcagacgtgagatgtttgacaaggatgtagtaatgcttcagacaggtgtctccatgatggatccaaatcatttcctgatgatcatgctcagccgctttgaactttatcagattttcagtactccagactatggaaaaagatttagttctgagattacccataaggatgttgttcagcagaacaatactctaatagaagaaatgctatacctcattataatgcttgttggagagagatttagtcctggagttggacaggtaaatgctacagatgaaatcaagcgagagattatccatcagttgagtatcaagcctatggctcatagtgaattggtaaagtctttacctgaagatgagaacaaggagactggcatggagagtgtaatcgaagcagttgcccatttcaagaaacctggattaacaggacgaggcatgtatgaactgaaaccagaatgtgccaaagagttcaacttgtatttctatcacttttcaagggcagaacagtccaaggcagaagaagcgcaacggaaattgaaaagacaaaatagagaagatacagcactcccacctccggtgttgcctccattctgccctctgtttgcaagcctggttaacattttgcagtcagatgtcatgttgtgcatcatgggaacaattctgcaatgggctgtggaacataatggatatgcctggtcagagtccatgctgcaaagggtgttacatttaattggcatggcactacaagaagaaaaacaacatttagagaatgtcacggaagagcatgtagtaacatttaccttcactcagaagatatcaaaacctggtgaagcgccaaaaaattctcctagcatactagctatgctggaaacactacaaaatgctccctacctagaagtccacaaagacatgattcggtggatattgaagacttttaatgctgttaaaaagatgagggagagttcacctaccagtcccgtggcagagacagaaggaaccataatggaagagagttcaagggacaaagacaaagctgagaggaagagaaaagcagagattgccagactgcgcagagaaaagatcatggctcagatgtctgaaatgcagcggcattttattgatgaaaacaaagaactctttcagcagacattagaactggatgcctcaacctctgctgttcttgatcatagccctgtggcttcagatatgacacttacagcactgggccccacacaaactcaggttcctgaacaaagacaattcgttacatgtatattgtgtcaagaggagcaagaagttaaagtggaaagcagggcaatggtcttggcagcatttgttcagagatcaactgtattatcaaaaaacagaagtaaatttattcaagatccagaaaaatatgatccattattcatgcaccctgatctgtcttgtggaacacacactagtagctgtgggcacattatgcatgcccattgttggcaaaggtattttgattccgttcaagctaaagaacagcgaaggcaacagagattacgcttacatacgagctatgatgtagaaaacggagaattcctttgccccctttgtgaatgcttgagtaatactgttattcctctgctgcttcctccaagaaatatttttaacaacaggttaaatttttcagaccaaccaaatctgactcagtggattagaacaatatctcagcaaataaaagcattacagtttcttaggaaagaagaaagtactcctaataatgcctctacaaagaattcagaaaatgtggatgaattacagctccctgaagggttcaggcctgattttcgtcctaagatcccttattctgagagcataaaagaaatgctaacgacatttggaactgctacctacaaggtgggactaaaggttcatcccaatgaagaggatcctcgtgttcccataatgtgttggggtagctgcgcgtacaccatccaaagcatagaaagaattttgagtgatgaagataaaccattgtttggtcctttaccttgcagactggatgactgtcttaggtcattgacgagatttgccgcagcacactggacagtggcatcagtttcagtggtgcaaggacatttttgtaaactttttgcatcactggtgcctaatgacagccatgaggaacttccatgcatattagatattgacatgtttcatttattggtgggcttggtgcttgcatttcctgcgttgcagtgtcaggatttttcagggatcagccttggcactggagaccttcacattttccatctggttactatggcacacatcatacagatcttacttacctcatgtacagaagagaatggcatggatcaagaaaatcccccttgtgaagaagaatcagcagttcttgctttgtataaaacacttcaccagtatacgggaagtgccttgaaagaaataccatccggctggcatctgtggaggaagtacgggaatgtcaggtgctatttttagctggcaaaaccaaaggctgtttttattctcctccttaccttgatgactatggggagaccgaccagggactcagacggggaaatcctttacatttatgcaaagagcgattcaagaagattcagaagctctggcaccaacacagtgtcacagaggaaattggacatgcacaggaagccaatcagacactggttggcattgactggcaacatttataattattgcaccaccaaaaaacacaaacttggatttttttaacccagttggctttttaagaaagaaagaagttctgctgaatttggaaataaattctttatttaaactttccttcccagttttatagtttctggttctgaggactgatgaaaatcatcttccatcagcagattttcttgcactgtttgctgtgcccctcaaatataatgtcttgggttttaagatcgagcaaggagcttctcttcctagattggatcccagcccctttgtgggggtctgactgcatagtcccagccattatgtgatatttcacgttattgatgatagtgaaccgtgggtccgaagctgactcaacggaggcagggaacaaagtctctgtggtctgttgggtcatacttcctggttccactgagtggcccaacactgggactgggttggtgtcccctctgctgacaggaccctactcctaggagcaaagtggttgattttgaaggcagtgttcccttctctccattgactatgagagagttgggggacacacatgcagaagaagcccgtggggagaaggtggattcctggtgtgctggctggtttttcagggctgttagaggttttttttttcttttttttttttatggcaagacttttggctttgagaaaactcacttagagggctttccaaaaacttaggatggtctaaaaaattaggatattcttttagaattaggaagaaaaattaggatattctaaaagaatatggattaaaaatttaggatattcttttagatatcctaatatctagatgagaggccttccttcataagatctggttgtttgggctgtggttggcataagtgatatttattttggcctctgtcacatccagtttcttgagcttttaaggtaagcttcttttggctttttttcagatgttcaccaagcttaagtttaaaataataggtattctaaaagagtatcctaattttcttatctgtattcttttagaataccctaatgtttcagacagtgatattctcttgttatttctaaggctaaattggcagagtatatcatctaaagccaaacactgaagaaggtgagaacccactcccacccagccagcatttcctggaacagacaagctgctgcttccttgctggctcacttagtgcattcctgggatggtctggcacccaggctttttattctttttgatcattgttcttactgaggtgccttcctagaacaagagccacttacaaaatagcttataattattatgtaccacacaactactattgtttgatgtatgactgctgagagcttgaatacatgcagagagtgactgaagacttagtagaggaataaattctgagcctgtctaaggtggggctaaggaacagatgagtaataagaggctcttggatttttttaaccaatgcaactgaccctttcaatcagttttctttgaattacatctacaagttttgttccactcagctaccagtcaactaggcatgctccacagtatcacaggaagaaggtcagaaatctggaactgaagctaaaagaagtgaggatgtagaagccacattcctctccaaggtagtgtgtgaaagaaccgccccctcttgacaggaggatgaccgtcgccattcttgcgtgggactgactcacccagctgagaggaggaccaatagaaagaaaattcacatttgagtccacctctctccccctttttctgaccttcattcataagatctggttgtttgggctgtaggtggcataattcatgtttattttggcctctgtcacatccagtttctttagcttttaaggtaagcttcttttggctttttttcatatgttcaccaagctaaaatttaaaataataagaccaggtttctctctctacaagtggattataaacattttcaccaaatcataacaatactccagctttccggtccgacttcctaggagcctggagttagcaaaggttgtctctggatttcattctctgagaatatcacagagcctgggagaagatgaatttacatgaaattgcaacatacacacctttttattttctggtgttaagctagttgtctttcctaccttacaaatcatgttagttttatgatttgttccgcatgttttatgtttattgtagaaatgtttatataacatacgctttccatatcagggaaaatcatatctgtttaataaattggctataactttaatatctgtggacaacttgtaaaatttggaatgtatcatatgtaaaaagtttaaagatatccaaataaatgctttaggtgttggcatta

SEQ ID NO: 50418 - DNA, 2680 bp, Homo sapiens
ggtttaaatatcagtactataagacttcattctatttggaactgaatacaaatgttggttactaatgtgtaaatgtgtaacgtatgactgatctctctacagagtagtacgggaatgtcaggtgctatttttagctggcaaaaccaaaggctgtttttattctcctccttaccttgatgactatggggagaccgaccagggactcagacggggaaatcctttacatttatgcaaagagcgattcaagaagattcagaagctctggcaccaacacagtgtcacagaggaaattggacatgcacaggaagccaatcagacactggttggcattgactggcaacatttataattattgcaccaccaaaaaacacaaacttggatttttttaacccagttggctttttaagaaagaaagaagttctgctgaatttggaaataaattctttatttaaactttccttcccagttttatagtttctggttctgaggactgatgaaaatcatcttccatcagcagattttcttgcactgtttgctgtgcccctcaaatataatgtcttgggttttaagatcgagcaaggagcttctcttcctagattggatcccagcccctttgtgggggtctgactgcatagtcccagccattatgtgatatttcacgttattgatgatagtgaaccgtgggtccgaagctgactcaacggaggcagggaacaaagtctctgtggtctgttgggtcatacttcctggttccactgagtggcccaacactgggactgggttggtgtcccctctgctgacaggaccctactcctaggagcaaagtggttgattttgaaggcagtgttcccttctctccattgactatgagagagttgggggacacacatgcagaagaagcccgtggggagaaggtggattcctggtgtgctggctggtttttcagggctgttagaggttttttttttcttttttttttttatggcaagacttttggctttgagaaaactcacttagagggctttccaaaaacttaggatggtctaaaaaattaggatattcttttagaattaggaagaaaaattaggatattctaaaagaatatggattaaaaatttaggatattcttttagatatcctaatatctagatgagaggccttccttcataagatctggttgtttgggctgtggttggcataagtgatatttattttggcctctgtcacatccagtttcttgagcttttaaggtaagcttcttttggctttttttcagatgttcaccaagcttaagtttaaaataataggtattctaaaagagtatcctaattttcttatctgtattcttttagaataccctaatgtttcagacagtgatattctcttgttatttctaaggctaaattggcagagtatatcatctaaagccaaacactgaagaaggtgagaacccactcccacccagccagcatttcctggaacagacaagctgctgcttccttgctggctcacttagtgcattcctgggatggtctggcacccaggctttttattctttttgatcattgttcttactgaggtgccttcctagaacaagagccacttacaaaatagcttataattattatgtaccacacaactactattgtttgatgtatgactgctgagagcttgaatacatgcagagagtgactgaagacttagtagaggaataaattctgagcctgtctaaggtggggctaaggaacagatgagtaataagaggctcttggatttttttaaccaatgcaactgaccctttcaatcagttttctttgaattacatctacaagttttgttccactcagctaccagtcaactaggcatgctccacagtatcacaggaagaaggtcagaaatctggaactgaagctaaaagaagtgaggatgtagaagccacattcctctccaaggtagtgtgtgaaagaaccgccccctcttgacaggaggatgaccgtcgccattcttgcgtgggactgactcacccagctgagaggaggaccaatagaaagaaaattcacatttgagtccacctctctccccctttttctgaccttcattcataagatctggttgtttgggctgtaggtggcataattcatgtttattttggcctctgtcacatccagtttctttagcttttaaggtaagcttcttttggctttttttcatatgttcaccaagctaaaatttaaaataataagaccaggtttctctctctacaagtggattataaacattttcaccaaatcataacaatactccagctttccggtccgacttcctaggagcctggagttagcaaaggttgtctctggatttcattctctgagaatatcacagagcctgggagaagatgaatttacatgaaattgcaacatacacacctttttattttctggtgttaagctagttgtctttcctaccttacaaatcatgttagttttatgatttgttccgcatgttttatgtttattgtagaaatgtttatataacatacgctttccatatcagggaaaatcatatctgtttaataaattggctataactttaatatctgtggacaacttgtaaaatttggaatgtatcatatgtaaaaagtttaaagatatccaaataaatgctttaggtgttggcatta

SEQ ID NO: 50419 - DNA, 6053 bp, Homo sapiens
aatagctgggagagtctagaggttgtgcttttgatactaaatgtatgaggatgatcactactccaattacacgtcaagtaggacaacatattgaaatggaaccagagtgggaagcagccttcacactacaaatgaaattaacacatgtcatttcaatgatgcaggactggtgtgcttcagatgaaaaagtgttaatcgaagcttacaagaaatgtctcgctgtactgatgcagtgtcatggtggttatactgatggtgaacagccaatcacactaagcatttgtggacattcagtggaaactatcagatactgtgtttcccaagaaaaagttagcattcacctcccagtttctcgcttacttgcaggtttacatgtattattaagcaaaagtgaagtggcatataaatttccagagctcctacctctaagtgaacttagcccacccatgttgatagaacaccctcttagatgtcttgttctgtgtgcccaagtacatgccggaatgtggagaagaaatgggttctctctagtaaaccagatttattactaccataatgtgaaatgcagacgtgagatgtttgacaaggatgtagtaatgcttcagacaggtgtctccatgatggatccaaatcatttcctgatgatcatgctcagccgctttgaactttatcagattttcagtactccagactatggaaaaagatttagttctgagattacccataaggatgttgttcagcagaacaatactctaatagaagaaatgctatacctcattataatgcttgttggagagagatttagtcctggagttggacaggtaaatgctacagatgaaatcaagcgagagattatccatcagttgagtatcaagcctatggctcatagtgaattggtaaagtctttacctgaagatgagaacaaggagactggcatggagagtgtaatcgaagcagttgcccatttcaagaaacctggattaacaggacgaggcatgtatgaactgaaaccagaatgtgccaaagagttcaacttgtatttctatcacttttcaagggcagaacagtccaaggcagaagaagcgcaacggaaattgaaaagacaaaatagagaagatacagcactcccacctccggtgttgcctccattctgccctctgtttgcaagcctggttaacattttgcagtcagatgtcatgttgtgcatcatgggaacaattctgcaatgggctgtggaacataatggatatgcctggtcagagtccatgctgcaaagggtgttacatttaattggcatggcactacaagaagaaaaacaacatttagagaatgtcacggaagagcatgtagtaacatttaccttcactcagaagatatcaaaacctggtgaagcgccaaaaaattctcctagcatactagctatgctggaaacactacaaaatgctccctacctagaagtccacaaagacatgattcggtggatattgaagacttttaatgctgttaaaaagatgagggagagttcacctaccagtcccgtggcagagacagaaggaaccataatggaagagagttcaagggacaaagacaaagctgagaggaagagaaaagcagagattgccagactgcgcagagaaaagatcatggctcagatgtctgaaatgcagcggcattttattgatgaaaacaaagaactctttcagcagacattagaactggatgcctcaacctctgctgttcttgatcatagccctgtggcttcagatatgacacttacagcactgggccccacacaaactcaggttcctgaacaaagacaattcgttacatgtatattgtgtcaagaggagcaagaagttaaagtggaaagcagggcaatggtcttggcagcatttgttcagagatcaactgtattatcaaaaaacagaagtaaatttattcaagatccagaaaaatatgatccattattcatgcaccctgatctgtcttgtggaacacacactagtagctgtgggcacattatgcatgcccattgttggcaaaggtattttgattccgttcaagctaaagaacagcgaaggcaacagagattacgcttacatacgagctatgatgtagaaaacggagaattcctttgccccctttgtgaatgcttgagtaatactgttattcctctgctgcttcctccaagaaatatttttaacaacaggttaaatttttcagaccaaccaaatctgactcagtggattagaacaatatctcagcaaataaaagcattacagtttcttaggaaagaagaaagtactcctaataatgcctctacaaagaattcagaaaatgtggatgaattacagctccctgaagggttcaggcctgattttcgtcctaagatcccttattctgagagcataaaagaaatgctaacgacatttggaactgctacctacaaggtgggactaaaggttcatcccaatgaagaggatcctcgtgttcccataatgtgttggggtagctgcgcgtacaccatccaaagcatagaaagaattttgagtgatgaagataaaccattgtttggtcctttaccttgcagactggatgactgtcttaggtcattgacgagatttgccgcagcacactggacagtggcatcagtttcagtggtgcaaggacatttttgtaaactttttgcatcactggtgcctaatgacagccatgaggaacttccatgcatattagatattgacatgtttcatttattggtgggcttggtgcttgcatttcctgcgttgcagtgtcaggatttttcagggatcagccttggcactggagaccttcacattttccatctggttactatggcacacatcatacagatcttacttacctcatgtacagaagagaatggcatggatcaagaaaatcccccttgtgaagaagaatcagcagttcttgctttgtataaaacacttcaccagtatacgggaagtgccttgaaagaaataccatccggctggcatctgtggaggagtgtcagagctggaatcatgcctttcctgaagtgttctgctttattttttcattacttaaatggagttccttccccacccgacattcaagttcctggaacaagccattttgaacatttatgtagctatctttccctaccaaacaacctcatttgcctttttcaagaaaatagtgagataatgaattcactgattgaaagttggtgccgtaacagtgaagttaaaagatatctagaaggtgaaagagatgctataagatatccaagagaatctaacaaattaataaaccttccagaggattacagcagcctcattaatcaagcatccaatttctcgtgcccgaaatcaggtggtgataagagcagagccccaactctgtgccttgtgtgcggatctctgctgtgctcccagagttactgctgccagactgaactggaaggggaggatgtaggagcctgcacagctcacacctactcctgtggctctggagtgggcatcttcctgagagtacgggaatgtcaggtgctatttttagctggcaaaaccaaaggctgtttttattctcctccttaccttgatgactatggggagaccgaccagggactcagacggggaaatcctttacatttatgcaaagagcgattcaagaagattcagaagctctggcaccaacacagtgtcacagaggaaattggacatgcacaggaagccaatcagacactggttggcattgactggcaacatttataattattgcaccaccaaaaaacacaaacttggatttttttaacccagttggctttttaagaaagaaagaagttctgctgaatttggaaataaattctttatttaaactttccttcccagttttatagtttctggttctgaggactgatgaaaatcatcttccatcagcagattttcttgcactgtttgctgtgcccctcaaatataatgtcttgggttttaagatcgagcaaggagcttctcttcctagattggatcccagcccctttgtgggggtctgactgcatagtcccagccattatgtgatatttcacgttattgatgatagtgaaccgtgggtccgaagctgactcaacggaggcagggaacaaagtctctgtggtctgttgggtcatacttcctggttccactgagtggcccaacactgggactgggttggtgtcccctctgctgacaggaccctactcctaggagcaaagtggttgattttgaaggcagtgttcccttctctccattgactatgagagagttgggggacacacatgcagaagaagcccgtggggagaaggtggattcctggtgtgctggctggtttttcagggctgttagaggttttttttttcttttttttttttatggcaagacttttggctttgagaaaactcacttagagggctttccaaaaacttaggatggtctaaaaaattaggatattcttttagaattaggaagaaaaattaggatattctaaaagaatatggattaaaaatttaggatattcttttagatatcctaatatctagatgagaggccttccttcataagatctggttgtttgggctgtggttggcataagtgatatttattttggcctctgtcacatccagtttcttgagcttttaaggtaagcttcttttggctttttttcagatgttcaccaagcttaagtttaaaataataggtattctaaaagagtatcctaattttcttatctgtattcttttagaataccctaatgtttcagacagtgatattctcttgttatttctaaggctaaattggcagagtatatcatctaaagccaaacactgaagaaggtgagaacccactcccacccagccagcatttcctggaacagacaagctgctgcttccttgctggctcacttagtgcattcctgggatggtctggcacccaggctttttattctttttgatcattgttcttactgaggtgccttcctagaacaagagccacttactgctgagagcttgaatacatgcagagagtgactgaagacttagtagaggaataaattctgagcctgtctaaggtggggctaaggaacagatgagtaataagaggctcttggatttttttaaccaatgcaactgaccctttcaatcagttttctttgaattacatctacaagttttgttccactcagctaccagtcaactaggcatgctccacagtatcacaggaagaaggtcagaaatctggaactgaagctaaaagaagtgaggatgtagaagccacattcctctccaaggtagtgtgtgaaagaaccgccccctcttgacaggaggatgaccgtcgccattcttgcgtgggactgactcacccagctgagaggaggaccaatagaaagaaaattcacatttgagtccacctctctccccctttttctgaccttcattcataagatctggttgtttgggctgtaggtggcataattcatgtttattttggcctctgtcacatccagtttctttagcttttaaggtaagcttcttttggctttttttcatatgttcaccaagctaaaatttaaaataataagaccaggtttctctctctacaagtggattataaacattttcaccaaatcataacaatactccagctttccggtccgacttcctaggagcctggagttagcaaaggttgtctctggatttcattctctgagaatatcacagagcctgggagaagatgaatttacatgaaattgcaacatacacacctttttattttctggtgttaagctagttgtctttcctaccttacaaatcatgttagttttatgatttgttccgcatgttttatgtttattgtagaaatgtttatataacatacgctttccatatcagggaaaatcatatctgtttaataaattggctataactttaatatctgtggacaacttgtaaaatttggaatgtatcatatgtaaaaagtttaaagatatccaaataaatgctttaggtgttggcatta

SEQ ID NO: 50420 - DNA, 5834 bp, Homo sapiens
  misc_feature (5656)..(5656): n is a, c, g, or t
  misc_feature (5757)..(5757): n is a, c, g, or t
aatagctgggagagtctagaggttgtgcttttgatactaaatgtatgaggatgatcactactccaattacacgtcaagtaggacaacatattgaaatggaaccagagtgggaagcagccttcacactacaaatgaaattaacacatgtcatttcaatgatgcaggactggtgtgcttcagatgaaaaagtgttaatcgaagcttacaagaaatgtctcgctgtactgatgcagtgtcatggtggttatactgatggtgaacagccaatcacactaagcatttgtggacattcagtggaaactatcagatactgtgtttcccaagaaaaagttagcattcacctcccagtttctcgcttacttgcaggtttacatgtattattaagcaaaagtgaagtggcatataaatttccagagctcctacctctaagtgaacttagcccacccatgttgatagaacaccctcttagatgtcttgttctgtgtgcccaagtacatgccggaatgtggagaagaaatgggttctctctagtaaaccagatttattactaccataatgtgaaatgcagacgtgagatgtttgacaaggatgtagtaatgcttcagacaggtgtctccatgatggatccaaatcatttcctgatgatcatgctcagccgctttgaactttatcagattttcagtactccagactatggaaaaagatttagttctgagattacccataaggatgttgttcagcagaacaatactctaatagaagaaatgctatacctcattataatgcttgttggagagagatttagtcctggagttggacaggtaaatgctacagatgaaatcaagcgagagattatccatcagttgagtatcaagcctatggctcatagtgaattggtaaagtctttacctgaagatgagaacaaggagactggcatggagagtgtaatcgaagcagttgcccatttcaagaaacctggattaacaggacgaggcatgtatgaactgaaaccagaatgtgccaaagagttcaacttgtatttctatcacttttcaagggcagaacagtccaaggcagaagaagcgcaacggaaattgaaaagacaaaatagagaagatacagcactcccacctccggtgttgcctccattctgccctctgtttgcaagcctggttaacattttgcagtcagatgtcatgttgtgcatcatgggaacaattctgcaatgggctgtggaacataatggatatgcctggtcagagtccatgctgcaaagggtgttacatttaattggcatggcactacaagaagaaaaacaacatttagagaatgtcacggaagagcatgtagtaacatttaccttcactcagaagatatcaaaacctggtgaagcgccaaaaaattctcctagcatactagctatgctggaaacactacaaaatgctccctacctagaagtccacaaagacatgattcggtggatattgaagacttttaatgctgttaaaaagatgagggagagttcacctaccagtcccgtggcagagacagaaggaaccataatggaagagagttcaagggacaaagacaaagctgagaggaagagaaaagcagagattgccagactgcgcagagaaaagatcatggctcagatgtctgaaatgcagcggcattttattgatgaaaacaaagaactctttcagcagacattagaactggatgcctcaacctctgctgttcttgatcatagccctgtggcttcagatatgacacttacagcactgggccccacacaaactcaggttcctgaacaaagacaattcgttacatgtatattgtgtcaagaggagcaagaagttaaagtggaaagcagggcaatggtcttggcagcatttgttcagagatcaactgtattatcaaaaaacagaagtaaatttattcaagatccagaaaaatatgatccattattcatgcaccctgatctgtcttgtggaacacacactagtagctgtgggcacattatgcatgcccattgttggcaaaggtattttgattccgttcaagctaaagaacagcgaaggcaacagagattacgcttacatacgagctatgatgtagaaaacggagaattcctttgccccctttgtgaatgcttgagtaatactgttattcctctgctgcttcctccaagaaatatttttaacaacaggttaaatttttcagaccaaccaaatctgactcagtggattagaacaatatctcagcaaataaaagcattacagtttcttaggaaagaagaaagtactcctaataatgcctctacaaagaattcagaaaatgtggatgaattacagctccctgaagggttcaggcctgattttcgtcctaagatcccttattctgagagcataaaagaaatgctaacgacatttggaactgctacctacaaggtgggactaaaggttcatcccaatgaagaggatcctcgtgttcccataatgtgttggggtagctgcgcgtacaccatccaaagcatagaaagaattttgagtgatgaagataaaccattgtttggtcctttaccttgcagactggatgactgtcttaggtcattgacgagatttgccgcagcacactggacagtggcatcagtttcagtggtgcaaggacatttttgtaaactttttgcatcactggtgcctaatgacagccatgaggaacttccatgcatattagatattgacatgtttcatttattggtgggcttggtgcttgcatttcctgcgttgcagtgtcaggatttttcagggatcagccttggcactggagaccttcacattttccatctggttactatggcacacatcatacagatcttacttacctcatgtacagaagagaatggcatggatcaagaaaatcccccttgtgaagaagaatcagcagttcttgctttgtataaaacacttcaccagtatacgggaagtgccttgaaagaaataccatccggctggcatctgtggaggagtgtcagagctggaatcatgcctttcctgaagtgttctgctttattttttcattacttaaatggagttccttccccacccgacattcaagttcctggaacaagccattttgaacatttatgtagctatctttccctaccaaacaacctcatttgcctttttcaagaaaatagtgagataatgaattcactgattgaaagttggtgccgtaacagtgaagttaaaagatatctagaaggtgaaagagatgctataagatatccaagagaatctaacaaattaataaaccttccagaggattacagcagcctcattaatcaagcatccaatttctcgtgcccgaaatcaggtggtgataagagcagagccccaactctgtgccttgtgtgcggatctctgctgtgctcccagagttactgctgccagactgaactggaaggggaggatgtaggagcctgcacagctcacacctactcctgtggctctggagtgggcatcttcctgagagtacgggaatgtcaggtgctatttttagctggcaaaaccaaaggctgtttttattctcctccttaccttgatgactatggggagaccgaccagggactcagacggggaaatcctttacatttatgcaaagagcgattcaagaagattcagaagctctggcaccaacacagtgtcacagaggaaattggacatgcacaggaagccaatcagacactggttggcattgactggcaacatttataattattgcaccaccaaaaaacacaaacttggatttttttaacccagttggctttttaagaaagaaagaagttctgctgaatttggaaataaattctttatttaaactttccttcccagttttatagtttctggttctgaggactgatgaaaatcatcttccatcagcagattttcttgcactgtttgctgtgcccctcaaatataatgtcttgggttttaagatcgagcaaggagcttctcttcctagattggatcccagcccctttgtgggggtctgactgcatagtcccagccattatgtgatatttcacgttattgatgatagtgaaccgtgggtccgaagctgactcaacggaggcagggaacaaagtctctgtggtctgttgggtcatacttcctggttccactgagtggcccaacactgggactgggttggtgtcccctctgctgacaggaccctactcctaggagcaaagtggttgattttgaaggcagtgttcccttctctccattgactatgagagagttgggggacacacatgcagaagaagcccgtggggagaaggtggattcctggtgtgctggctggtttttcagggctgttagaggttttttttttcttttttttttttatggcaagacttttggctttgagaaaactcacttagagggctttccaaaaacttaggatggtctaaaaaattaggatattcttttagaattaggaagaaaaattaggatattctaaaagaatatggattaaaaatttaggatattcttttagatatcctaatatctagatgagaggccttccttcataagatctggttgtttgggctgtggttggcataagtgatatttattttggcctctgtcacatccagtttcttgagcttttaaggtaagcttcttttggctttttttcagatgttcaccaagcttaagtttaaaataataggtattctaaaagagtatcctaattttcttatctgtattcttttagaataccctaatgtttcagacagtgatattctcttgttatttctaaggctaaattggcagagtatatcatctaaagccaaacactgaagaaggtgagaacccactcccacccagccagcatttcctggaacagacaagctgctgcttccttgctggctcacttagtgcattcctgggatggtctggcacccaggctttttattctttttgatcattgttcttactgaggtgccttcctagaacaagagccacttacaaaatagcttataattattatgtaccacacaactactattgtttgatgtatgactgctgagagcttgaatacatgcagagagtgactgaagacttagtagaggaataaattctgagcctgtctaaggtggggctaaggaacagatgagtaataagaggctcttggatttttttaaccaatgcaactgaccctttcaatcagttttctttgaattacatctacaagttttgttccactcagctaccagtcaactaggcatgctccacagtatcacaggaagaaggtcagaaatctggaactgaagctaaaagaagtgaggatgtagaagccacattcctctccaaggtagtgtgtgaaagaaccgccccctcttgacaggaggatgaccgtcgccattcttgcgtgggactgactcacccagctgagaggaggaccaatagaaagaaaattcacatttgagtccacctctctccccctttttctgaccttcattcataagatctggttgtttgggctgtaggtggcataattcatgtttattttggcctctgtcacatccagtttctttagcttttaaggtaagcttcttttggcttttatctcgtgccgaattcggcacganccccaagagagaaggccactgatgagggcaggagagagacgaccgtgtaccgagggctggtccagaagcgcgggaagaagcagttgggctcgttgaaaaanaagttcaagagtcatcaccgcaaacccaagagcttcagctcctgtaaacagccaggttaataaaagcacatgccgtg

SEQ ID NO: 50421 - DNA, 3499 bp, Homo sapiens
aatagctgggagagtctagaggttgtgcttttgatactaaatgtatgaggatgatcactactccaattacacgtcaagtaggacaacatattgaaatggaaccagagtgggaagcagccttcacactacaaatgaaattaacacatgtcatttcaatgatgcaggactggtgtgcttcagatgaaaaagtgttaatcgaagcttacaagaaatgtctcgctgtactgatgcagtgtcatggtggttatactgatggtgaacagccaatcacactaagcatttgtggacattcagtggaaactatcagatactgtgtttcccaagaaaaagttagcattcacctcccagtttctcgcttacttgcaggtttacatgtattattaagcaaaagtgaagtggcatataaatttccagagctcctacctctaagtgaacttagcccacccatgttgatagaacaccctcttagatgtcttgttctgtgtgcccaagtacatgccggaatgtggagaagaaatgggttctctctagtaaaccagatttattactaccataatgtgaaatgcagacgtgagatgtttgacaaggatgtagtaatgcttcagacaggtgtctccatgatggatccaaatcatttcctgatgatcatgctcagccgctttgaactttatcagattttcagtactccagactatggaaaaagatttagttctgagattacccataaggatgttgttcagcagaacaatactctaatagaagaaatgctatacctcattataatgcttgttggagagagatttagtcctggagttggacaggtaaatgctacagatgaaatcaagcgagagattatccatcagttgagtatcaagcctatggctcatagtgaattggtaaagtctttacctgaagatgagaacaaggagactggcatggagagtgtaatcgaagcagttgcccatttcaagaaacctggattaacaggacgaggcatgtatgaactgaaaccagaatgtgccaaagagttcaacttgtatttctatcacttttcaagggcagaacagtccaaggcagaagaagcgcaacggaaattgaaaagacaaaatagagaagatacagcactcccacctccggtgttgcctccattctgccctctgtttgcaagcctggttaacattttgcagtcagatgtcatgttgtgcatcatgggaacaattctgcaatgggctgtggaacataatggatatgcctggtcagagtccatgctgcaaagggtgttacatttaattggcatggcactacaagaagaaaaacaacatttagagaatgtcacggaagagcatgtagtaacatttaccttcactcagaagatatcaaaacctggtgaagcgccaaaaaattctcctagcatactagctatgctggaaacactacaaaatgctccctacctagaagtccacaaagacatgattcggtggatattgaagacttttaatgctgttaaaaagatgagggagagttcacctaccagtcccgtggcagagacagaaggaaccataatggaagagagttcaagggacaaagacaaagctgagaggaagagaaaagcagagattgccagactgcgcagagaaaagatcatggctcagatgtctgaaatgcagcggcattttattgatgaaaacaaagaactctttcagcagacattagaactggatgcctcaacctctgctgttcttgatcatagccctgtggcttcagatatgacacttacagcactgggccccacacaaactcaggttcctgaacaaagacaattcgttacatgtatattgtgtcaagaggagcaagaagttaaagtggaaagcagggcaatggtcttggcagcatttgttcagagatcaactgtattatcaaaaaacagaagtaaatttattcaagatccagaaaaatatgatccattattcatgcaccctgatctgtcttgtggaacacacactagtagctgtgggcacattatgcatgcccattgttggcaaaggtattttgattccgttcaagctaaagaacagcgaaggcaacagagattacgcttacatacgagctatgatgtagaaaacggagaattcctttgccccctttgtgaatgcttgagtaatactgttattcctctgctgcttcctccaagaaatatttttaacaacaggttaaatttttcagaccaaccaaatctgactcagtggattagaacaatatctcagcaaataaaagcattacagtttcttaggaaagaagaaagtactcctaataatgcctctacaaagaattcagaaaatgtggatgaattacagctccctgaagggttcaggcctgattttcgtcctaagatcccttattctgagagcataaaagaaatgctaacgacatttggaactgctacctacaaggtgggactaaaggttcatcccaatgaagaggatcctcgtgttcccataatgtgttggggtagctgcgcgtacaccatccaaagcatagaaagaattttgagtgatgaagataaaccattgtttggtcctttaccttgcagactggatgactgtcttaggtcattgacgagatttgccgcagcacactggacagtggcatcagtttcagtggtgcaaggacatttttgtaaactttttgcatcactggtgcctaatgacagccatgaggaacttccatgcatattagatattgacatgtttcatttattggtgggcttggtgcttgcatttcctgcgttgcagtgtcaggatttttcagggatcagccttggcactggagaccttcacattttccatctggttactatggcacacatcatacagatcttacttacctcatgtacagaagagaatggcatggatcaagaaaatcccccttgtgaagaagaatcagcagttcttgctttgtataaaacacttcaccagtatacgggaagtgccttgaaagaaataccatccggctggcatctgtggaggagtgtcagagctggaatcatgcctttcctgaagtgttctgctttattttttcattacttaaatggagttccttccccacccgacattcaagttcctggaacaagccattttgaacatttatgtagctatctttccctaccaaacaacctcatttgcctttttcaagaaaatagtgagataatgaattcactgattgaaagttggtgccgtaacagtgaagttaaaagatatctagaaggtgaaagagatgctataagatatccaagagaatctaacaaattaataaaccttccagaggattacagcagcctcattaatcaagcatccaatttctcgtaagttttgctgttagcattgaacattccctgccactggaaacacctctctacaaaaaatttgaaggattttgttgttgttctttgtttgggtagagaaatcatatctgtagtcctttatgagaggagagggagaaa

SEQ ID NO: 50422 - DNA, 2599 bp, Homo sapiens
aatagctgggagagtctagaggttgtgcttttgatactaaatgtatgaggatgatcactactccaattacacgtcaagtaggacaacatattgaaatggaaccagagtgggaagcagccttcacactacaaatgaaattaacacatgtcatttcaatgatgcaggactggtgtgcttcagatgaaaaagtgttaatcgaagcttacaagaaatgtctcgctgtactgatgcagtgtcatggtggttatactgatggtgaacagccaatcacactaagcatttgtggacattcagtggaaactatcagatactgtgtttcccaagaaaaagttagcattcacctcccagtttctcgcttacttgcaggtttacatgtattattaagcaaaagtgaagtggcatataaatttccagagctcctacctctaagtgaacttagcccacccatgttgatagaacaccctcttagatgtcttgttctgtgtgcccaagtacatgccggaatgtggagaagaaatgggttctctctagtaaaccagatttattactaccataatgtgaaatgcagacgtgagatgtttgacaaggatgtagtaatgcttcagacaggtgtctccatgatggatccaaatcatttcctgatgatcatgctcagccgctttgaactttatcagattttcagtactccagactatggaaaaagatttagttctgagattacccataaggatgttgttcagcagaacaatactctaatagaagaaatgctatacctcattataatgcttgttggagagagatttagtcctggagttggacaggtaaatgctacagatgaaatcaagcgagagattatccatcagttgagtatcaagcctatggctcatagtgaattggtaaagtctttacctgaagatgagaacaaggagactggcatggagagtgtaatcgaagcagttgcccatttcaagaaacctggattaacaggacgaggcatgtatgaactgaaaccagaatgtgccaaagagttcaacttgtatttctatcacttttcaagggcagaacagtccaaggcagaagaagcgcaacggaaattgaaaagacaaaatagagaagatacagcactcccacctccggtgttgcctccattctgccctctgtttgcaagcctggttaacattttgcagtcagatgtcatgttgtgcatcatgggaacaattctgcaatgggctgtggaacataatggatatgcctggtcagagtccatgctgcaaagggtgttacatttaattggcatggcactacaagaagaaaaacaacatttagagaatgtcacggaagagcatgtagtaacatttaccttcactcagaagatatcaaaacctggtgaagcgccaaaaaattctcctagcatactagctatgctggaaacactacaaaatgctccctacctagaagtccacaaagacatgattcggtggatattgaagacttttaatgctgttaaaaagatgagggagagttcacctaccagtcccgtggcagagacagaaggaaccataatggaagagagttcaagggacaaagacaaagctgagaggaagagaaaagcagagattgccagactgcgcagagaaaagatcatggctcagatgtctgaaatgcagcggcattttattgatgaaaacaaagaactctttcagcagacattagaactggatgcctcaacctctgctgttcttgatcatagccctgtggcttcagatatgacacttacagcactgggccccacacaaactcaggttcctgaacaaagacaattcgttacatgtatattgtgtcaagaggagcaagaagttaaagtggaaagcagggcaatggtcttggcagcatttgttcagagatcaactgtattatcaaaaaacagaagtaaatttattcaagatccagaaaaatatgatccattattcatgcaccctgatctgtcttgtggaacacacactagtagctgtgggcacattatgcatgcccattgttggcaaaggtattttgattccgttcaagctaaagaacagcgaaggcaacagagattacgcttacatacgagctatgatgtagaaaacggagaattcctttgccccctttgtgaatgcttgagtaatactgttattcctctgctgcttcctccaagaaatatttttaacaagtaagttttggctcatgacaactattacaaagcaatagtttgctttgaagataatgaaataataaatcaaggaggaaaacttagtctaggcaattgcatagtgttttccagatattttccaaactctaatcattttcttctagcagacctgtggaatgtgattttagtttttagagaggaacaggtgaaaatttaacagtttctaagctattaaattcctatgtatttatgaaaaccaagtatctggtttatttctagggaccctacttttaatatcttccatacacttttcaagagatgctcagtaaactggtagagggagatggaacaactcaaactgactttataggacagtctaaaaatcgaataaaactttttgctgtactggccatt

SEQ ID NO: 50423 - DNA, 684 bp, Homo sapiens
tatttttagctgaatttgtatgtaattttgctaaagggatgttaaaataatcatttgctataaaaagtcacttttgaatccttaaagaattctagttgttggcaacttgtttgtaaaagacaaatatgtcacattctcaagaagtattgaaaatctctattttggtagagccataatcaaattatgggcaataggtgttataagcaactgcatttatgttcctgtgcgtaggaataagtactatgaagtattagctattgttattgtgccttttatttttctgccgtagaacctggtgaagcgccaaaaaattctcctagcatactagctatgctggaaacactacaaaatgctccctacctagaagtccacaaagacatgattcggtggatattgaaggtaaaatttccacattcctctgctttttgtgagaaatattgaatatttgttatgtgtacattgtgatcatatttcatacaggatactgatacttttttttttgtagacttttaatgctgttaaaaagatgagggagagttcacctaccagtcccgtggcagagacagaaggaaccataatggaagaggtataaacagtaaaaagtgtgataatactaaaaaattacagcaagttcagtatgaacaaaataaatttatctacattaagtggccagttactcacaac

SEQ ID NO: 50424 - DNA, 348 bp, Homo sapiens
ccaataacttgtaaccttgcctaaatcaggaagggttgggttataatagaggaataaacagaacacattctgagtgacatgtgtcttctctttctagacggggaaatcctttacatttatgcaaagagcgattcaagaagattcagaagctctggcaccaacacagtgtcacagaggaaattggacatgcacaggaagccaatcagacactggttggcattgactggcaacatttataattattgcaccaccaaaaaacacaaacttggatttttttaacccagttggctttttaagaaagaaagaagttctgctgaatttggaaataaattctttatttaaactttc

SEQ ID NO: 50425 - DNA, 555 bp, Homo sapiens
gcttaatgtcttcagtccttttgataacacttaattggaaaatacagagtactagtatttccttatctttcagaagagaatggcatggatcaagaaaatcccccttgtgaagaagaatcagcagttcttgctttgtataaaacacttcaccagtatacgggaaggtgagttagttatctttacataacgcatttccctaaatattgctagatgatgatagcatgagaaaggaattcgtttgttaattaggggaatttgttgtctgttgacatgtttttaaaataagacgtggagtgatctgcagagcctttctgaactattcatatactaacataattggaaatctgggagaaaggtgataatatgcagagcttcccacatttatttggctgtggaacccttcatttgctcagggatctggcagagactagaggatagatcaaatgtactttggaaagttgatactctaaaacttatgttgtctcattcagaatgggaatttaaaactgcaagttaaattggcataatttatttttaaggtaatattcagtagta

SEQ ID NO: 50426 - DNA, 470 bp, Homo sapiens
gatttccttaccccttctgagtataattcttttatgagaaacctcaaaaagaaaatatttaggaacctagttgagagacttgacctggttatcgagacgtcctctgactcttattttgctttatgggctgaggttagtattttaacctctctgtgcttttaacctgtaaagagataaaaacaccagcaacgggtcaggtgtggtgactcatgcctgtaatcccagcactttgcgaggctcaccccagatcacttgaggtcaggagtttgagagcagccttgccaacatggtgaaaccctatctctactaaaaatacaaaaaattagctgggcgtggtggcacatgcctgtaatctcagctactcaggaaagtgagacaggagaatcacttgaacccaggaggcggaggttgcagtgaccaagattgcatgactgcactccagcctggatgacagagcaagaccccatcca

SEQ ID NO: 50427 - DNA, 300 bp, Homo sapiens
gggaaggattagagagagcctgagccaataaaaactatttactcaatataattacttttttttttagatttattactaccataatgtgaaatgcagacgtgagatgtttgacaaggatgtagtaatgcttcaggtaatgaattaaaagcattgaacttaaaggttgtggggaatctttgcttcttgttatttccatagaattcagtcacttgtgatcactcccaaatctacaactccagcctagccctgtctcctcagctccaaactcatatggctaacagcctttagatcatttccatc

SEQ ID NO: 50428 - DNA, 745 bp, Homo sapiens
gagaactgctttgcatttttgttttttgttaattgcgttggtttattttaggatgactgtcttaggtcattgacgagatttgccgcagcacactggacagtggcatcagtttcagtggtgcaaggacatttttgtaaactttttgcatgtgagtattaatacatttataacatgttgtaatttttcatcctctgaaattttgtttttaatggtacagcttctctcaataatgaattaaatatttagtagtactggttttcttatatataagctctagcttataaattctcatgtgtcttgcaagaagataaatttaaagcagattatatgcattttaacatgttggcatatgaaatatgctaatgtatttctctttaaatctgtagcactggtgcctaatgacagccatgaggaacttccatgcatattagatattgacatgtttcatttattggtgggtattgtgcagtttgtttggacttctacgtcatactatgtaactttaccttaggtttggtgagcagtgtagtggcagacaggaaggagttatgtgatttccttaccccttctgagtataattcttttatgagaaacctcaaaaagaaaatatttaggaacctagttgagagacttgacctggttatcgagacgtcctctgactcttattttgctttatgggctgaggttagtattttaacctctctgtgcttttaacctgtaaagagataaaaacaccagcaacggg

SEQ ID NO: 50429 - DNA, 2492 bp, Homo sapiens
cctctgggtgctcgcttcggcagcacatatactaaaattggaacgatacagagaagattagcatggcccctgcgcaaggatgacacgcaaattcgtgaagcgttccatatttttaaagatgagggagagttcacctaccagtcccgtggcagagacagaaggaaccataatggaagagagttcaagggacaaagacaaagctgagaggaagagaaaagcagagattgccagactgcgcagagaaaagatcatggctcagatgtctgaaatgcagcggcattttattgatgaaaacaaagaactctttcagcagacattagaactggatgcctcaacctctgctgttcttgatcatagccctgtggcttcagatatgacacttacagcactgggccccacacaaactcaggttcctgaacaaagacaattcgttacatgtatattgtgtcaagaggagcaagaagttaaagtggaaagcagggcaatggtcttggcagcatttgttcagagatcaactgtattatcaaaaaacagaagtaaatttattcaagatccagaaaaatatgatccattattcatgcaccctgatctgtcttgtggaacacacactagtagctgtgggcacattatgcatgcccattgttggcaaaggtattttgattccgttcaagctaaagaacagcgaaggcaacagagattacgcttacatacgagctatgatgtagaaaacggagaattcctttgccccctttgtgaatgcttgagtaatactgttattcctctgctgcttcctccaagaaatatttttaacaacaggttaaatttttcagaccaaccaaatctgactcagtggattagaacaatatctcagcaaataaaagcattacagtttcttaggaaagaagaaagtactcctaataatgcctctacaaagaattcagaaaatgtggatgaattacagctccctgaagggttcaggcctgattttcgtcctaagatcccttattctgagagcataaaagaaatgctaacgacatttggaactgctacctacaaggtgggactaaaggttcatcccaatgaagaggatcctcgtgttcccataatgtgttggggtagctgcgcgtacaccatccaaagcatagaaagaattttgagtgatgaagataaaccattgtttggtcctttaccttgcagactggatgactgtcttaggtcattgacgagatttgccgcagcacactggacagtggcatcagtttcagtggtgcaaggacatttttgtaaactttttgcatcactggtgcctaatgacagccatgaggaacttccatgcatattagatattgacatgtttcatttattggtgggcttggtgcttgcatttcctgcgttgcagtgtcaggatttttcagggatcagccttggcactggagaccttcacattttccatctggttactatggcacacatcatacagatcttacttacctcatgtacagaagagaatggcatggatcaagaaaatcccccttgtgaagaagaatcagcagttcttgctttgtataaaacacttcaccagtatacgggaagtgccttgaaagaaataccatccggctggcatctgtggaggagtgtcagagctggaatcatgcctttcctgaagtgttctgctttattttttcattacttaaatggagttccttccccacccgacattcaagttcctggaacaagccattttgaacatttatgtagctatctttccctaccaaacaacctcatttgcctttttcaagaaaatagtgagataatgaattcactgattgaaagttggtgccgtaacagtgaagttaaaagatatctagaaggtgaaagagatgctataagatatccaagagaatctaacaaattaataaaccttccagaggattacagcagcctcattaatcaagcatccaatttctcgtgcccgaaatcaggtggtgataagagcagagccccaactctgtgccttgtgtgcggatctctgctgtgctcccagagttactgctgccagactgaactggaaggggaggatgtaggagcctgcacagctcacacctactcctgtggctctggagtgggcatcttcctgagagtacgggaatgtcaggtgctatttttagctggcaaaaccaaaggctgtttttattctcctccttaccttgatgactatggggagaccgaccagggactcagacggggaaatcctttacatttatgcaaagagcgattcaagaagattcagaagctctggcaccaacacagtgtcacagaggaaattggacatgcacaggaagccaatcagacactggttggcattgactggcaacatttataattattgcaccaccaaaaaacacaaacttggatttttttaacccagttggctttttaagaaagaaagaagttctgctgaatttggaaataaattctttatttaaactttc

SEQ ID NO: 50430 - DNA, 3885 bp, Homo sapiens
aatagctgggagagtctagaggttgtgcttttgatactaaatgtatgaggatgatcactactccaattacacgtcaagtaggacaacatattgaaatggaaccagagtgggaagcagccttcacactacaaatgaaattaacacatgtcatttcaatgatgcaggactggtgtgcttcagatgaaaaagtgttaatcgaagcttacaagaaatgtctcgctgtactgatgcagtgtcatggtggttatactgatggtgaacagccaatcacactaagcatttgtggacattcagtggaaactatcagatactgtgtttcccaagaaaaagttagcattcacctcccagtttctcgcttacttgcaggtttacatgtattattaagcaaaagtgaagtggcatataaatttccagagctcctacctctaagtgaacttagcccacccatgttgatagaacaccctcttagatgtcttgttctgtgtgcccaagtacatgccggaatgtggagaagaaatgggttctctctagtaaaccagatttattactaccataatgtgaaatgcagacgtgagatgtttgacaaggatgtagtaatgcttcagacaggtgtctccatgatggatccaaatcatttcctgatgatcatgctcagccgctttgaactttatcagattttcagtactccagactatggaaaaagatttagttctgagattacccataaggatgttgttcagcagaacaatactctaatagaagaaatgctatacctcattataatgcttgttggagagagatttagtcctggagttggacaggtaaatgctacagatgaaatcaagcgagagattatccatcagttgagtatcaagcctatggctcatagtgaattggtaaagtctttacctgaagatgagaacaaggagactggcatggagagtgtaatcgaagcagttgcccatttcaagaaacctggattaacaggacgaggcatgtatgaactgaaaccagaatgtgccaaagagttcaacttgtatttctatcacttttcaagggcagaacagtccaaggcagaagaagcgcaacggaaattgaaaagacaaaatagagaagatacagcactcccacctccggtgttgcctccattctgccctctgtttgcaagcctggttaacattttgcagtcagatgtcatgttgtgcatcatgggaacaattctgcaatgggctgtggaacataatggatatgcctggtcagagtccatgctgcaaagggtgttacatttaattggcatggcactacaagaagaaaaacaacatttagagaatgtcacggaagagcatgtagtaacatttaccttcactcagaagatatcaaaacctggtgaagcgccaaaaaattctcctagcatactagctatgctggaaacactacaaaatgctccctacctagaagtccacaaagacatgattcggtggatattgaagacttttaatgctgttaaaaagatgagggagagttcacctaccagtcccgtggcagagacagaaggaaccataatggaagagagttcaagggacaaagacaaagctgagaggaagagaaaagcagagattgccagactgcgcagagaaaagatcatggctcagatgtctgaaatgcagcggcattttattgatgaaaacaaagaactctttcagcagacattagaactggatgcctcaacctctgctgttcttgatcatagccctgtggcttcagatatgacacttacagcactgggccccacacaaactcaggttcctgaacaaagacaattcgttacatgtatattgtgtcaagaggagcaagaagttaaagtggaaagcagggcaatggtcttggcagcatttgttcagagatcaactgtattatcaaaaaacagaagtaaatttattcaagatccagaaaaatatgatccattattcatgcaccctgatctgtcttgtggaacacacactagtagctgtgggcacattatgcatgcccattgttggcaaaggtattttgattccgttcaagctaaagaacagcgaaggcaacagagattacgcttacatacgagctatgatgtagaaaacggagaattcctttgccccctttgtgaatgcttgagtaatactgttattcctctgctgcttcctccaagaaatatttttaacaacaggttaaatttttcagaccaaccaaatctgactcagtggattagaacaatatctcagcaaataaaagcattacagtttcttaggaaagaagaaagtactcctaataatgcctctacaaagaattcagaaaatgtggatgaattacagctccctgaagggttcaggcctgattttcgtcctaagatcccttattctgagagcataaaagaaatgctaacgacatttggaactgctacctacaaggtgggactaaaggttcatcccaatgaagaggatcctcgtgttcccataatgtgttggggtagctgcgcgtacaccatccaaagcatagaaagaattttgagtgatgaagataaaccattgtttggtcctttaccttgcagactggatgactgtcttaggtcattgacgagatttgccgcagcacactggacagtggcatcagtttcagtggtgcaaggacatttttgtaaactttttgcatcactggtgcctaatgacagccatgaggaacttccatgcatattagatattgacatgtttcatttattggtgggcttggtgcttgcatttcctgcgttgcagtgtcaggatttttcagggatcagccttggcactggagaccttcacattttccatctggttactatggcacacatcatacagatcttacttacctcatgtacagaagagaatggcatggatcaagaaaatcccccttgtgaagaagaatcagcagttcttgctttgtataaaacacttcaccagtatacgggaagtgccttgaaagaaataccatccggctggcatctgtggaggagtgtcagagctggaatcatgcctttcctgaagtgttctgctttattttttcattacttaaatggagttccttccccacccgacattcaagttcctggaacaagccattttgaacatttatgtagctatctttccctaccaaacaacctcatttgcctttttcaagaaaatagtgagataatgaattcactgattgaaagttggtgccgtaacagtgaagttaaaagatatctagaaggtgaaagagatgctataagatatccaagagaatctaacaaattaataaaccttccagaggattacagcagcctcattaatcaagcatccaatttctcgtgcccgaaatcaggtggtgataagagcagagccccaactctgtgccttgtgtgcggatctctgctgtgctcccagagttactgctgccagactgaactggaaggggaggatgtaggagcctgcacagctcacacctactcctgtggctctggagtgggcatcttcctgagagtacgggaatgtcaggtgctatttttagctggcaaaaccaaaggctgtttttattctcctccttaccttgatgactatggggagaccgaccagggactcagacggggaaatcctttacatttatgcaaagagcgattcaagaagattcagaagctctggcaccaacacagtgtcacagaggaaattggacatgcacaggaagccaatcagacactggttggcattgactggcaacatttataattattgcaccaccaaaaaacacaaacttggatttttttaacccagttggctttttaagaaagaaagaagttctgctgaatttggaaataaattctttatttaaactttc

SEQ ID NO: 50431 - DNA, 4252 bp, Homo sapiens
tactcttttagaacttttaatccatttggatttttaaaatcactcaaaaatcatgttaaaaataatttagtttaagattttcatttttgaactatttgtggaaacaaattattttaaatgttgaagcttatggctgtcatttatgtaaattaccattgttttgatacctcatgttctctaattgtaaaggtattttgattccgttcaagctaaagaacagcgaaggcaacagagattacgcttacatacgagctatgatgtagaaaacggagaattcctttgccccctttgtgaatgcttgagtaatactgttattcctctgctgcttcctccaagaaatatttttaacaacaggttaaatttttcagaccaaccaaatctgactcagtggattagaacaatatctcagcaaataaaagcattacagtttcttaggaaagaagaaagtactcctaataatgcctctacaaagaattcagaaaatgtggatgaattacagctccctgaagggttcaggcctgattttcgtcctaagatcccttattctgagagcataaaagaaatgctaacgacatttggaactgctacctacaaggtgggactaaaggttcatcccaatgaagaggatcctcgtgttcccataatgtgttggggtagctgcgcgtacaccatccaaagcatagaaagaattttgagtgatgaagataaaccattgtttggtcctttaccttgcagactggatgactgtcttaggtcattgacgagatttgccgcagcacactggacagtggcatcagtttcagtggtgcaaggacatttttgtaaactttttgcatcactggtgcctaatgacagccatgaggaacttccatgcatattagatattgacatgtttcatttattggtgggcttggtgcttgcatttcctgcgttgcagtgtcaggatttttcagggatcagccttggcactggagaccttcacattttccatctggttactatggcacacatcatacagatcttacttacctcatgtacagaagagaatggcatggatcaagaaaatcccccttgtgaagaagaatcagcagttcttgctttgtataaaacacttcaccagtatacgggaagtgccttgaaagaaataccatccggctggcatctgtggaggagtgtcagagctggaatcatgcctttcctgaagtgttctgctttattttttcattacttaaatggagttccttccccacccgacattcaagttcctggaacaagccattttgaacatttatgtagctatctttccctaccaaacaacctcatttgcctttttcaagaaaatagtgagataatgaattcactgattgaaagttggtgccgtaacagtgaagttaaaagatatctagaaggtgaaagagatgctataagatatccaagagaatctaacaaattaataaaccttccagaggattacagcagcctcattaatcaagcatccaatttctcgtgcccgaaatcaggtggtgataagagcagagccccaactctgtgccttgtgtgcggatctctgctgtgctcccagagttactgctgccagactgaactggaaggggaggatgtaggagcctgcacagctcacacctactcctgtggctctggagtgggcatcttcctgagagtacgggaatgtcaggtgctatttttagctggcaaaaccaaaggctgtttttattctcctccttaccttgatgactatggggagaccgaccagggactcagacggggaaatcctttacatttatgcaaagagcgattcaagaagattcagaagctctggcaccaacacagtgtcacagaggaaattggacatgcacaggaagccaatcagacactggttggcattgactggcaacatttataattattgcaccaccaaaaaacacaaacttggatttttttaacccagttggctttttaagaaagaaagaagttctgctgaatttggaaataaattctttatttaaactttccttcccagttttatagtttctggttctgaggactgatgaaaatcatcttccatcagcagattttcttgcactgtttgctgtgcccctcaaatataatgtcttgggttttaagatcgagcaaggagcttctcttcctagattggatcccagcccctttgtgggggtctgactgcatagtcccagccattatgtgatatttcacgttattgatgatagtgaaccgtgggtccgaagctgactcaacggaggcagggaacaaagtctctgtggtctgttgggtcatacttcctggttccactgagtggcccaacactgggactgggttggtgtcccctctgctgacaggaccctactcctaggagcaaagtggttgattttgaaggcagtgttcccttctctccattgactatgagagagttgggggacacacatgcagaagaagcccgtggggagaaggtggattcctggtgtgctggctggtttttcagggctgttagaggttttttttttcttttttttttttatggcaagacttttggctttgagaaaactcacttagagggctttccaaaaacttaggatggtctaaaaaattaggatattcttttagaattaggaagaaaaattaggatattctaaaagaatatggattaaaaatttaggatattcttttagatatcctaatatctagatgagaggccttccttcataagatctggttgtttgggctgtggttggcataagtgatatttattttggcctctgtcacatccagtttcttgagcttttaaggtaagcttcttttggctttttttcagatgttcaccaagcttaagtttaaaataataggtattctaaaagagtatcctaattttcttatctgtattcttttagaataccctaatgtttcagacagtgatattctcttgttatttctaaggctaaattggcagagtatatcatctaaagccaaacactgaagaaggtgagaacccactcccacccagccagcatttcctggaacagacaagctgctgcttccttgctggctcacttagtgcattcctgggatggtctggcacccaggctttttattctttttgatcattgttcttactgaggtgccttcctagaacaagagccacttacaaaatagcttataattattatgtaccacacaactactattgtttgatgtatgactgctgagagcttgaatacatgcagagagtgactgaagacttagtagaggaataaattctgagcctgtctaaggtggggctaaggaacagatgagtaataagaggctcttggatttttttaaccaatgcaactgaccctttcaatcagttttctttgaattacatctacaagttttgttccactcagctaccagtcaactaggcatgctccacagtatcacaggaagaaggtcagaaatctggaactgaagctaaaagaagtgaggatgtagaagccacattcctctccaaggtagtgtgtgaaagaaccgccccctcttgacaggaggatgaccgtcgccattcttgcgtgggactgactcacccagctgagaggaggaccaatagaaagaaaattcacatttgagtccacctctctccccctttttctgaccttcattcataagatctggttgtttgggctgtaggtggcataattcatgtttattttggcctctgtcacatccagtttctttagcttttaaggtaagcttcttttggctttttttcatatgttcaccaagctaaaatttaaaataataagaccaggtttctctctctacaagtggattataaacattttcaccaaatcataacaatactccagctttccggtccgacttcctaggagcctggagttagcaaaggttgtctctggatttcattctctgagaatatcacagagcctgggagaagatgaatttacatgaaattgcaacatacacacctttttattttctggtgttaagctagttgtctttcctaccttacaaatcatgttagttttatgatttgttccgcatgttttatgtttattgtagaaatgtttatataacatacgctttccatatcagggaaaatcatatctgtttaataaattggctataactttaatatctgtggacaacttgtaaaatttggaatgtatcatatgtaaaaagtttaaagatatccaaataaatgctttaggtgttggcatta

SEQ ID NO: 50432 - DNA, 6187 bp, Homo sapiens
aatagctgggagagtctagaggttgtgcttttgatactaaatgtatgaggatgatcactactccaattacacgtcaagtaggacaacatattgaaatggaaccagagtgggaagcagccttcacactacaaatgaaattaacacatgtcatttcaatgatgcaggactggtgtgcttcagatgaaaaagtgttaatcgaagcttacaagaaatgtctcgctgtactgatgcagtgtcatggtggttatactgatggtgaacagccaatcacactaagcatttgtggacattcagtggaaactatcagatactgtgtttcccaagaaaaagttagcattcacctcccagtttctcgcttacttgcaggtttacatgtattattaagcaaaagtgaagtggcatataaatttccagagctcctacctctaagtgaacttagcccacccatgttgatagaacaccctcttagatgtcttgttctgtgtgcccaagtacatgccggaatgtggagaagaaatgggttctctctagtaaaccagatttattactaccataatgtgaaatgcagacgtgagatgtttgacaaggatgtagtaatgcttcagacaggtgtctccatgatggatccaaatcatttcctgatgatcatgctcagccgctttgaactttatcagattttcagtactccagactatggaaaaagatttagttctgagattacccataaggatgttgttcagcagaacaatactctaatagaagaaatgctatacctcattataatgcttgttggagagagatttagtcctggagttggacaggtaaatgctacagatgaaatcaagcgagagattatccatcagttgagtatcaagcctatggctcatagtgaattggtaaagtctttacctgaagatgagaacaaggagactggcatggagagtgtaatcgaagcagttgcccatttcaagaaacctggattaacaggacgaggcatgtatgaactgaaaccagaatgtgccaaagagttcaacttgtatttctatcacttttcaagggcagaacagtccaaggcagaagaagcgcaacggaaattgaaaagacaaaatagagaagatacagcactcccacctccggtgttgcctccattctgccctctgtttgcaagcctggttaacattttgcagtcagatgtcatgttgtgcatcatgggaacaattctgcaatgggctgtggaacataatggatatgcctggtcagagtccatgctgcaaagggtgttacatttaattggcatggcactacaagaagaaaaacaacatttagagaatgtcacggaagagcatgtagtaacatttaccttcactcagaagatatcaaaacctggtgaagcgccaaaaaattctcctagcatactagctatgctggaaacactacaaaatgctccctacctagaagtccacaaagacatgattcggtggatattgaagacttttaatgctgttaaaaagatgagggagagttcacctaccagtcccgtggcagagacagaaggaaccataatggaagagagttcaagggacaaagacaaagctgagaggaagagaaaagcagagattgccagactgcgcagagaaaagatcatggctcagatgtctgaaatgcagcggcattttattgatgaaaacaaagaactctttcagcagacattagaactggatgcctcaacctctgctgttcttgatcatagccctgtggcttcagatatgacacttacagcactgggccccacacaaactcaggttcctgaacaaagacaattcgttacatgtatattgtgtcaagaggagcaagaagttaaagtggaaagcagggcaatggtcttggcagcatttgttcagagatcaactgtattatcaaaaaacagaagtaaatttattcaagatccagaaaaatatgatccattattcatgcaccctgatctgtcttgtggaacacacactagtagctgtgggcacattatgcatgcccattgttggcaaaggtattttgattccgttcaagctaaagaacagcgaaggcaacagagattacgcttacatacgagctatgatgtagaaaacggagaattcctttgccccctttgtgaatgcttgagtaatactgttattcctctgctgcttcctccaagaaatatttttaacaacaggttaaatttttcagaccaaccaaatctgactcagtggattagaacaatatctcagcaaataaaagcattacagtttcttaggaaagaagaaagtactcctaataatgcctctacaaagaattcagaaaatgtggatgaattacagctccctgaagggttcaggcctgattttcgtcctaagatcccttattctgagagcataaaagaaatgctaacgacatttggaactgctacctacaaggtgggactaaaggttcatcccaatgaagaggatcctcgtgttcccataatgtgttggggtagctgcgcgtacaccatccaaagcatagaaagaattttgagtgatgaagataaaccattgtttggtcctttaccttgcagactggatgactgtcttaggtcattgacgagatttgccgcagcacactggacagtggcatcagtttcagtggtgcaaggacatttttgtaaactttttgcatcactggtgcctaatgacagccatgaggaacttccatgcatattagatattgacatgtttcatttattggtgggcttggtgcttgcatttcctgcgttgcagtgtcaggatttttcagggatcagccttggcactggagaccttcacattttccatctggttactatggcacacatcatacagatcttacttacctcatgtacagaagagaatggcatggatcaagaaaatcccccttgtgaagaagaatcagcagttcttgctttgtataaaacacttcaccagtatacgggaagtgccttgaaagaaataccatccggctggcatctgtggaggagtgtcagagctggaatcatgcctttcctgaagtgttctgctttattttttcattacttaaatggagttccttccccacccgacattcaagttcctggaacaagccattttgaacatttatgtagctatctttccctaccaaacaacctcatttgcctttttcaagaaaatagtgagataatgaattcactgattgaaagttggtgccgtaacagtgaagttaaaagatatctagaaggtgaaagagatgctataagatatccaagagaatctaacaaattaataaaccttccagaggattacagcagcctcattaatcaagcatccaatttctcgtgcccgaaatcaggtggtgataagagcagagccccaactctgtgccttgtgtgcggatctctgctgtgctcccagagttactgctgccagactgaactggaaggggaggatgtaggagcctgcacagctcacacctactcctgtggctctggagtgggcatcttcctgagagtacgggaatgtcaggtgctatttttagctggcaaaaccaaaggctgtttttattctcctccttaccttgatgactatggggagaccgaccagggactcagacggggaaatcctttacatttatgcaaagagcgattcaagaagattcagaagctctggcaccaacacagtgtcacagaggaaattggacatgcacaggaagccaatcagacactggttggcattgactggcaacatttataattattgcaccaccaaaaaacacaaacttggatttttttaacccagttggctttttaagaaagaaagaagttctgctgaatttggaaataaattctttatttaaactttccttcccagttttatagtttctggttctgaggactgatgaaaatcatcttccatcagcagattttcttgcactgtttgctgtgcccctcaaatataatgtcttgggttttaagatcgagcaaggagcttctcttcctagattggatcccagcccctttgtgggggtctgactgcatagtcccagccattatgtgatatttcacgttattgatgatagtgaaccgtgggtccgaagctgactcaacggaggcagggaacaaagtctctgtggtctgttgggtcatacttcctggttccactgagtggcccaacactgggactgggttggtgtcccctctgctgacaggaccctactcctaggagcaaagtggttgattttgaaggcagtgttcccttctctccattgactatgagagagttgggggacacacatgcagaagaagcccgtggggagaaggtggattcctggtgtgctggctggtttttcagggctgttagaggttttttttttcttttttttttttatggcaagacttttggctttgagaaaactcacttagagggctttccaaaaacttaggatggtctaaaaaattaggatattcttttagaattaggaagaaaaattaggatattctaaaagaatatggattaaaaatttaggatattcttttagatatcctaatatctagatgagaggccttccttcataagatctggttgtttgggctgtggttggcataagtgatatttattttggcctctgtcacatccagtttcttgagcttttaaggtaagcttcttttggctttttttcagatgttcaccaagcttaagtttaaaataataggtattctaaaagagtatcctaattttcttatctgtattcttttagaataccctaatgtttcagacagtgatattctcttgttatttctaaggctaaattggcagagtatatcatctaaagccaaacactgaagaaggtgagaacccactcccacccagccagcatttcctggaacagacaagctgctgcttccttgctggctcacttagtgcattcctgggatggtctggcacccaggctttttattctttttgatcattgttcttactgaggtgccttcctagaacaagagccacttacaaaatagcttataattattatgtaccacacaactactattgtttgatgtatgactgctgagagcttgaatacatgcagagagtgactgaagacttagtagaggaataaattctgagcctgtctaaggtggggctaaggaacagatgagtaataagaggctcttggatttttttaaccaatgcaactgaccctttcaatcagttttctttgaattacatctacaagttttgttccactcagctaccagtcaactaggcatgctccacagtatcacaggaagaaggtcagaaatctggaactgaagctaaaagaagtgaggatgtagaagccacattcctctccaaggtagtgtgtgaaagaaccgccccctcttgacaggaggatgaccgtcgccattcttgcgtgggactgactcacccagctgagaggaggaccaatagaaagaaaattcacatttgagtccacctctctccccctttttctgaccttcattcataagatctggttgtttgggctgtaggtggcataattcatgtttattttggcctctgtcacatccagtttctttagcttttaaggtaagcttcttttggctttttttcatatgttcaccaagctaaaatttaaaataataagaccaggtttctctctctacaagtggattataaacattttcaccaaatcataacaatactccagctttccggtccgacttcctaggagcctggagttagcaaaggttgtctctggatttcattctctgagaatatcacagagcctgggagaagatgaatttacatgaaattgcaacatacacacctttttattttctggtgttaagctagttgtctttcctaccttacaaatcatgttagttttatgatttgttccgcatgttttatgtttattgtagaaatgtttatataacatacgctttccatatcagggaaaatcatatctgtttaataaattggctataactttagcaaaaaaacaaaaaaaaaaaaaattggtgggggcgggccgcgaaatttaaaccctcctgtggggggcgcccaagttgacaggccaggcccagaacccgggcggcatgcgtggttccccaaaaagccggggcgggttgaaacccggggcggggcggttaaaggccgga

SEQ ID NO: 50433 - DNA, 2722 bp, Homo sapiens
aatagctgggagagtctagaggttgtgcttttgatactaaatgtatgaggatgatcactactccaattacacgtcaagtaggacaacatattgaaatggaaccagagtgggaagcagccttcacactacaaatgaaattaacacatgtcatttcaatgatgcaggactggtgtgcttcagatgaaaaagtgttaatcgaagcttacaagaaatgtctcgctgtactgatgcagtgtcatggtggttatactgatggtgaacagccaatcacactaagcatttgtggacattcagtggaaactatcagatactgtgtttcccaagaaaaagttagcattcacctcccagtttctcgcttacttgcaggtttacatgtattattaagcaaaagtgaagtggcatataaatttccagagctcctacctctaagtgaacttagcccacccatgttgatagaacaccctcttagatgtcttgttctgtgtgcccaagtacatgccggaatgtggagaagaaatgggttctctctagtaaaccagatttattactaccataatgtgaaatgcagacgtgagatgtttgacaaggatgtagtaatgcttcagacaggtgtctccatgatggatccaaatcatttcctgatgatcatgctcagccgctttgaactttatcagattttcagtactccagactatggaaaaagatttagttctgagattacccataaggatgttgttcagcagaacaatactctaatagaagaaatgctatacctcattataatgcttgttggagagagatttagtcctggagttggacaggtaaatgctacagatgaaatcaagcgagagattatccatcagttgagtatcaagcctatggctcatagtgaattggtaaagtctttacctgaagatgagaacaaggagactggcatggagagtgtaatcgaagcagttgcccatttcaagaaacctggattaacaggacgaggcatgtatgaactgaaaccagaatgtgccaaagagttcaacttgtatttctatcacttttcaagggcagaacagtccaaggcagaagaagcgcaacggaaattgaaaagacaaaatagagaagatacagcactcccacctccggtgttgcctccattctgccctctgtttgcaagcctggttaacattttgcagtcagatgtcatgttgtgcatcatgggaacaattctgcaatgggctgtggaacataatggatatgcctggtcagagtccatgctgcaaagggtgttacatttaattggcatggcactacaagaagaaaaacaacatttagagaatgtcacggaagagcatgtagtaacatttaccttcactcagaagatatcaaaacctggtgaagcgccaaaaaattctcctagcatactagctatgctggaaacactacaaaatgctccctacctagaagtccacaaagacatgattcggtggatattgaagacttttaatgctgttaaaaagatgagggagagttcacctaccagtcccgtggcagagacagaaggaaccataatggaagagagttcaagggacaaagacaaagctgagaggaagagaaaagcagagattgccagactgcgcagagaaaagatcatggctcagatgtctgaaatgcagcggcattttattgatgaaaacaaagaactctttcagcagacattagaactggatgcctcaacctctgctgttcttgatcatagccctgtggcttcagatatgacacttacagcactgggccccacacaaactcaggttcctgaacaaagacaattcgttacatgtatattgtgtcaagaggagcaagaagttaaagtggaaagcagggcaatggtcttggcagcatttgttcagagatcaactgtattatcaaaaaacagaagtaaatttattcaagatccagaaaaatatgatccattattcatgcaccctgatctgtcttgtggaacacacactagtagctgtgggcacattatgcatgcccattgttggcaaaggtaatgtatattcttaatatttgtcaagagaagtttatctaagggctcaatattttttaaatagaggaaatttcattctagaaaaaaggaaaagaactaaaaatgttgaaaaaatccgtatcattgcctaataaataacaaaagttatttgccctgtcatagatgtaaagtgtatgtcagatatgttttttaatttagctttatatccaagtctcttctatatcttccaaagaaggaagtggatctgtatcagtctgtggatgaagaaaagggtttttacagtaggataaactctagaagggtaatgttgtctttctttgggtccagggtggacaacttttgattccatagatgttagtacttgctttgttacttcccaaaattgtaatggctccctgtgatgagatgtcctgaatttgttctaccttggtgtttcctatgcttctacaaaaccaacaaatcaataataccattattctagaactatgctcacccagttatcatgaactacccctaacaactagccaccacattgtagtcccagctacttgggaggctgagacgggagaattgcttgaatgtgggaggtggaggttgcagtgaaccaagattgtgcaactgcactccagcctgggcgacagagcaagactccatctcaaaaacaacaacaacaacaaa

SEQ ID NO: 50434 - DNA, 2102 bp, Homo sapiens
aatagctgggagagtctagaggttgtgcttttgatactaaatgtatgaggatgatcactactccaattacacgtcaagtaggacaacatattgaaatggaaccagagtgggaagcagccttcacactacaaatgaaattaacacatgtcatttcaatgatgcaggactggtgtgcttcagatgaaaaagtgttaatcgaagcttacaagaaatgtctcgctgtactgatgcagtgtcatggtggttatactgatggtgaacagccaatcacactaagcatttgtggacattcagtggaaactatcagatactgtgtttcccaagaaaaagttagcattcacctcccagtttctcgcttacttgcaggtttacatgtattattaagcaaaagtgaagtggcatataaatttccagagctcctacctctaagtgaacttagcccacccatgttgatagaacaccctcttagatgtcttgttctgtgtgcccaagtacatgccggaatgtggagaagaaatgggttctctctagtaaaccagatttattactaccataatgtgaaatgcagacgtgagatgtttgacaaggatgtagtaatgcttcagacaggtgtctccatgatggatccaaatcatttcctgatgatcatgctcagccgctttgaactttatcagattttcagtactccagactatggaaaaagatttagttctgagattacccataaggatgttgttcagcagaacaatactctaatagaagaaatgctatacctcattataatgcttgttggagagagatttagtcctggagttggacaggtaaatgctacagatgaaatcaagcgagagattatccatcagttgagtatcaagcctatggctcatagtgaattggtaaagtctttacctgaagatgagaacaaggagactggcatggagagtgtaatcgaagcagttgcccatttcaagaaacctggattaacaggacgaggcatgtatgaactgaaaccagaatgtgccaaagagttcaacttgtatttctatcacttttcaagggcagaacagtccaaggcagaagaagcgcaacggaaattgaaaagacaaaatagagaagatacagcactcccacctccggtgttgcctccattctgccctctgtttgcaagcctggttaacattttgcagtcagatgtcatgttgtgcatcatgggaacaattctgcaatgggctgtggaacataatggatatgcctggtcagagtccatgctgcaaagggtgttacatttaattggcatggcactacaagaagaaaaacaacatttagagaatgtcacggaagagcatgtagtaacatttaccttcactcagaagatatcaaaacctggtgaagcgccaaaaaattctcctagcatactagctatgctggaaacactacaaaatgctccctacctagaagtccacaaagacatgattcggtggatattgaagacttttaatgctgttaaaaagatgagggagagttcacctaccagtcccgtggcagagacagaaggaaccataatggaagagagttcaagggacaaagacaaagctgagaggaagagaaaagcagagattgccagactgcgcagagaaaagatcatggctcagatgtctgaaatgcagcggcattttattgatgaaaacaaagaactctttcagcagacattagaactggatgcctcaacctctgctgttcttgatcatagccctgtggcttcagatatgacacttacagcactgggccccacacaaactcaggttcctgaacaaagacaattcgttacatgtatattgtgtcaagaggagcaagaagttaaagtggaaagcagggcaatggtcttggcagcatttgttcagagatcaactgtattatcaaaaaacagaagtaaatttattcaagatccaggtaagtcatagctagatcctcatcttcccttttaataacaactgccagttaatgtggttggtgatacgttgagattttttaaacctaaaaataactccatggacttggatggtatctttggcaggtaacttaggcaggaattccccacttgg

SEQ ID NO: 50435 - DNA, 1014 bp, Homo sapiens
agcggcggcggcggcggcggcggcggcggcggcattgtgcgcgcaccagcagcccggcccgggaggagcaggacgcgccggggccgcctcctcccgcacggacccatgaaccagccgggcggcgcggcggctccgcaggctgacggagccagtgcagccggaaggaaaagcactgcgagcagggagcgcttgaagcgcagccagaagagcaccaaggtggagggcccagagccagtgccagccgaggcctcgctgagtgccgagcaaggaacgatgacggaggtgaaggtgaagacagagctgcccgatgactacatccaggaggtgatctggcagggcgaggccaaggaggagaagaaggcggtcagcaaggatgggaccagcgacgtgcctgccgagatctgcgtggtgatcggcggcgtccgcaaccagcagacccttgatggaaaagcgcccgaaggcagcccccacggtggatctgtgcgaagccggtattcagggacctggatttttgaccaagcattgagatatgcatctgggtcttacgaatgcggaatctgtggcaagaagtacaagtattacaactgcttccagacccacgtgcgggcgcaccgagacaccgaagccacctcaggggagggagcctcccaaagcaacaatttcaggtacacatgtgatatctgcgggaagaagtacaaatactacagctgtttccaagagcaccgagacctgcacgcagtggatgtgtttagtgtggaaggggcccctgagaaccgggcagaccccttcgaccaaggtgtcgtggccacggacgaggtgaaggaggagcccccggagccattccagaaaatcgggccaatgaacaatattacatcagacatttttaagaagaaagaagttaggcagtgccaaaagagagaaactggcaattacacctgtgaattctgcggcaaacagtacaagtactacactccctaccaggagcatgtggccttacacgcccccatcagtgag

SEQ ID NO: 50436 - DNA, 954 bp, Homo sapiens
agcggcggcggcggcggcggcggcggcggcggcattgtgcgcgcaccagcagcccggcccgggaggagcaggacgcgccggggccgcctcctcccgcacggacccatgaaccagccgggcggcgcggcggctccgcaggctgacggagccagtgcagccggaaggaaaagcactgcgagcagggagcgcttgaagcgcagccagaagagcaccaaggtggagggcccagagccagtgccagccgaggcctcgctgagtgccgagcaaggaacgatgacggaggtgaaggtgaagacagagctgcccgatgactacatccaggaggtgatctggcagggcgaggccaaggaggagaagaaggcggtcagcaaggatgggaccagcgacgtgcctgccgagatctgcgtggtgatcggcggcgtccgcaaccagcagacccttgatggaaaagcgcccgaaggcagcccccacggtggatctgtgcgaagccggtattcagggacctggatttttgaccaagcattgagatatgcatctgggtcttacgaatgcggaatctgtggcaagaagtacaagtattacaactgcttccagacccacgtgcgggcgcaccgagacaccgaagccacctcaggggagggagcctcccaaagcaacaatttcaggtacacatgtgatatctgcgggaagaagtacaaatactacagctgtttccaagagcaccgagacctgcacgcagtggatgtgtttagtgtggaaggggcccctgagaaccgggcagaccccttcgaccaaggtgtcgtggccacggacgaggtgaaggaggagcccccggagccattccagaaaatcgggccaaaaactggcaattacacctgtgaattctgcggcaaacagtacaagtactacactccctaccaggagcatgtggccttacacgcccccatcagtgag

SEQ ID NO: 50437 - DNA, 1680 bp, Homo sapiens
ccacgcgtccgggcgcccacagagccgcggcaccatggcacctgctggacgcccgggggccaagaaggggattttggagcgcctggagagtggggaggttgtgattggagatggcagctttctcattactctggagaagagaggctatgtgaaggctgggctctggactccagaggcagtgatagaacacccagacgcagttcgtcaacttcacatggaattcttgagagcaggatcaaatgtcatgcagacttttaccttttctgccagtgaggacaatatggaaagcaagtgggaagatgtaaatgctgctgcctgtgacctcgccagggaagtggctggcaaaggtgatgctttggtagcaggggggatctgccagacatcaatatacaaataccagaaggatgaagctagaattaaaaaactttttcgacaacagctagaagtttttgcctggaaaaatgtggacttcttgattgcagagtattttgagcacgttgaagaagctgtgtgggctgtggaagtcttaaaagaatcagatagacccgtggcagttaccatgtgcataggcccagagggagacatgcatgatataacccccggagaatgtgctgtgaggctggtgaaggcaggggcttccatcgttggcgtgaactgccgctttgggcccgacaccagcttgaagacgatggagctcatgaaggagggtcttgagtgggcagggctgaaagcgcacctcatggtgcagcctctggggttccacgcgcctgactgtggcaaagaggggtttgtggatctcccagaatatccctttggactggagtccagagttgccaccagatgggatattcaaaaatacgccagagaggcctacaacctgggggtcaggtacattggcgggtgctgtggatttgagccctaccacatcagggcaattgcagaggagctggccccagaaaggggctttttgccaccagcttcagaaaaacacggcagctggggaagtggtttggacatgcacaccaaaccctggattagagcaagggctcgaagggagtattgggagaatctgctgccagcttcaggcagacctttctgtccttcgctgtcaaagccagacttctaaggagtagtgaaagaaaaccctgaaataatcgaacaggaaaaagttgccctcaagcctgacctggaaccgttcctcaccttcatcctcaccatgccctgctatctccagctgctgagcagctgaggtgctgcagccccttcccttccagcccacaagtgtgtgcatattgagctcctgctgtggttaagcactgcaacagactctaccagagatgcaaagagaagcgagagaggcaccttgttctccaagaacttactgtccaatcatgctgtggtgcattcctttgaagatcatgaagaatagccaaacttgtctttgagggtgaatttgacactttaaaataatcagaagtcactgagacccaaagctagtgaataattcaagtgactaagctagatacttgaggatgatagagcaacactaaactaaagcaatgagtctgctttttttaatgatttatacaatgactccaaaggcaatcccaaagaaaagatgtaaagaatgttttgagcaatggtagcattattgaaataaatgtttaactatccaaagtg

SEQ ID NO: 50438 - DNA, 1399 bp, Homo sapiens
tagtcccaactactctggaggctgaggcaggagaatggcttgaacctgggaggcggaggttgcagtgagccaagatagggcaccactgcactccagcctgggcgacagagtgatactctgtctcaaaagagagagagagagaatagccgccaccattattccccctagtgaccccactgaactctactgaaaaccttgcctcatcctcctgcccacgcctggccaaccccactgggaacagtcatctgcagggacaagcacaaattccaccctctgtgctttccagatggatgatgacaccactctgtttgtttaagaacccgtcttttgattctctcataattcctcacactgcttctgcagaatttgtttctaactcaagagggaagaaacaggaagatttctggcttttctttagttgccttaaggtcagcttttcagctgtggcactgaaggggcttcctgggaagcacccaagaaaatgacatgggtttaccagacaagatgtcctgtccaccactggcaaagacagggagtagctatttctcctatgctgtgcctcaatcttctcacccggggaaatggtgcttcccttcctactttatggagcacttatgaatatctaactagaagtgaatataaaagctctttgaactataacacatgataagctactcattgtttcagagattaccccagttttataagagatgaatctaaaatttattagcaaaacttttcctccttcaaaattacaaaattatgattttaaatactcaattactttgaaaacctctgggtgtgttttcttcttttttactaataggcatcatctcactgaatcaatgatccctgaatgaaaaactatatgttattgttataggaatgaaaatgtttactcagaaaggtattctttagtcagtctgatagacacacattccttagcaagttttattatgcatatgtttatattctatttggtaatttttataactgttttgctatatttacctttaccattcaaaatctgctttatgtttggaccagtagaaaaagtgacatttctcttagtattttgagcacgttgaagaagctgtgtgggctgtggaagtcttaaaagaatcagatagacccgtggcagttaccatgtgcataggcccagagggagacatgcatgatataacccccggagaatgtgctgtgaggctggtgaaggcaggtaatttggacccataccgtgatacacagctcagttgttgcttacgaaatttaacaaagtgtgcttgatattgtgagagcagtttggaaatagaagaatgaactccaatcagttttcttatctgtaaattgtgggaggtggaggggaatggctaacctctaaggtaccttccaactatta

SEQ ID NO: 50439 - DNA, 569 bp, Homo sapiens
ccacgcgtccgggcgcccacagagccgcggcaccatggcacctgctggacgcccgggggccaagaaggtgagtttcgtcccctcgatcctcgcggagctcctggccgctgggctgcgagcgactccgttcacacccggcgttcatccctagccaagccctggggcctcggcaaaacacttggacgggatggccctgagcctcaattttcccctgtcacgggttggttagcgtttatggagcccttactcggtgcctggcgctgcacagagtgctgtgctcaagttatctcctcatcttcacaattatccccatttcacaggtgaggaaactgaggctcggcgagtcaggcgactagctcagggtcacgggtccagccccgcggggagcgaggatcagaagtctagctttcggacgcatgtcgcgcacacattttcttccctcaaccgaccctcgcccgcagctctttgggctaatccgtccgggaactcttcggactgtgccctcgcgttttggctagtcctgggcaggacgcccccagagctgcggtgcagggtggggggtaggtggg

SEQ ID NO: 50440 - DNA, 352 bp, Homo sapiens
gtagcaactgtcttaactcactgcaacctcacacctcctgggttcaagagattactcactcctcagcctcccagctacttggaggctgaggcatgagaattgcttgaacctgggaggcagaggttgcagtgagctgagatcgccccactgcaatccagcctgggagacataattcaaatctattttggtcttatatcttcttatgtttgtgttatttcatgtgtgccagtttctctttttttcacaacaatttatcaatttgtggcaataaaaatgatttaccttttatagtgtttgaatgtcgaaaatgtcatgaacattctttggaataatactagcaaatatttattac

SEQ ID NO: 50441 - DNA, 2927 bp, Homo sapiens
ccacgcgtccgggcgcccacagagccgcggcaccatggcacctgctggacgcccgggggccaagaaggggattttggagcgcctggagagtggggaggttgtgattggagatggcagctttctcattactctggagaagagaggctatgtgaaggctgggctctggactccagaggcagtgatagaacacccagacgcagttcgtcaacttcacatggaattcttgagagcaggatcaaatgtcatgcagacttttaccttttctgccagtgaggacaatatggaaagcaagtgggaagatgtaaatgctgctgcctgtgacctcgccagggaagtggctggcaaaggtgatgctttggtagcaggggggatctgccagacatcaatatacaaataccagaaggatgaagctagaattaaaaaactttttcgacaacagctagaagtttttgcctggaaaaatgtggacttcttgattgcagagtattttgagcacgttgaagaagctgtgtgggctgtggaagtcttaaaagaatcagatagacccgtggcagttaccatgtgcataggcccagagggagacatgcatgatataacccccggagaatgtgctgtgaggctggtgaaggcaggggcttccatcgttggcgtgaactgccgctttgggcccgacaccagcttgaagacgatggagctcatgaaggagggtcttgagtgggcagggctgaaagcgcacctcatggtgcagcctctggggttccacgcgcctgactgtggcaaagaggggtttgtggatctcccagaatatccctttggactggagtccagagttgccaccagatgggatattcaaaaatacgccagagaggcctacaacctgggggtcaggtacattggcgggtgctgtggatttgagccctaccacatcagggcaattgcagaggagctggccccagaaaggggctttttgccaccagcttcagaaaaacacggcagctggggaagtggtttggacatgcacaccaaaccctggattagagcaagggctcgaagggagtattgggagaatctgctgccagcttcaggcagacctttctgtccttcgctgtcaaagccagacttctaaggagtagtgaaagaaaaccctgaaataatcgaacaggaaaaagttgccctcaagcctgacctggaaccgttcctcaccttcatcctcaccatgccctgctatctccagctgctgagcagctgaggtgctgcagccccttcccttccagcccacaagtgtgtgcatattgagctcctgctgtggttaagcactgcaacagactctaccagagatgcaaagagaagcgagagaggcaccttgttctccaagaacttactgtccaatcatgctgtggtgcattcctttgaagatcatgaagaatagccaaacttgtctttgagggtgaatttgacactttaaaataatcagaagtcactgagacccaaagctagtgaataattcaagtgactaagctagatacttgaggatgatagagcaacactaaactaaagcaatgagtctgctttttttaatgatttatacaatgactccaaaggcaatcccaaagaaaagatgtaaagaatgttttgagcaatggtagcattattgaaataaatgtttaactatccaaagtgattactttcaaagatgatttttacttaaagatattaggtctggccaggcgaagtgactcacacctgcaatcccagcactttgggaggccgaggcgggcggatcacctgaggtcagcagttcaagaccagcctgaccaacatggtgaaaccctgtctctaccaaaatacaaaaattagccgggcatgatggcgggtgcctgtaatcccagctactcgggaggctgaggcaggagaatcgcttgaacccaggaggcggagcttgcagtgagccgagatcaggccattgcacttcagcctgggtgacagagtgagactccatctcaaaaaaaaaaaaaaaaagatattaggtcctagaatttttaaaatgtgtcttcataatcataggtagctaggttataaactatttaaagacaagatcacgtgataagcttataatcttctcataattccccttacttagcattgtgttagacatactaataggtgcacagtgaaatacttattgttgattgtttaaaaataaagttttagaaaaccttttcaaaagtcagagtttaggccaggggcacaggctgacacctataatcccagcactttgggaggccagggcgggcagatcacttgggtcaagagttcaaggccagcctggccaacatggcaaaaccccatctctactaaataaaatacaaaaattatccaggcatggtggtgcatgcctgtaatcccagctacttggaggctgaggcatgagaattgcttgaacctgggaggcagaggttgcagtgagctgagatcgccccactgcaatccagcctgggagacataattcaaatctattttggtcttatatcttcttatgtttgtgttatttcatgtgtgccagtttctctttttttcacaacaatttatcaatttgtggcaataaaaatgatttacctttaaaaaacaccctactgtcttttaaagtctgcaagtcgtatggtccgcagcctttggttgcctctcctccgcttcgaggctgcggtcgcatcccctcgcccgcctctcgctctcctctgcgcgtcgcgggcgcgctcctctctctcggtcctcgctgcccgcttctctcttcccgcggtctttgtgtcctcctctgtcgctcgtcgttttactgtcgtcgtgtctgcttcgcccagctctcgtcgctctgcccctccggtcgttcattggctgctacgcgctcggcctcgttcacctcctcgcccccg

SEQ ID NO: 50442 - DNA, 3171 bp, Homo sapiens
ccacgcgtccgggcgcccacagagccgcggcaccatggcacctgctggacgcccgggggccaagaaggggattttggagcgcctggagagtggggaggttgtgattggagatggcagctttctcattactctggagaagagaggctatgtgaaggctgggctctggactccagaggcagtgatagaacacccagacgcagttcgtcaacttcacatggaattcttgagagcaggatcaaatgtcatgcagacttttaccttttctgccagtgaggacaatatggaaagcaagtgggaagatgtaaatgctgctgcctgtgacctcgccagggaagtggctggcaaaggtgatgctttggtagcaggggggatctgccagacatcaatatacaaataccagaaggatgaagctagaattaaaaaactttttcgacaacagctagaagtttttgcctggaaaaatgtggacttcttgattgcagagtattttgagcacgttgaagaagctgtgtgggctgtggaagtcttaaaagaatcagatagacccgtggcagttaccatgtgcataggcccagagggagacatgcatgatataacccccggagaatgtgctgtgaggctggtgaaggcaggggcttccatcgttggcgtgaactgccgctttgggcccgacaccagcttgaagacgatggagctcatgaaggagggtcttgagtgggcagggctgaaagcgcacctcatggtgcagcctctggggttccacgcgcctgactgtggcaaagaggggtttgtggatctcccagaatatccctttggtaagctcaggtgcatagtagaggtccttgtatttctcgtgacaaaatccaaatggctataataaattgtggcccagttttacaataagagactgcatatgacaaaacattcagagttaaccaaaaatgagctatcagaagaatgcatcatctaaagtttatagtttttttaattggaaaaactgctcattagagcatccatcatttgtgagaacagtaacagtgctgttctattgtgattcaggactggagtccagagttgccaccagatgggatattcaaaaatacgccagagaggcctacaacctgggggtcaggtacattggcgggtgctgtggatttgagccctaccacatcagggcaattgcagaggagctggccccagaaaggggctttttgccaccagcttcagaaaaacacggcagctggggaagtggtttggacatgcacaccaaaccctggattagagcaagggctcgaagggagtattgggagaatctgctgccagcttcaggcagacctttctgtccttcgctgtcaaagccagacttctaaggagtagtgaaagaaaaccctgaaataatcgaacaggaaaaagttgccctcaagcctgacctggaaccgttcctcaccttcatcctcaccatgccctgctatctccagctgctgagcagctgaggtgctgcagccccttcccttccagcccacaagtgtgtgcatattgagctcctgctgtggttaagcactgcaacagactctaccagagatgcaaagagaagcgagagaggcaccttgttctccaagaacttactgtccaatcatgctgtggtgcattcctttgaagatcatgaagaatagccaaacttgtctttgagggtgaatttgacactttaaaataatcagaagtcactgagacccaaagctagtgaataattcaagtgactaagctagatacttgaggatgatagagcaacactaaactaaagcaatgagtctgctttttttaatgatttatacaatgactccaaaggcaatcccaaagaaaagatgtaaagaatgttttgagcaatggtagcattattgaaataaatgtttaactatccaaagtgattactttcaaagatgatttttacttaaagatattaggtctggccaggcgaagtgactcacacctgcaatcccagcactttgggaggccgaggcgggcggatcacctgaggtcagcagttcaagaccagcctgaccaacatggtgaaaccctgtctctaccaaaatacaaaaattagccgggcatgatggcgggtgcctgtaatcccagctactcgggaggctgaggcaggagaatcgcttgaacccaggaggcggagcttgcagtgagccgagatcaggccattgcacttcagcctgggtgacagagtgagactccatctcaaaaaaaaaaaaaaaaagatattaggtcctagaatttttaaaatgtgtcttcataatcataggtagctaggttataaactatttaaagacaagatcacgtgataagcttataatcttctcataattccccttacttagcattgtgttagacatactaataggtgcacagtgaaatacttattgttgattgtttaaaaataaagttttagaaaaccttttcaaaagtcagagtttaggccaggggcacaggctgacacctataatcccagcactttgggaggccagggcgggcagatcacttgggtcaagagttcaaggccagcctggccaacatggcaaaaccccatctctactaaataaaatacaaaaattatccaggcatggtggtgcatgcctgtaatcccagctacttggaggctgaggcatgagaattgcttgaacctgggaggcagaggttgcagtgagctgagatcgccccactgcaatccagcctgggagacataattcaaatctattttggtcttatatcttcttatgtttgtgttatttcatgtgtgccagtttctctttttttcacaacaatttatcaatttgtggcaataaaaatgatttacctttaaaaaacaccctactgtcttttaaagtctgcaagtcgtatggtccgcagcctttggttgcctctcctccgcttcgaggctgcggtcgcatcccctcgcccgcctctcgctctcctctgcgcgtcgcgggcgcgctcctctctctcggtcctcgctgcccgcttctctcttcccgcggtctttgtgtcctcctctgtcgctcgtcgttttactgtcgtcgtgtctgcttcgcccagctctcgtcgctctgcccctccggtcgttcattggctgctacgcgctcggcctcgttcacctcctcgcccccg

SEQ ID NO: 50443 - DNA, 3758 bp, Homo sapiens
tagtcccaactactctggaggctgaggcaggagaatggcttgaacctgggaggcggaggttgcagtgagccaagatagggcaccactgcactccagcctgggcgacagagtgatactctgtctcaaaagagagagagagagaatagccgccaccattattccccctagtgaccccactgaactctactgaaaaccttgcctcatcctcctgcccacgcctggccaaccccactgggaacagtcatctgcagggacaagcacaaattccaccctctgtgctttccagatggatgatgacaccactctgtttgtttaagaacccgtcttttgattctctcataattcctcacactgcttctgcagaatttgtttctaactcaagagggaagaaacaggaagatttctggcttttctttagttgccttaaggtcagcttttcagctgtggcactgaaggggcttcctgggaagcacccaagaaaatgacatgggtttaccagacaagatgtcctgtccaccactggcaaagacagggagtagctatttctcctatgctgtgcctcaatcttctcacccggggaaatggtgcttcccttcctactttatggagcacttatgaatatctaactagaagtgaatataaaagctctttgaactataacacatgataagctactcattgtttcagagattaccccagttttataagagatgaatctaaaatttattagcaaaacttttcctccttcaaaattacaaaattatgattttaaatactcaattactttgaaaacctctgggtgtgttttcttcttttttactaataggcatcatctcactgaatcaatgatccctgaatgaaaaactatatgttattgttataggaatgaaaatgtttactcagaaaggtattctttagtcagtctgatagacacacattccttagcaagttttattatgcatatgtttatattctatttggtaatttttataactgttttgctatatttacctttaccattcaaaatctgctttatgtttggaccagtagaaaaagtgacatttctcttagtattttgagcacgttgaagaagctgtgtgggctgtggaagtcttaaaagaatcagatagacccgtggcagttaccatgtgcataggcccagagggagacatgcatgatataacccccggagaatgtgctgtgaggctggtgaaggcaggggcttccatcgttggcgtgaactgccgctttgggcccgacaccagcttgaagacgatggagctcatgaaggagggtcttgagtgggcagggctgaaagcgcacctcatggtgcagcctctggggttccacgcgcctgactgtggcaaagaggggtttgtggatctcccagaatatccctttggtaagctcaggtgcatagtagaggtccttgtatttctcgtgacaaaatccaaatggctataataaattgtggcccagttttacaataagagactgcatatgacaaaacattcagagttaaccaaaaatgagctatcagaagaatgcatcatctaaagtttatagtttttttaattggaaaaactgctcattagagcatccatcatttgtgagaacagtaacagtgctgttctattgtgattcaggactggagtccagagttgccaccagatgggatattcaaaaatacgccagagaggcctacaacctgggggtcaggtacattggcgggtgctgtggatttgagccctaccacatcagggcaattgcagaggagctggccccagaaaggggctttttgccaccagcttcagaaaaacacggcagctggggaagtggtttggacatgcacaccaaaccctggattagagcaagggctcgaagggagtattgggagaatctgctgccagcttcaggcagacctttctgtccttcgctgtcaaagccagacttctaaggagtagtgaaagaaaaccctgaaataatcgaacaggaaaaagttgccctcaagcctgacctggaaccgttcctcaccttcatcctcaccatgccctgctatctccagctgctgagcagctgaggtgctgcagccccttcccttccagcccacaagtgtgtgcatattgagctcctgctgtggttaagcactgcaacagactctaccagagatgcaaagagaagcgagagaggcaccttgttctccaagaacttactgtccaatcatgctgtggtgcattcctttgaagatcatgaagaatagccaaacttgtctttgagggtgaatttgacactttaaaataatcagaagtcactgagacccaaagctagtgaataattcaagtgactaagctagatacttgaggatgatagagcaacactaaactaaagcaatgagtctgctttttttaatgatttatacaatgactccaaaggcaatcccaaagaaaagatgtaaagaatgttttgagcaatggtagcattattgaaataaatgtttaactatccaaagtgattactttcaaagatgatttttacttaaagatattaggtctggccaggcgaagtgactcacacctgcaatcccagcactttgggaggccgaggcgggcggatcacctgaggtcagcagttcaagaccagcctgaccaacatggtgaaaccctgtctctaccaaaatacaaaaattagccgggcatgatggcgggtgcctgtaatcccagctactcgggaggctgaggcaggagaatcgcttgaacccaggaggcggagcttgcagtgagccgagatcaggccattgcacttcagcctgggtgacagagtgagactccatctcaaaaaaaaaaaaaaaaagatattaggtcctagaatttttaaaatgtgtcttcataatcataggtagctaggttataaactatttaaagacaagatcacgtgataagcttataatcttctcataattccccttacttagcattgtgttagacatactaataggtgcacagtgaaatacttattgttgattgtttaaaaataaagttttagaaaaccttttcaaaagtcagagtttaggccaggggcacaggctgacacctataatcccagcactttgggaggccagggcgggcagatcacttgggtcaagagttcaaggccagcctggccaacatggcaaaaccccatctctactaaataaaatacaaaaattatccaggcatggtggtgcatgcctgtaatcccagctacttggaggctgaggcatgagaattgcttgaacctgggaggcagaggttgcagtgagctgagatcgccccactgcaatccagcctgggagacataattcaaatctattttggtcttatatcttcttatgtttgtgttatttcatgtgtgccagtttctctttttttcacaacaatttatcaatttgtggcaataaaaatgatttacctttaaaaaacaccctactgtcttttaaagtctgcaagtcgtatggtccgcagcctttggttgcctctcctccgcttcgaggctgcggtcgcatcccctcgcccgcctctcgctctcctctgcgcgtcgcgggcgcgctcctctctctcggtcctcgctgcccgcttctctcttcccgcggtctttgtgtcctcctctgtcgctcgtcgttttactgtcgtcgtgtctgcttcgcccagctctcgtcgctctgcccctccggtcgttcattggctgctacgcgctcggcctcgttcacctcctcgcccccg

SEQ ID NO: 50444 - DNA, 2165 bp, Homo sapiens
ccacgcgtccgggcgcccacagagccgcggcaccatggcacctgctggacgcccgggggccaagaaggggattttggagcgcctggagagtggggaggttgtgattggagatggcagctttctcattactctggagaagagaggctatgtgaaggctgggctctggactccagaggcagtgatagaacacccagacgcagttcgtcaacttcacatggaattcttgagagcaggatcaaatgtcatgcagacttttaccttttctgccagtgaggacaatatggaaagcaagtgggaagatgtaaatgctgctgcctgtgacctcgccagggaagtggctggcaaaggtgatgctttggtagcaggggggatctgccagacatcaatatacaaataccagaaggatgaagccctcaagcctgacctggaaccgttcctcaccttcatcctcaccatgccctgctatctccagctgctgagcagctgaggtgctgcagccccttcccttccagcccacaagtgtgtgcatattgagctcctgctgtggttaagcactgcaacagactctaccagagatgcaaagagaagcgagagaggcaccttgttctccaagaacttactgtccaatcatgctgtggtgcattcctttgaagatcatgaagaatagccaaacttgtctttgagggtgaatttgacactttaaaataatcagaagtcactgagacccaaagctagtgaataattcaagtgactaagctagatacttgaggatgatagagcaacactaaactaaagcaatgagtctgctttttttaatgatttatacaatgactccaaaggcaatcccaaagaaaagatgtaaagaatgttttgagcaatggtagcattattgaaataaatgtttaactatccaaagtgattactttcaaagatgatttttacttaaagatattaggtctggccaggcgaagtgactcacacctgcaatcccagcactttgggaggccgaggcgggcggatcacctgaggtcagcagttcaagaccagcctgaccaacatggtgaaaccctgtctctaccaaaatacaaaaattagccgggcatgatggcgggtgcctgtaatcccagctactcgggaggctgaggcaggagaatcgcttgaacccaggaggcggagcttgcagtgagccgagatcaggccattgcacttcagcctgggtgacagagtgagactccatctcaaaaaaaaaaaaaaaaagatattaggtcctagaatttttaaaatgtgtcttcataatcataggtagctaggttataaactatttaaagacaagatcacgtgataagcttataatcttctcataattccccttacttagcattgtgttagacatactaataggtgcacagtgaaatacttattgttgattgtttaaaaataaagttttagaaaaccttttcaaaagtcagagtttaggccaggggcacaggctgacacctataatcccagcactttgggaggccagggcgggcagatcacttgggtcaagagttcaaggccagcctggccaacatggcaaaaccccatctctactaaataaaatacaaaaattatccaggcatggtggtgcatgcctgtaatcccagctacttggaggctgaggcatgagaattgcttgaacctgggaggcagaggttgcagtgagctgagatcgccccactgcaatccagcctgggagacataattcaaatctattttggtcttatatcttcttatgtttgtgttatttcatgtgtgccagtttctctttttttcacaacaatttatcaatttgtggcaataaaaatgatttacctttaaaaaacaccctactgtcttttaaagtctgcaagtcgtatggtccgcagcctttggttgcctctcctccgcttcgaggctgcggtcgcatcccctcgcccgcctctcgctctcctctgcgcgtcgcgggcgcgctcctctctctcggtcctcgctgcccgcttctctcttcccgcggtctttgtgtcctcctctgtcgctcgtcgttttactgtcgtcgtgtctgcttcgcccagctctcgtcgctctgcccctccggtcgttcattggctgctacgcgctcggcctcgttcacctcctcgcccccg

SEQ ID NO: 50445 - DNA, 453 bp, Homo sapiens
atgttagactcaaagttgatacaaaggcatagaccctatctggaggtgcaaggtcaagtatgggaggcaaacaaatagttattaaaatccaatgtggtaagtacaataatggaaatataaggtcatggtaacagaggagattgtacccaactctgctggtcttttctgcttgcattgaagagagtggcttatactcatcttacttgtttattgtccctttagttatcttttatattttaccttcaaactgctaggctcactatctgaactcttgctctctaacctcagtgggaagatgtaaatgctgctgcctgtgacctcgccagggaagtggctggcaaaggtgatgctttggtagcaggggggatctgccagacatcaatatacaaataccagaaggatgaagctagaattaaaaaactttttcgacaacagctagaagtttttgcctgg

SEQ ID NO: 50446 - DNA, 621 bp, Homo sapiens
  misc_feature (588)..(588): n is a, c, g, or t
ccacgcgtccgggcgcccacagagccgcggcaccatggcacctgctggacgcccgggggccaagaaggggattttggagcgcctggagagtggggaggttgtgattggagatggcagctttctcattactctggagaagagaggctatgtgaaggctgggctctggactccagaggcagtgatagaacacccagacgcagttcgtcaacttcacatggaattcttgagagcaggatcaaatgtcatgcagacttttaccttttctgccagtgaggacaatatggaaagcaagtgggaagatgtaaatgctgctgcctgtgacctcgccagggaagtggctggcaaaggtgatgctttggtagcaggggggatctgccagacatcaatatacaaataccagaaggatgaagctagaattaaaaaactttttcgacaacagctagaagtttttgcctggaaaaatgtggacttcttgattgcagagtattttgagcacgttgaagaagctgtgtgggctgtggaagtcttcatgcatgatataacccccggagaatgtgctgtgaagcttgtggcacgggctttcatcgntggcgtgctgccgctttggccccacaccgcttg

SEQ ID NO: 50447 - DNA, 2881 bp, Homo sapiens
ccacgcgtccgggcgcccacagagccgcggcaccatggcacctgctggacgcccgggggccaagaaggggattttggagcgcctggagagtggggaggttgtgattggagatggcagctttctcattactctggagaagagaggctatgtgaaggctgggctctggactccagaggcagtgatagaacacccagacgcagttcgtcaacttcacatggaattcttgagagcaggatcaaatgtcatgcagacttttaccttttctgccagtgaggacaatatggaaagcaagtgggaagatgtaaatgctgctgcctgtgacctcgccagggaagtggctggcaaaggtgatgctttggtagcaggggggatctgccagacatcaatatacaaataccagaaggatgaagctagaattaaaaaactttttcgacaacagctagaagtttttgcctggaaaaatgtggacttcttgattgcagagtattttgagcacgttgaagaagctgtgtgggctgtggaagtcttaaaagaatcagatagacccgtggcagttaccatgtgcataggcccagagggagacatgcatgatataacccccggagaatgtgctgtgaggctggtgaaggcaggggcttccatcgttggcgtgaactgccgctttgggcccgacaccagcttgaagacgatggagctcatgaaggagggtcttgagtgggcagggctgaaagcgcacctcatggtgcagcctctggggttccacgcgcctgactgtggcaaagaggggtttgtggatctcccagaatatccctttggactggagtccagagttgccaccagatgggatattcaaaaatacgccagagaggcctacaacctgggggtcaggtacattggcgggtgctgtggatttgagccctaccacatcagggcaattgcagaggagctggccccagaaaggggctttttgccaccagcttcagaaaaacacggcagctggggaagtggtttggacatgcacaccaaaccctggattagagcaagggctcgaagggagtattgggagaatctgctgccagcttcaggcagacctttctgtccttcgctgtcaaagccagacttctaaggagtagtgaaagaaaaccctgaaataatcgaacaggaaaaagttggccctgctatctccagctgctgagcagctgaggtgctgcagccccttcccttccagcccacaagtgtgtgcatattgagctcctgctgtggttaagcactgcaacagactctaccagagatgcaaagagaagcgagagaggcaccttgttctccaagaacttactgtccaatcatgctgtggtgcattcctttgaagatcatgaagaatagccaaacttgtctttgagggtgaatttgacactttaaaataatcagaagtcactgagacccaaagctagtgaataattcaagtgactaagctagatacttgaggatgatagagcaacactaaactaaagcaatgagtctgctttttttaatgatttatacaatgactccaaaggcaatcccaaagaaaagatgtaaagaatgttttgagcaatggtagcattattgaaataaatgtttaactatccaaagtgattactttcaaagatgatttttacttaaagatattaggtctggccaggcgaagtgactcacacctgcaatcccagcactttgggaggccgaggcgggcggatcacctgaggtcagcagttcaagaccagcctgaccaacatggtgaaaccctgtctctaccaaaatacaaaaattagccgggcatgatggcgggtgcctgtaatcccagctactcgggaggctgaggcaggagaatcgcttgaacccaggaggcggagcttgcagtgagccgagatcaggccattgcacttcagcctgggtgacagagtgagactccatctcaaaaaaaaaaaaaaaaagatattaggtcctagaatttttaaaatgtgtcttcataatcataggtagctaggttataaactatttaaagacaagatcacgtgataagcttataatcttctcataattccccttacttagcattgtgttagacatactaataggtgcacagtgaaatacttattgttgattgtttaaaaataaagttttagaaaaccttttcaaaagtcagagtttaggccaggggcacaggctgacacctataatcccagcactttgggaggccagggcgggcagatcacttgggtcaagagttcaaggccagcctggccaacatggcaaaaccccatctctactaaataaaatacaaaaattatccaggcatggtggtgcatgcctgtaatcccagctacttggaggctgaggcatgagaattgcttgaacctgggaggcagaggttgcagtgagctgagatcgccccactgcaatccagcctgggagacataattcaaatctattttggtcttatatcttcttatgtttgtgttatttcatgtgtgccagtttctctttttttcacaacaatttatcaatttgtggcaataaaaatgatttacctttaaaaaacaccctactgtcttttaaagtctgcaagtcgtatggtccgcagcctttggttgcctctcctccgcttcgaggctgcggtcgcatcccctcgcccgcctctcgctctcctctgcgcgtcgcgggcgcgctcctctctctcggtcctcgctgcccgcttctctcttcccgcggtctttgtgtcctcctctgtcgctcgtcgttttactgtcgtcgtgtctgcttcgcccagctctcgtcgctctgcccctccggtcgttcattggctgctacgcgctcggcctcgttcacctcctcgcccccg

SEQ ID NO: 50448 - DNA, 1947 bp, Homo sapiens
ccacgcgtccgggcgcccacagagccgcggcaccatggcacctgctggacgcccgggggccaagaaggggattttggagcgcctggagagtggggaggttgtgattggagatggcagctttctcattactctggagaagagaggctatgtgaaggctgggctctggactccagaggcagtgatagaacacccagacgcagttcgtcaacttcacatggaattcttgagagcaggatcaaatgtcatgcagacttttaccttttctgccagtgaggacaatatggaaagcaagtgggaagatgtaaatgctgctgcctgtgacctcgccagggaagtggctggcaaaggtgatgctttggtagcaggggggatctgccagacatcaatatacaaataccagaaggatgaagctagaattaaaaaactttttcgacaacagctagaagtttttgcctggaaaaatgtggacttcttgattgcagagtattttgagcacgttgaagaagctgtgtgggctgtggaagtcttaaaagaatcagatagacccgtggcagttaccatgtgcataggcccagagggagacatgcatgatataacccccggagaatgtgctgtgaggctggtgaaggcaggggcttccatcgttggcgtgaactgccgctttgggcccgacaccagcttgaagacgatggagctcatgaaggagggtcttgagtgggcagggctgaaagcgcacctcatggtgcagcctctggggttccacgcgcctgactgtggcaaagaggggtttgtggatctcccagaatatccctttggactggagtccagagttgccaccagatgggatattcaaaaatacgccagagaggcctacaacctgggggtcaggtacattggcgggtgctgtggatttgagccctaccacatcagggcaattgcagaggagctggccccagaaaggggctttttgccaccagcttcagaaaaacacggcagctggggaagtggtttggacatgcacaccaaaccctggattagagcaagggctcgaagggagtattgggagaatctgctgccagcttcaggcagacctttctgtccttcgctgtcaaagccagacttctaaggagtagtgaaagaaaaccctgaaataatcgaacaggaaaaagttgccctcaagcctgacctggaaccgttcctcaccttcatcctcaccatgccctgctatctccagctgctgagcagctgaggtgctgcagccccttcccttccagcccacaagtgtgtgcatattgagctcctgctgtggttaagcactgcaacagactctaccagagatgcaaagagaagcgagagaggcaccttgttctccaagaacttactgtccaatcatgctgtggtgcattcctttgaagatcatgaagaatagccaaacttgtctttgagggtgaatttgacactttaaaataatcagaagtcactgagacccaaagctagtgaataattcaagtgactaagctagatacttgaggatgatagagcaacactaaactaaagcaatgagtctgctttttttaatgatttatacaatgactccaaaggcaatcccaaagaaaagatgtaaagaatgttttgagcaatggtagcattattgaaataaatgtttaactatccaaagtgattactttcaaagatgatttttacttaaagatattaggtctggccaggcgaagtgactcacactgcaatccagcctgggagacataattcaaatctattttggtcttatatcttcttatgtttgtgttatttcatgtgtgccagtttctctttttttcacaacaatttatcaatttgtggcaataaaaatgatttaccttttatagtgtttgaatgtcgaaaatgtcatgaacattctttggaataatactagcaaatatttattac

SEQ ID NO: 50449 - DNA, 250 bp, Homo sapiens
gcctactactactactaaattcgcggccgcgtcgacctctcatccccacttcccatggggatgagaggagaaatcttggcttcacttttggtgagaaagacatgatagacactgaggaaagtttgaacttgtggccgggacctgtccctctcaggtcttctagacatgtctgagggaagtctcttgaatgtaagaaagtgttattggcaaagcaatccaataaaataagctacctatgatgcaaaaaaaa

SEQ ID NO: 50450 - DNA, 1129 bp, Homo sapiens
ctcgagcgcgcctcgcgcggccgcggcgcgagccgggacccctggaagggtcgggtgcgcggcccaggaggtaccgctgtctcctcacaatcggccaggcctgcagccgctgccgccgccgccgccgccgccgccctactcagggagtggcccaggcctgcggcgcgccaccctcacctccttcattcctaccgtcaaagcccagccttggctacctgacccccctgtggtctcgaactcggttagtccggtgaagggacagagaagcctgggttcccggcggcatcactgagatgctcagtcctgaattctgccctccattaggattatctgctttgtgggataatttcctcattggttgagtcagtgagttgcgtgtctgcaagagagcatcctatctggtcggagcagagcatggacatgggaacgagtgctctcagcaagaagccgtggtggaccctgcctcaaaactttcatgcaccaatggtgtttcacatggaagaggaccaggaggagctcatcttcgggcatggtgacacataccttcgctgcattgaggtgcacagccacacccttattcagctggagagttggttcacagctacaggccagactcgtgtgactgtagtcggaccacacagggcaaggcagtggctgctgcacatgttttgttgtgtggggagccaggactcctatcatcatgctcgaggcctggagatgctggaacgtgtccgaagccagcctctgaccaacgatgacctggtcacctccattagtgtgccaccatacactggagacctgtctttggctcccaggataagtggaaccgtgtgtcttagcgttcctcagccttccccttaccaagtgattggttgttcgggtttccatttgagttcactgtatccgtaattaaggactgatctcccctgggaagtggggatgagaggagaaatcttggcttcacttttggtgagaaagacatgatagacactgaggaaagtttgaacttgtggccgggacctgtccctctcaggtcttctagacatgtctgagggaagtctcttgaatgtaagaaagtgttattggcaaagcaatccaataaaataagctacctatgatgcaaaaaaaa

SEQ ID NO: 50451 - DNA, 969 bp, Homo sapiens
ctcgagcgcgcctcgcgcggccgcggcgcgagccgggacccctggaagggtcgggtgcgcggcccaggaggtaccgctgtctcctcacaatcggccaggcctgcagccgctgccgccgccgccgccgccgccgccctactcagggagtggcccaggcctgcggcgcgccaccctcacctccttcattcctaccgtcaaagcccagccttggctacctgacccccctgtggtctcgaactcggtcggagcagagcatggacatgggaacgagtgctctcagcaagaagccgtggtggaccctgcctcaaaactttcatgcaccaatggtgtttcacatggaagaggaccaggaggagctcatcttcgggcatggtgacacataccttcgctgcattgaggtgcacagccacacccttattcagctggagagttggttcacagctacaggccagactcgtgtgactgtagtcggaccacacagggcaaggcagtggctgctgcacatgttttgttgtgtggggagccaggactcctatcatcatgctcgaggcctggagatgctggaacgtgtccgaagccagcctctgaccaacgatgacctggtcacctccattagtgtgccaccatacactggagacctgtctttggctcccaggataagtggaaccgtgtgtcttagcgttcctcagccttccccttaccaagtgattggttgttcgggtttccatttgagttcactgtatccgtaattaaggactgatctcccctgggaagtggggatgagaggagaaatcttggcttcacttttggtgagaaagacatgatagacactgaggaaagtttgaacttgtggccgggacctgtccctctcaggtcttctagacatgtctgagggaagtctcttgaatgtaagaaagtgttattggcaaagcaatccaataaaataagctacctatgatgcaaaaaaaa

SEQ ID NO: 50452 - DNA, 1061 bp, Homo sapiens
ctcgagcgcgcctcgcgcggccgcggcgcgagccgggacccctggaagggtcgggtgcgcggcccaggaggtaccgctgtctcctcacaatcggccaggcctgcagccgctgccgccgctgccgccgccgccgccgccgccgccgccgccctactcagggagtggcccaggcctgcggcgcgccaccctcacctccttcattcctaccgtcaaagcccagccttggctacctgacccccctgtggtctcgaactcggattatctgctttgtgggataatttcctcattggttgagtcagtgagttgcgtgtctgcaagagagcatcctatctggtcggagcagagcatggacatgggaacgagtgctctcagcaagaagccgtggtggaccctgcctcaaaactttcatgcaccaatggtgtttcacatggaagaggaccaggaggagctcatcttcgggcatggtgacacataccttcgctgcattgaggtgcacagccacacccttattcagctggagagttggttcacagctacaggccagactcgtgtgactgtagtcggaccacacagggcaaggcagtggctgctgcacatgttttgttgtgtggggagccaggactcctatcatcatgctcgaggcctggagatgctggaacgtgtccgaagccagcctctgaccaacgatgacctggtcacctccattagtgtgccaccatacactggagacctgtctttggctcccaggataagtggaaccgtgtgtcttagcgttcctcagccttccccttaccaagtgattggttgttcgggtttccatttgagttcactgtatccgtaattaaggactgatctcccctgggaagtggggatgagaggagaaatcttggcttcacttttggtgagaaagacatgatagacactgaggaaagtttgaacttgtggccgggacctgtccctctcaggtcttctagacatgtctgagggaagtctcttgaatgtaagaaagtgttattggcaaagcaatccaataaaataagctacctatgatgcaaaaaaaa

SEQ ID NO: 50453 - DNA, 276 bp, Homo sapiens
ctaaactagtttttatatactggaaactattaacgtttgcttttactgtttccagatctggagttgagaaatgagatggtttagaacctaaagataaaggaaggaggaacctcatcatcagtgaatactctgaatatccacaacatactacatctgcaggctttcaacttttgttgacctctttggaactctataagctccagaatgaagatggaaaaccagtgagctacatgaattaagtggaacacagatcagcatggtttcagttcctggagg

SEQ ID NO: 50454 - DNA, 331 bp, Homo sapiens
  misc_feature (268)..(268): n is a, c, g, or t
  misc_feature (271)..(271): n is a, c, g, or t
  misc_feature (281)..(281): n is a, c, g, or t
ttactttatactacattgatagtgagaagttaatggcttctctatcccccacactgtctcatgcctttgcacagttcgaaaggaagacttggagtttacaatcagaacctggaccctaaagaacagtgactgcaaaggcaaagaaagtaaaaaaggaattggccattagacgttcctgagcatccaagatgaacattttgtagtgcaaaagacttttgtgaaaagctgatacctcaatctttactactgtatttttaaaaatgaaggntgntattgcaagnttaaaaaggtaacagaattttaactgttgcttattaagcaaccttcttgt

SEQ ID NO: 50455 - DNA, 1894 bp, Homo sapiens
tggataaagaaaatgtggtacataaacaccatggaatactacacagccataaaaaagaatgaaatcatgtcctttgcagcaacatggatgctactggaggccactatcctaagcaaattaatacagaaatggaaaaccaaataccacgttctcacttataagggaaagtgaaacactgggtatacacggacacaaagatggaaacaataaactctgggaattccaaaaggggagagatagggggtgagggttgaaaaactacctattgggtactatgttcactgcttaggtgacaggatcattagaagcctaaacctcagtatcacacaacatacccatgtaacaaacctgtacatgtacccctgaatctaaaataaattttttcaataaagaaagaaaggttcttggaggagatagattcgatgttaaatcttctttcatcagcacatgtgtattgactgtcactctctaccaggctgtattctaggtaatggatgtaggagagaacaaaaaggtctctgctgttctgaagcttatagtctattggggagagatagtaaataagacggaaacaaataaatacacagtttcagagagcaatgagttctacaaatgagcagtgagccctataaacaaaatttagattaaattaaattaggataggtcagcctctttgttatagcagatgatactttttatatggtttagcaaagagtcaggaggaagtaattttaaaaagaaaacaaaaaaacctcttaccaccactttaagccactgtggtgattgagcaaacacaaagggaaagtcaaacctctgtcatttgcctggactatctggatgtgatgtaaactgggaaggtgaactttatgaaatctatgcaactaagatcagaagctgagctatgcccctcaaggagtgatatcttacaattttatcttaaacatgggtcatattgatcatttatgtcttaatttagtgatataaaattagagcctgaaagagtacctaaaaacaattgtccacacacaggacagttctgaaagaaatttatataacactattatatgcagtgtttttcaagttttcatttattaaaatcaccaaattaagtcatcctttcatacgctgtgattcagttaaaaggggcttttgttgcagaagctctagttaaggtttgaaaatcgatttctctacttctgcttccaagaggatggagtaggcatactttgccctattcttcccactaagtacacctaaaatccctagacatacataaaacaaatgtaagaacattctggaaggtaaagagaagaagacggactgattagggtccttgagacttgaggggcgccatagtgatgagctccaggggactttctttttgcctcatgtatccagacttggagccgaagtcgctgggaacccagaaacagtaatcggcacagactttagaaaaacaacaataaaagctgactttctctaaccaaataaccaggaaagggacagcccagcaagacacaaaagttttagaccataaatgtgctactgcagctgaacaccacaggaaacactgtggtcccccctcacccacaccagcaagggctgagtcaagtgagacttctccccttgctggggtggtgtcagagaagaccaagccaggagccagaaatttcatccccactggtcagtaaggaagctcgtctgctcccagagtttcagtggagaccacgtgggaattctggattctcacccccactcagcagtaaggaggcacctacccctcccccactccctggccagttgacacccagtagaaaacccagatgcctgcattcacctggcggtaacaagatggtggcagccaccttcccctgctagagcagtgtcaaaaaaa

SEQ ID NO: 50456 - DNA, 375 bp, Homo sapiens
ttaacactggccaaggcacttgaatgcaaagcaaaagtgacaaaagggactgaggttgcagtacgggaagtacactactgtgtcagtagttaaaggtggtggccttgatttctcagagggagaggaatcagctttgaagatgcctgtcacagacactagaaaatccaaccatctagggcattgtgtctgctgactctgtgctgagggatagagctagaacccaaattccaggtccctgtgtgttgaaaacagtcaatcagcattctgaccctgccctgattactttgaattcagtggcctggaaagccccattgatttcactgtctgatttctggaagtcaattgaaagagaaacatagcagcaagaacctaaaa

SEQ ID NO: 50457 - DNA, 272 bp, Homo sapiens
gaattttgttcatatatttaacaaccttcctttgccaggaccttttttttccccagtgcccaatcttggttgggatagaagtagccctgacttttttttcctgtttattactcatattatatgtcttataggctttttcattcacgcatacatttctaaaccaaatgccgcacagcgtaactgatacaaataatgatttcatgtccactattgaaaatttggggggtgggtgcagtgactcaatgcctgtaatcccagtactttgggaggct

SEQ ID NO: 50458 - DNA, 511 bp, Homo sapiens
cgagctcggtaccccggaagcacatcctgcaacattatttatctggaatctacctgcccttttgttttttagatacaagggcttggttttgttacccaggctggtttcaaggccatagctttaagagatcctctcaccacagatttccaaagtgctgggattgcaggtgtgattcatggcacccagactttgctgcctttcttacatgatccaggcccagaacccaaactcaggcactgtatagatgaccactttcgtaaactactgacctagcttgttgccaattgttgattgaacttcccataactccacttcgtgtctgttcctctgtatacagccaccttctgttcccgtcatgagcctttaggtctccatttgcatattgcaaatactatgttccatgtaggtagctcattcagggccttgctcttcacttcaaaaaaggttcccttgaggactggctgtcaatttgtgttgctgtgtgcttccggggacctctagacagccacca

SEQ ID NO: 50459 - DNA, 147 bp, Homo sapiens
tcaagcttctaacgatgtacggggacatgtaggtagctcattcagggccttgctcttcacttcaaaaaaggttcccttgaggactggctgtcaatttgtgttgctgtgttggttgttgatgaaaataataaaatgattgattacata

SEQ ID NO: 50460 - DNA, 1525 bp, Homo sapiens
tgctagtagggcctgggttaatcggccgagggggtaagtggcttcgtggtctttatagctgttactcttttgtactttgtctttttcttttattttcttttgagcgattgtgcgaacatagcatagcacgcactatgccttctgtgttgtagctgcctggccagggcgactggcggataaggtcttgtgcgtggcctcgaggcttaaaagtagcagtggggctttgtgaaggacaaaatggcgatggcgggccgtgtaggtcccccttcctatgatgaggaccttttcacagacctgtactgagctccgtgaggataaataactctgaggagatgggccctgcaagcctcttgcttagccgtctgttcagaaaatagcgttttcgaaatgccctgagttgacctaatgtcttattgggctcctgtctgcaggatttacgcgcacgttggaaccgaagagagctctgttgttgcaatgttcagcccacaagagcttactggtgaaggaatgggacaagacccatctttatgcaaagccagcgttacagtaatgttccagcatctcataatctatcctggggaattcagctgcctcccagggtgaatacaggtattcctgatgacagtctgcctctatcttacagagcagcttgttgctatataccattgaaaagccttcagagctgagaggtactactaaccaataacctgcttggctcaaagggccagcaccttctctctaaagcccaagaggagtttgaggaaaactaggtgtctgtgttcactccaggctgaagttacaggtctgagcaaataaggtgtataaaaaatggaatctgtcttggaggacatcagaaggtgaattttccaagttcttggacaacctagctgttgaaaagctttctgggtttggggggtatttcagatgtaccttaaagtgttagcagacacagattaagacactgggagccaatgaaacagcagttgagggtttgctgtgtatcacatttctgtattttatcacccccttcctgcaacattatttatctggaatctacctgcccttttgttttttagatacaagggcttggttttgttacccaggctggtttcaaggccatagctttaagagatcctctcaccacagatttccaaagtgctgggattgcaggtgtgattcatggcacccagactttgctgcctttcttacatgatccaggcccagaacccaaactcaggcactgtatagatgaccactttcgtaaactactgacctagcttgttgccaattgttgattgaacttcccataactccacttcgtgtctgttcctctgtatacagccaccttctgttcccgtcatgagcctttaggtctccatttgcatattgcaaatactatgttccatgtaggtagctcattcagggccttgctcttcacttcaaaaaaggttcccttgaggactggctgtcaatttgtgttgctgtgttggttgttgatgaaaataataaaatgattgattacata

SEQ ID NO: 50461 - DNA, 1656 bp, Homo sapiens
tgctagtagggcctgggttaatcggccgagggggtaagtggcttcgtggtctttatagctgttactcttttgtactttgtctttttcttttattttcttttgagcgattgtgcgaacatagcatagcacgcactatgccttctgtgttgtagctgcctggccagggcgactggcggataaggtcttgtgcgtggcctcgaggcttaaaagtagcagtggggctttgtgaaggacaaaatggcgatggcgggccgtgtaggtcccccttcctatgatgaggaccttttcacagacctgtactgagctccgtgaggataaataactctgaggagatgggccctgcaagcctcttgcttagccgtctgttcagaaaatagcgttttcgaaatgccctgagttgacctaatgtcttattgggctcctgtctgcaggatttacgcgcacgttggaaccgaagagagctctgttgttgcaatgttcagcccacaagagcttactggtgaaggaatgggacaagacccatctttatgcaaagccagcgttacagtaatgttccagcatctcataatctatcctggggaattcagctgcctcccagggtgaatacaggtattcctgatgacagtctgcctctatcttacagagcagcttgttgctatataccattgaaaagccttcagagctgagaggtactactaaccaataacctgcttggctcaaagggccagcaccttctctctaaagcccaagaggagtttgaggaaaactaggtgtctgtgttcactccaggctgaagttacaggtctgagcaaataaggtgtataaaaaatggtaggtatctgtttaaatatttaactgattttataatagcaaccttttgctcctaggttacatagtgttaaatattgtgttcatttgtattttccaatccaataagaacttttttttttacctctgcaggagaatctgtcttggaggacatcagaaggtgaattttccaagttcttggacaacctagctgttgaaaagctttctgggtttggggggtatttcagatgtaccttaaagtgttagcagacacagattaagacactgggagccaatgaaacagcagttgagggtttgctgtgtatcacatttctgtattttatcacccccttcctgcaacattatttatctggaatctacctgcccttttgttttttagatacaagggcttggttttgttacccaggctggtttcaaggccatagctttaagagatcctctcaccacagatttccaaagtgctgggattgcaggtgtgattcatggcacccagactttgctgcctttcttacatgatccaggcccagaacccaaactcaggcactgtatagatgaccactttcgtaaactactgacctagcttgttgccaattgttgattgaacttcccataactccacttcgtgtctgttcctctgtatacagccaccttctgttcccgtcatgagcctttaggtctccatttgcatattgcaaatactatgttccatgtaggtagctcattcagggccttgctcttcacttcaaaaaaggttcccttgaggactggctgtcaatttgtgttgctgtgttggttgttgatgaaaataataaaatgattgattacata

SEQ ID NO: 50462 - DNA, 1760 bp, Homo sapiens
tgctagtagggcctgggttaatcggccgagggggtaagtggcttcgtggtctttatagctgttactcttttgtactttgtctttttcttttattttcttttgagcgattgtgcgaacatagcatagcacgcactatgccttctgtgttgtagctgcctggccagggcgactggcggataaggtcttgtgcgtggcctcgaggcttaaaagtagcagtggggctttgtgaaggacaaaatggcgatggcgggccgtgtaggtcccccttcctatgatgaggaccttttcacagacctgtactgagctccgtgaggataaataactctgaggagatgggccctgcaagcctcttgcttagccgtctgttcagaaaatagcgttttcgaaatgccctgagttgacctaatgtcttattgggctcctgtctgcaggatttacgcgcacgttggaaccgaagagagctctgttgttgcaatgttcagcccacaagagcttactggtgaaggaatgggacaagacccatctttatgcaaagccagcgttacagtaatgttccagcatctcataatctatcctggggaattcagctgcctcccagggtgaatacaggtattcctgatgacagtctgcctctatcttacagagcagcttgttgctatataccattgaaaagccttcagagctgagaggtactactaaccaataacctgcttggctcaaagggccagcaccttctctctaaagcccaagaggagtttgaggaaaactaggtgtctgtgttcactccaggctgaagttacaggtgagtaaacctaaatgtaaggtggactatgctaaaaattcccaatgaagaaactttcacatgtcttactctctgtcctagtcccagagcctgtaaaggtgaacccactgggactggctgggggagaagaggaagatttgttccagaaggaactgtctgagggatgataaagatttctatacagagaaagggagtaatcatcacttgttgaaaacattggttttattttttccaggtctgagcaaataaggtgtataaaaaatggaatctgtcttggaggacatcagaaggtgaattttccaagttcttggacaacctagctgttgaaaagctttctgggtttggggggtatttcagatgtaccttaaagtgttagcagacacagattaagacactgggagccaatgaaacagcagttgagggtttgctgtgtatcacatttctgtattttatcacccccttcctgcaacattatttatctggaatctacctgcccttttgttttttagatacaagggcttggttttgttacccaggctggtttcaaggccatagctttaagagatcctctcaccacagatttccaaagtgctgggattgcaggtgtgattcatggcacccagactttgctgcctttcttacatgatccaggcccagaacccaaactcaggcactgtatagatgaccactttcgtaaactactgacctagcttgttgccaattgttgattgaacttcccataactccacttcgtgtctgttcctctgtatacagccaccttctgttcccgtcatgagcctttaggtctccatttgcatattgcaaatactatgttccatgtaggtagctcattcagggccttgctcttcacttcaaaaaaggttcccttgaggactggctgtcaatttgtgttgctgtgttggttgttgatgaaaataataaaatgattgattacata

SEQ ID NO: 50463 - DNA, 1474 bp, Homo sapiens
tgctagtagggcctgggttaatcggccgagggggtaagtggcttcgtggtctttatagctgttactcttttgtactttgtctttttcttttattttcttttgagcgattgtgcgaacatagcatagcacgcactatgccttctgtgttgtagctgcctggccagggcgactggcggataaggtcttgtgcgtggcctcgaggcttaaaagtagcagtggggctttgtgaaggacaaaatggcgatggcgggccgtgtaggtcccccttcctatgatgaggaccttttcacagacctgtactgagctccgtgaggataaataactctgaggagatgggccctgcaagcctcttgcttagccgtctgttcagaaaatagcgttttcgaaatgccctgagttgacctaatgtcttattgggctcctgtctgcaggatttacgcgcacgttggaaccgaagagagctctgttgttgcaatgttcagcccacaagagcttactggtgaaggaatgggacaagacccatctttatgcaaagccagcgttacagtaatgttccaggtattcctgatgacagtctgcctctatcttacagagcagcttgttgctatataccattgaaaagccttcagagctgagaggtactactaaccaataacctgcttggctcaaagggccagcaccttctctctaaagcccaagaggagtttgaggaaaactaggtgtctgtgttcactccaggctgaagttacaggtctgagcaaataaggtgtataaaaaatggaatctgtcttggaggacatcagaaggtgaattttccaagttcttggacaacctagctgttgaaaagctttctgggtttggggggtatttcagatgtaccttaaagtgttagcagacacagattaagacactgggagccaatgaaacagcagttgagggtttgctgtgtatcacatttctgtattttatcacccccttcctgcaacattatttatctggaatctacctgcccttttgttttttagatacaagggcttggttttgttacccaggctggtttcaaggccatagctttaagagatcctctcaccacagatttccaaagtgctgggattgcaggtgtgattcatggcacccagactttgctgcctttcttacatgatccaggcccagaacccaaactcaggcactgtatagatgaccactttcgtaaactactgacctagcttgttgccaattgttgattgaacttcccataactccacttcgtgtctgttcctctgtatacagccaccttctgttcccgtcatgagcctttaggtctccatttgcatattgcaaatactatgttccatgtaggtagctcattcagggccttgctcttcacttcaaaaaaggttcccttgaggactggctgtcaatttgtgttgctgtgttggttgttgatgaaaataataaaatgattgattacata

SEQ ID NO: 50464 - DNA, 1732 bp, Homo sapiens
tgctagtagggcctgggttaatcggccgagggggtaagtggcttcgtggtctttatagctgttactcttttgtactttgtctttttcttttattttcttttgagcgattgtgcgaacatagcatagcacgcactatgccttctgtgttgtagctgcctggccagggcgactggcggataaggtcttgtgcgtggcctcgaggcttaaaagtagcagtggggctttgtgaaggacaaaatggcgatggcgggccgtgtaggtcccccttcctatgatgaggaccttttcacagacctgtactgagctccgtgaggataaataactctgaggagatgggccctgcaagcctcttgcttagccgtctgttcagaaaatagcgttttcgaaatgccctgagttgacctaatgtcttattgggctcctgtctgcaggatttacgcgcacgttggaaccgaagagagctctgttgttgcagtaagttcttacggccatttcttaatctctgctctttcgttgagtgtgtggaagttgctacggggatgattttacgaactgaactctctctttctgatggattagtgggagaaacagaaaattctgagtagcactgtactgtacgcaacaaatgtcagggccctattgatttgtctgaggtgttagtgaagggtgttattttttcagatgttcagcccacaagagcttactggtgaaggaatgggacaagacccatctttatgcaaagccagcgttacagtaatgttccagcatctcataatctatcctggggaattcagctgcctcccagggtgaatacaggtattcctgatgacagtctgcctctatcttacagagcagcttgttgctatataccattgaaaagccttcagagctgagaggtactactaaccaataacctgcttggctcaaagggccagcaccttctctctaaagcccaagaggagtttgaggaaaactaggtgtctgtgttcactccaggctgaagttacaggtctgagcaaataaggtgtataaaaaatggaatctgtcttggaggacatcagaaggtgaattttccaagttcttggacaacctagctgttgaaaagctttctgggtttggggggtatttcagatgtaccttaaagtgttagcagacacagattaagacactgggagccaatgaaacagcagttgagggtttgctgtgtatcacatttctgtattttatcacccccttcctgcaacattatttatctggaatctacctgcccttttgttttttagatacaagggcttggttttgttacccaggctggtttcaaggccatagctttaagagatcctctcaccacagatttccaaagtgctgggattgcaggtgtgattcatggcacccagactttgctgcctttcttacatgatccaggcccagaacccaaactcaggcactgtatagatgaccactttcgtaaactactgacctagcttgttgccaattgttgattgaacttcccataactccacttcgtgtctgttcctctgtatacagccaccttctgttcccgtcatgagcctttaggtctccatttgcatattgcaaatactatgttccatgtaggtagctcattcagggccttgctcttcacttcaaaaaaggttcccttgaggactggctgtcaatttgtgttgctgtgttggttgttgatgaaaataataaaatgattgattacata

SEQ ID NO: 50465 - DNA, 1496 bp, Homo sapiens
tgctagtagggcctgggttaatcggccgagggggtaagtggcttcgtggtctttatagctgttactcttttgtactttgtctttttcttttattttcttttgagcgattgtgcgaacatagcatagcacgcactatgccttctgtgttgtagctgcctggccagggcgactggcggataaggtcttgtgcgtggcctcgaggcttaaaagtagcagtggggctttgtgaaggacaaaatggcgatggcgggccgtgtaggtcccccttcctatgatgaggaccttttcacagacctgtactgagctccgtgaggataaataactctgaggagatgggccctgcaagcctcttgcttagccgtctgttcagaaaatagcgttttcgaaatgccctgagttgacctaatgtcttattgggctcctgtctgcaggatttacgcgcacgttggaaccgaagagagctctgttgttgcaatgttcagcccacaagagcttactggtgaaggaatgggacaagacccatctttatgcaaagccagcgttacagtaatgttccagcatctcataatctatcctggggaattcagctgcctcccagggtgaatacaggtattcctgatgacagtctgcctctatcttacagagcagcttgttgctatataccattgaaaagccttcagagctgagaggtactactaaccaataacctgcttggctcaaagggccagcaccttctctctaaagcccaagaggagtttgaggaaaactaggtgtctgtgttcactccaggctgaagttacaggaatctgtcttggaggacatcagaaggtgaattttccaagttcttggacaacctagctgttgaaaagctttctgggtttggggggtatttcagatgtaccttaaagtgttagcagacacagattaagacactgggagccaatgaaacagcagttgagggtttgctgtgtatcacatttctgtattttatcacccccttcctgcaacattatttatctggaatctacctgcccttttgttttttagatacaagggcttggttttgttacccaggctggtttcaaggccatagctttaagagatcctctcaccacagatttccaaagtgctgggattgcaggtgtgattcatggcacccagactttgctgcctttcttacatgatccaggcccagaacccaaactcaggcactgtatagatgaccactttcgtaaactactgacctagcttgttgccaattgttgattgaacttcccataactccacttcgtgtctgttcctctgtatacagccaccttctgttcccgtcatgagcctttaggtctccatttgcatattgcaaatactatgttccatgtaggtagctcattcagggccttgctcttcacttcaaaaaaggttcccttgaggactggctgtcaatttgtgttgctgtgttggttgttgatgaaaataataaaatgattgattacata

SEQ ID NO: 50466 - DNA, 2327 bp, Homo sapiens
tgctagtagggcctgggttaatcggccgagggggtaagtggcttcgtggtctttatagctgttactcttttgtactttgtctttttcttttattttcttttgagcgattgtgcgaacatagcatagcacgcactatgccttctgtgttgtagctgcctggccagggcgactggcggataaggtcttgtgcgtggcctcgaggcttaaaagtagcagtggggctttgtgaaggacaaaatggcgatggcgggccgtgtaggtcccccttcctatgatgaggaccttttcacagacctgtactgagctccgtgaggataaataactctgaggagatgggccctgcaagcctcttgcttagccgtctgttcagaaaatagcgttttcgaaatgccctgagttgacctaatgtcttattgggctcctgtctgcaggatttacgcgcacgttggaaccgaagagagctctgttgttgcaatgttcagcccacaagagcttactggtgaaggaatgggacaagacccatctttatgcaaagccagcgttacagtaatgttccagcatctcataatctatcctggggaattcagctgcctcccagggtgaatacaggtattcctgatgacagtctgcctctatcttacagagcagcttgttgctatataccattgaaaagccttcagagctgagaggtactactaaccaataacctgcttggctcaaagggccagcaccttctctctaaagcccaagaggagtttgaggtaaatggctttgcaatagttaccatcaatggctgctatataaaattttctgtgatttttgtgtgtgatagcactgtggtctgggtgaatgtacacagacataactggcttaacccaaagtctttgatctcctgaaccaccagtgatgaattgctgctcaccagtgatgagttgaataccgccccagtctgatcaatgtgtgactgaaaggtattttctgagctgtgagcctgccttccagtgacatgttctaaaaattgcaagttatttgaggaggctttacagccaataggaagttcttgggctaagtagtgtttcctataaaatgtgccctgaaacttctttctgccaagcaatagatacaattgagagattgtaaaatgtgacatagaatgaaagtctctcaagactacatttttctttcttgattttgcaggaaaactaggtgtctgtgttcactccaggctgaagttacaggtgagtaaacctaaatgtaaggtggactatgctaaaaattcccaatgaagaaactttcacatgtcttactctctgtcctagtcccagagcctgtaaaggtgaacccactgggactggctgggggagaagaggaagatttgttccagaaggaactgtctgagggatgataaagatttctatacagagaaagggagtaatcatcacttgttgaaaacattggttttattttttccaggtctgagcaaataaggtgtataaaaaatggtaggtatctgtttaaatatttaactgattttataatagcaaccttttgctcctaggttacatagtgttaaatattgtgttcatttgtattttccaatccaataagaacttttttttttacctctgcaggagaatctgtcttggaggacatcagaaggtgaattttccaagttcttggacaacctagctgttgaaaagctttctgggtttggggggtatttcagatgtaccttaaagtgttagcagacacagattaagacactgggagccaatgaaacagcagttgagggtttgctgtgtatcacatttctgtattttatcacccccttcctgcaacattatttatctggaatctacctgcccttttgttttttagatacaagggcttggttttgttacccaggctggtttcaaggccatagctttaagagatcctctcaccacagatttccaaagtgctgggattgcaggtgtgattcatggcacccagactttgctgcctttcttacatgatccaggcccagaacccaaactcaggcactgtatagatgaccactttcgtaaactactgacctagcttgttgccaattgttgattgaacttcccataactccacttcgtgtctgttcctctgtatacagccaccttctgttcccgtcatgagcctttaggtctccatttgcatattgcaaatactatgttccatgtaggtagctcattcagggccttgctcttcacttcaaaaaaggttcccttgaggactggctgtcaatttgtgttgctgtgttggttgttgatgaaaataataaaatgattgattacata

SEQ ID NO: 50467 - DNA, 1861 bp, Homo sapiens
tgctagtagggcctgggttaatcggccgagggggtaagtggcttcgtggtctttatagctgttactcttttgtactttgtctttttcttttattttcttttgagcgattgtgcgaacatagcatagcacgcactatgccttctgtgttgtagctgcctggccagggcgactggcggataaggtcttgtgcgtggcctcgaggcttaaaagtagcagtggggctttgtgaaggacaaaatggcgatggcgggccgtgtaggtcccccttcctatgatgaggaccttttcacagacctgtactgagctccgtgaggataaataactctgaggagatgggccctgcaagcctcttgcttagccgtctgttcagaaaatagcgttttcgaaatgccctgagttgacctaatgtcttattgggctcctgtctgcaggatttacgcgcacgttggaaccgaagagagctctgttgttgcaatgttcagcccacaagagcttactggtgaaggaatgggacaagacccatctttatgcaaagccagcgttacagtaatgttccagcatctcataatctatcctggggaattcagctgcctcccagggtgaatacaggtaattatccaaattggtgtatgtcatctttgtaaatgttcaagaaaacaagtggccggcggaacaatgttttttggcgccttccatcttgttcctcttgaaatgattttctggggagggagatcgcaacccggtactacagttcttgtaagggtgtgctgttaccctcatccatatatcgatcacgttactgtcagatgatttgaattgataagctgatgttctgtgaggtacaaaagttaatagcatgttagagttctgatggcagttgttgtttatgaataagcttcattccatcctaataccttaaaataactaatttgctttcctttccaggtattcctgatgacagtctgcctctatcttacagagcagcttgttgctatataccattgaaaagccttcagagctgagaggtactactaaccaataacctgcttggctcaaagggccagcaccttctctctaaagcccaagaggagtttgaggaaaactaggtgtctgtgttcactccaggctgaagttacaggtctgagcaaataaggtgtataaaaaatggaatctgtcttggaggacatcagaaggtgaattttccaagttcttggacaacctagctgttgaaaagctttctgggtttggggggtatttcagatgtaccttaaagtgttagcagacacagattaagacactgggagccaatgaaacagcagttgagggtttgctgtgtatcacatttctgtattttatcacccccttcctgcaacattatttatctggaatctacctgcccttttgttttttagatacaagggcttggttttgttacccaggctggtttcaaggccatagctttaagagatcctctcaccacagatttccaaagtgctgggattgcaggtgtgattcatggcacccagactttgctgcctttcttacatgatccaggcccagaacccaaactcaggcactgtatagatgaccactttcgtaaactactgacctagcttgttgccaattgttgattgaacttcccataactccacttcgtgtctgttcctctgtatacagccaccttctgttcccgtcatgagcctttaggtctccatttgcatattgcaaatactatgttccatgtaggtagctcattcagggccttgctcttcacttcaaaaaaggttcccttgaggactggctgtcaatttgtgttgctgtgttggttgttgatgaaaataataaaatgattgattacata

SEQ ID NO: 50468 - DNA, 1979 bp, Homo sapiens
tgctagtagggcctgggttaatcggccgagggggtaagtggcttcgtggtctttatagctgttactcttttgtactttgtctttttcttttattttcttttgagcgattgtgcgaacatagcatagcacgcactatgccttctgtgttgtagctgcctggccagggcgactggcggataaggtcttgtgcgtggcctcgaggcttaaaagtagcagtggggctttgtgaaggacaaaatggcgatggcgggccgtgtaggtcccccttcctatgatgaggaccttttcacagacctgtactgagctccgtgaggataaataactctgaggagatgggccctgcaagcctcttgcttagccgtctgttcagaaaatagcgttttcgaaatgccctgagttgacctaatgtcttattgggctcctgtctgcaggatttacgcgcacgttggaaccgaagagagctctgttgttgcaatgttcagcccacaagagcttactggtgaaggaatgggacaagacccatctttatgcaaagccagcgttacagtaatgttccagcatctcataatctatcctggggaattcagctgcctcccagggtgaatacaggtattcctgatgacagtctgcctctatcttacagtaagttgtttttcgaattctatgggcctattatctaatagataacttagccattttgatatttgttaccaaagcctgcttaacccataaagttttctggttcctcttgttctctgtagtgatgtttctagatagatgcccactgatatatgccccttttttctcagatagatgcccactgatctgcccagggtcagacgaatgcttgtcagttgtagctttccaggattctgctccaatgaggaggaaacatcctgccttacccctgttttagcctgggaaccagtaattgtgaactcaccagggttaacatgaagagggcatgagagcttattccataaggaattgtctgagacatttggttaccttttcttagtttgtccattagcaaccgtaactaaaatagttttggctgtttgggataattagctaattgaatgattttttgattcaggagcagcttgttgctatataccattgaaaagccttcagagctgagaggtactactaaccaataacctgcttggctcaaagggccagcaccttctctctaaagcccaagaggagtttgaggaaaactaggtgtctgtgttcactccaggctgaagttacaggtctgagcaaataaggtgtataaaaaatggaatctgtcttggaggacatcagaaggtgaattttccaagttcttggacaacctagctgttgaaaagctttctgggtttggggggtatttcagatgtaccttaaagtgttagcagacacagattaagacactgggagccaatgaaacagcagttgagggtttgctgtgtatcacatttctgtattttatcacccccttcctgcaacattatttatctggaatctacctgcccttttgttttttagatacaagggcttggttttgttacccaggctggtttcaaggccatagctttaagagatcctctcaccacagatttccaaagtgctgggattgcaggtgtgattcatggcacccagactttgctgcctttcttacatgatccaggcccagaacccaaactcaggcactgtatagatgaccactttcgtaaactactgacctagcttgttgccaattgttgattgaacttcccataactccacttcgtgtctgttcctctgtatacagccaccttctgttcccgtcatgagcctttaggtctccatttgcatattgcaaatactatgttccatgtaggtagctcattcagggccttgctcttcacttcaaaaaaggttcccttgaggactggctgtcaatttgtgttgctgtgttggttgttgatgaaaataataaaatgattgattacata

SEQ ID NO: 50469 - DNA, 2092 bp, Homo sapiens
tgctagtagggcctgggttaatcggccgagggggtaagtggcttcgtggtctttatagctgttactcttttgtactttgtctttttcttttattttcttttgagcgattgtgcgaacatagcatagcacgcactatgccttctgtgttgtagctgcctggccagggcgactggcggataaggtcttgtgcgtggcctcgaggcttaaaagtagcagtggggctttgtgaaggacaaaatggcgatggcgggccgtgtaggtcccccttcctatgatgaggaccttttcacagacctgtactgagctccgtgaggataaataactctgaggagatgggccctgcaagcctcttgcttagccgtctgttcagaaaatagcgttttcgaaatgccctgagttgacctaatgtcttattgggctcctgtctgcaggatttacgcgcacgttggaaccgaagagagctctgttgttgcaatgttcagcccacaagagcttactggtgaaggaatgggacaagacccatctttatgcaaagccagcgttacagtaatgttccagcatctcataatctatcctggggaattcagctgcctcccagggtgaatacaggtattcctgatgacagtctgcctctatcttacagagcagcttgttgctatataccattgaaaagccttcagagctgagaggtactactaaccaataacctgcttggctcaaagggccagcaccttctctctaaagcccaagaggagtttgaggtaaatggctttgcaatagttaccatcaatggctgctatataaaattttctgtgatttttgtgtgtgatagcactgtggtctgggtgaatgtacacagacataactggcttaacccaaagtctttgatctcctgaaccaccagtgatgaattgctgctcaccagtgatgagttgaataccgccccagtctgatcaatgtgtgactgaaaggtattttctgagctgtgagcctgccttccagtgacatgttctaaaaattgcaagttatttgaggaggctttacagccaataggaagttcttgggctaagtagtgtttcctataaaatgtgccctgaaacttctttctgccaagcaatagatacaattgagagattgtaaaatgtgacatagaatgaaagtctctcaagactacatttttctttcttgattttgcaggaaaactaggtgtctgtgttcactccaggctgaagttacaggtctgagcaaataaggtgtataaaaaatggtaggtatctgtttaaatatttaactgattttataatagcaaccttttgctcctaggttacatagtgttaaatattgtgttcatttgtattttccaatccaataagaacttttttttttacctctgcaggagaatctgtcttggaggacatcagaaggtgaattttccaagttcttggacaacctagctgttgaaaagctttctgggtttggggggtatttcagatgtaccttaaagtgttagcagacacagattaagacactgggagccaatgaaacagcagttgagggtttgctgtgtatcacatttctgtattttatcacccccttcctgcaacattatttatctggaatctacctgcccttttgttttttagatacaagggcttggttttgttacccaggctggtttcaaggccatagctttaagagatcctctcaccacagatttccaaagtgctgggattgcaggtgtgattcatggcacccagactttgctgcctttcttacatgatccaggcccagaacccaaactcaggcactgtatagatgaccactttcgtaaactactgacctagcttgttgccaattgttgattgaacttcccataactccacttcgtgtctgttcctctgtatacagccaccttctgttcccgtcatgagcctttaggtctccatttgcatattgcaaatactatgttccatgtaggtagctcattcagggccttgctcttcacttcaaaaaaggttcccttgaggactggctgtcaatttgtgttgctgtgttggttgttgatgaaaataataaaatgattgattacata

SEQ ID NO: 50470 - DNA, 1454 bp, Homo sapiens
tgctagtagggcctgggttaatcggccgagggggtaagtggcttcgtggtctttatagctgttactcttttgtactttgtctttttcttttattttcttttgagcgattgtgcgaacatagcatagcacgcactatgccttctgtgttgtagctgcctggccagggcgactggcggataaggtcttgtgcgtggcctcgaggcttaaaagtagcagtggggctttgtgaaggacaaaatggcgatggcgggccgtgtaggtcccccttcctatgatgaggaccttttcacagacctgtactgagctccgtgaggataaataactctgaggagatgggccctgcaagcctcttgcttagccgtctgttcagaaaatagcgttttcgaaatgccctgagttgacctaatgtcttattgggctcctgtctgcaggatttacgcgcacgttggaaccgaagagagctctgttgttgcaatgttcagcccacaagagcttactggtgaaggaatgggacaagacccatctttatgcaaagccagcgttacagtaatgttccagcatctcataatctatcctggggaattcagctgcctcccagggtgaatacaggtattcctgatgacagtctgcctctatcttacagagcagcttgttgctatataccattgaaaagccttcagagctgagaggtactactaaccaataacctgcttggctcaaagggccagcaccttctctctaaagcccaagaggagtttgaggaaaactaggtgtctgtgttcactccaggctgaagttacaggtctgagcaaataaggtgtataaaaaatggaatctgtcttggaggacatcagaaggtgaattttccaagttcttggacaacctagctgttgaaaagcaatgaaacagcagttgagggtttgctgtgtatcacatttctgtattttatcacccccttcctgcaacattatttatctggaatctacctgcccttttgttttttagatacaagggcttggttttgttacccaggctggtttcaaggccatagctttaagagatcctctcaccacagatttccaaagtgctgggattgcaggtgtgattcatggcacccagactttgctgcctttcttacatgatccaggcccagaacccaaactcaggcactgtatagatgaccactttcgtaaactactgacctagcttgttgccaattgttgattgaacttcccataactccacttcgtgtctgttcctctgtatacagccaccttctgttcccgtcatgagcctttaggtctccatttgcatattgcaaatactatgttccatgtaggtagctcattcagggccttgctcttcacttcaaaaaaggttcccttgaggactggctgtcaatttgtgttgctgtgttggttgttgatgaaaataataaaatgattgattacata

SEQ ID NO: 50471 - DNA, 1961 bp, Homo sapiens
tgctagtagggcctgggttaatcggccgagggggtaagtggcttcgtggtctttatagctgttactcttttgtactttgtctttttcttttattttcttttgagcgattgtgcgaacatagcatagcacgcactatgccttctgtgttgtagctgcctggccagggcgactggcggataaggtcttgtgcgtggcctcgaggcttaaaagtagcagtggggctttgtgaaggacaaaatggcgatggcgggccgtgtaggtcccccttcctatgatgaggaccttttcacagacctgtactgagctccgtgaggataaataactctgaggagatgggccctgcaagcctcttgcttagccgtctgttcagaaaatagcgttttcgaaatgccctgagttgacctaatgtcttattgggctcctgtctgcaggatttacgcgcacgttggaaccgaagagagctctgttgttgcaatgttcagcccacaagagcttactggtgaaggaatgggacaagacccatctttatgcaaagccagcgttacagtaatgttccagcatctcataatctatcctggggaattcagctgcctcccagggtgaatacaggtattcctgatgacagtctgcctctatcttacagagcagcttgttgctatataccattgaaaagccttcagagctgagaggtactactaaccaataacctgcttggctcaaagggccagcaccttctctctaaagcccaagaggagtttgaggtaaatggctttgcaatagttaccatcaatggctgctatataaaattttctgtgatttttgtgtgtgatagcactgtggtctgggtgaatgtacacagacataactggcttaacccaaagtctttgatctcctgaaccaccagtgatgaattgctgctcaccagtgatgagttgaataccgccccagtctgatcaatgtgtgactgaaaggtattttctgagctgtgagcctgccttccagtgacatgttctaaaaattgcaagttatttgaggaggctttacagccaataggaagttcttgggctaagtagtgtttcctataaaatgtgccctgaaacttctttctgccaagcaatagatacaattgagagattgtaaaatgtgacatagaatgaaagtctctcaagactacatttttctttcttgattttgcaggaaaactaggtgtctgtgttcactccaggctgaagttacaggtctgagcaaataaggtgtataaaaaatggaatctgtcttggaggacatcagaaggtgaattttccaagttcttggacaacctagctgttgaaaagctttctgggtttggggggtatttcagatgtaccttaaagtgttagcagacacagattaagacactgggagccaatgaaacagcagttgagggtttgctgtgtatcacatttctgtattttatcacccccttcctgcaacattatttatctggaatctacctgcccttttgttttttagatacaagggcttggttttgttacccaggctggtttcaaggccatagctttaagagatcctctcaccacagatttccaaagtgctgggattgcaggtgtgattcatggcacccagactttgctgcctttcttacatgatccaggcccagaacccaaactcaggcactgtatagatgaccactttcgtaaactactgacctagcttgttgccaattgttgattgaacttcccataactccacttcgtgtctgttcctctgtatacagccaccttctgttcccgtcatgagcctttaggtctccatttgcatattgcaaatactatgttccatgtaggtagctcattcagggccttgctcttcacttcaaaaaaggttcccttgaggactggctgtcaatttgtgttgctgtgttggttgttgatgaaaataataaaatgattgattacata

SEQ ID NO: 50472 - DNA, 2163 bp, Homo sapiens
tgctagtagggcctgggttaatcggccgagggggtaagtggcttcgtggtctttatagctgttactcttttgtactttgtctttttcttttattttcttttgagcgattgtgcgaacatagcatagcacgcactatgccttctgtgttgtagctgcctggccagggcgactggcggataaggtcttgtgcgtggcctcgaggcttaaaagtagcagtggggctttgtgaaggacaaaatggcgatggcgggccgtgtaggtcccccttcctatgatgaggaccttttcacagacctgtactgagctccgtgaggataaataactctgaggagatgggccctgcaagcctcttgcttagccgtctgttcagaaaatagcgttttcgaaatgccctgagttgacctaatgtcttattgggctcctgtctgcaggatttacgcgcacgttggaaccgaagagagctctgttgttgcaatgttcagcccacaagagcttactggtgaaggaatgggacaagacccatctttatgcaaagccagcgttacagtaatgttccagcatctcataatctatcctggggaattcagctgcctcccagggtgaatacaggtattcctgatgacagtctgcctctatcttacagtaagttgtttttcgaattctatgggcctattatctaatagataacttagccattttgatatttgttaccaaagcctgcttaacccataaagttttctggttcctcttgttctctgtagtgatgtttctagatagatgcccactgatatatgccccttttttctcagatagatgcccactgatctgcccagggtcagacgaatgcttgtcagttgtagctttccaggattctgctccaatgaggaggaaacatcctgccttacccctgttttagcctgggaaccagtaattgtgaactcaccagggttaacatgaagagggcatgagagcttattccataaggaattgtctgagacatttggttaccttttcttagtttgtccattagcaaccgtaactaaaatagttttggctgtttgggataattagctaattgaatgattttttgattcaggagcagcttgttgctatataccattgaaaagccttcagagctgagaggttagttgatattttttgttccttacagcttatgccaccaagtaggcagtttctatgatgaatcaaactagctcactatgaccgacagtgaaaatacatgaacacctgagaaactggagaacgcagggagtggggggtaaccatgtctgaggaatctttcacccacagctttgtttttctctaggtactactaaccaataacctgcttggctcaaagggccagcaccttctctctaaagcccaagaggagtttgaggaaaactaggtgtctgtgttcactccaggctgaagttacaggtctgagcaaataaggtgtataaaaaatggaatctgtcttggaggacatcagaaggtgaattttccaagttcttggacaacctagctgttgaaaagctttctgggtttggggggtatttcagatgtaccttaaagtgttagcagacacagattaagacactgggagccaatgaaacagcagttgagggtttgctgtgtatcacatttctgtattttatcacccccttcctgcaacattatttatctggaatctacctgcccttttgttttttagatacaagggcttggttttgttacccaggctggtttcaaggccatagctttaagagatcctctcaccacagatttccaaagtgctgggattgcaggtgtgattcatggcacccagactttgctgcctttcttacatgatccaggcccagaacccaaactcaggcactgtatagatgaccactttcgtaaactactgacctagcttgttgccaattgttgattgaacttcccataactccacttcgtgtctgttcctctgtatacagccaccttctgttcccgtcatgagcctttaggtctccatttgcatattgcaaatactatgttccatgtaggtagctcattcagggccttgctcttcacttcaaaaaaggttcccttgaggactggctgtcaatttgtgttgctgtgttggttgttgatgaaaataataaaatgattgattacata

SEQ ID NO: 50473 - DNA, 2965 bp, Homo sapiens
tgctagtagggcctgggttaatcggccgagggggtaagtggcttcgtggtctttatagctgttactcttttgtactttgtctttttcttttattttcttttgagcgattgtgcgaacatagcatagcacgcactatgccttctgtgttgtagctgcctggccagggcgactggcggataaggtcttgtgcgtggcctcgaggcttaaaagtagcagtggggctttgtgaaggacaaaatggcgatggcgggccgtgtaggtcccccttcctatgatgaggaccttttcacagacctgtactgagctccgtgaggataaataactctgaggagatgggccctgcaagcctcttgcttagccgtctgttcagaaaatagcgttttcgaaatgccctgagttgacctaatgtcttattgggctcctgtctgcaggatttacgcgcacgttggaaccgaagagagctctgttgttgcaatgttcagcccacaagagcttactggtgaaggaatgggacaagacccatctttatgcaaagccagcgttacagtaatgttccagcatctcataatctatcctggggaattcagctgcctcccagggtgaatacaggtattcctgatgacagtctgcctctatcttacagtaagttgtttttcgaattctatgggcctattatctaatagataacttagccattttgatatttgttaccaaagcctgcttaacccataaagttttctggttcctcttgttctctgtagtgatgtttctagatagatgcccactgatatatgccccttttttctcagatagatgcccactgatctgcccagggtcagacgaatgcttgtcagttgtagctttccaggattctgctccaatgaggaggaaacatcctgccttacccctgttttagcctgggaaccagtaattgtgaactcaccagggttaacatgaagagggcatgagagcttattccataaggaattgtctgagacatttggttaccttttcttagtttgtccattagcaaccgtaactaaaatagttttggctgtttgggataattagctaattgaatgattttttgattcaggagcagcttgttgctatataccattgaaaagccttcagagctgagaggttagttgatattttttgttccttacagcttatgccaccaagtaggcagtttctatgatgaatcaaactagctcactatgaccgacagtgaaaatacatgaacacctgagaaactggagaacgcagggagtggggggtaaccatgtctgaggaatctttcacccacagctttgtttttctctaggtactactaaccaataacctgcttggctcaaagggccagcaccttctctctaaagcccaagaggagtttgaggtaaatggctttgcaatagttaccatcaatggctgctatataaaattttctgtgatttttgtgtgtgatagcactgtggtctgggtgaatgtacacagacataactggcttaacccaaagtctttgatctcctgaaccaccagtgatgaattgctgctcaccagtgatgagttgaataccgccccagtctgatcaatgtgtgactgaaaggtattttctgagctgtgagcctgccttccagtgacatgttctaaaaattgcaagttatttgaggaggctttacagccaataggaagttcttgggctaagtagtgtttcctataaaatgtgccctgaaacttctttctgccaagcaatagatacaattgagagattgtaaaatgtgacatagaatgaaagtctctcaagactacatttttctttcttgattttgcaggaaaactaggtgtctgtgttcactccaggctgaagttacaggtgagtaaacctaaatgtaaggtggactatgctaaaaattcccaatgaagaaactttcacatgtcttactctctgtcctagtcccagagcctgtaaaggtgaacccactgggactggctgggggagaagaggaagatttgttccagaaggaactgtctgagggatgataaagatttctatacagagaaagggagtaatcatcacttgttgaaaacattggttttattttttccaggtctgagcaaataaggtgtataaaaaatggtaggtatctgtttaaatatttaactgattttataatagcaaccttttgctcctaggttacatagtgttaaatattgtgttcatttgtattttccaatccaataagaacttttttttttacctctgcaggagaatctgtcttggaggacatcagaaggtgaattttccaagttcttggacaacctagctgttgaaaagctttctgggtttggggggtatttcagatgtaccttaaagtgttagcagacacagattaagacactgggagccaatgaaacagcagttgagggtttgctgtgtatcacatttctgtattttatcacccccttcctgcaacattatttatctggaatctacctgcccttttgttttttagatacaagggcttggttttgttacccaggctggtttcaaggccatagctttaagagatcctctcaccacagatttccaaagtgctgggattgcaggtgtgattcatggcacccagactttgctgcctttcttacatgatccaggcccagaacccaaactcaggcactgtatagatgaccactttcgtaaactactgacctagcttgttgccaattgttgattgaacttcccataactccacttcgtgtctgttcctctgtatacagccaccttctgttcccgtcatgagcctttaggtctccatttgcatattgcaaatactatgttccatgtaggtagctcattcagggccttgctcttcacttcaaaaaaggttcccttgaggactggctgtcaatttgtgttgctgtgttggttgttgatgaaaataataaaatgattgattacata

SEQ ID NO: 50474 - DNA, 1709 bp, Homo sapiens
tgctagtagggcctgggttaatcggccgagggggtaagtggcttcgtggtctttatagctgttactcttttgtactttgtctttttcttttattttcttttgagcgattgtgcgaacatagcatagcacgcactatgccttctgtgttgtagctgcctggccagggcgactggcggataaggtcttgtgcgtggcctcgaggcttaaaagtagcagtggggctttgtgaaggacaaaatggcgatggcgggccgtgtaggtcccccttcctatgatgaggaccttttcacagacctgtactgagctccgtgaggataaataactctgaggagatgggccctgcaagcctcttgcttagccgtctgttcagaaaatagcgttttcgaaatgccctgagttgacctaatgtcttattgggctcctgtctgcaggatttacgcgcacgttggaaccgaagagagctctgttgttgcaatgttcagcccacaagagcttactggtgaaggaatgggacaagacccatctttatgcaaagccagcgttacagtaatgttccagcatctcataatctatcctggggaattcagctgcctcccagggtgaatacaggtattcctgatgacagtctgcctctatcttacagagcagcttgttgctatataccattgaaaagccttcagagctgagaggttagttgatattttttgttccttacagcttatgccaccaagtaggcagtttctatgatgaatcaaactagctcactatgaccgacagtgaaaatacatgaacacctgagaaactggagaacgcagggagtggggggtaaccatgtctgaggaatctttcacccacagctttgtttttctctaggtactactaaccaataacctgcttggctcaaagggccagcaccttctctctaaagcccaagaggagtttgaggaaaactaggtgtctgtgttcactccaggctgaagttacaggtctgagcaaataaggtgtataaaaaatggaatctgtcttggaggacatcagaaggtgaattttccaagttcttggacaacctagctgttgaaaagctttctgggtttggggggtatttcagatgtaccttaaagtgttagcagacacagattaagacactgggagccaatgaaacagcagttgagggtttgctgtgtatcacatttctgtattttatcacccccttcctgcaacattatttatctggaatctacctgcccttttgttttttagatacaagggcttggttttgttacccaggctggtttcaaggccatagctttaagagatcctctcaccacagatttccaaagtgctgggattgcaggtgtgattcatggcacccagactttgctgcctttcttacatgatccaggcccagaacccaaactcaggcactgtatagatgaccactttcgtaaactactgacctagcttgttgccaattgttgattgaacttcccataactccacttcgtgtctgttcctctgtatacagccaccttctgttcccgtcatgagcctttaggtctccatttgcatattgcaaatactatgttccatgtaggtagctcattcagggccttgctcttcacttcaaaaaaggttcccttgaggactggctgtcaatttgtgttgctgtgttggttgttgatgaaaataataaaatgattgattacata

SEQ ID NO: 50475 - DNA, 2781 bp, Homo sapiens
tgctagtagggcctgggttaatcggccgagggggtaagtggcttcgtggtctttatagctgttactcttttgtactttgtctttttcttttattttcttttgagcgattgtgcgaacatagcatagcacgcactatgccttctgtgttgtagctgcctggccagggcgactggcggataaggtcttgtgcgtggcctcgaggcttaaaagtagcagtggggctttgtgaaggacaaaatggcgatggcgggccgtgtaggtcccccttcctatgatgaggaccttttcacagacctgtactgagctccgtgaggataaataactctgaggagatgggccctgcaagcctcttgcttagccgtctgttcagaaaatagcgttttcgaaatgccctgagttgacctaatgtcttattgggctcctgtctgcaggatttacgcgcacgttggaaccgaagagagctctgttgttgcaatgttcagcccacaagagcttactggtgaaggaatgggacaagacccatctttatgcaaagccagcgttacagtaatgttccagcatctcataatctatcctggggaattcagctgcctcccagggtgaatacaggtattcctgatgacagtctgcctctatcttacagtaagttgtttttcgaattctatgggcctattatctaatagataacttagccattttgatatttgttaccaaagcctgcttaacccataaagttttctggttcctcttgttctctgtagtgatgtttctagatagatgcccactgatatatgccccttttttctcagatagatgcccactgatctgcccagggtcagacgaatgcttgtcagttgtagctttccaggattctgctccaatgaggaggaaacatcctgccttacccctgttttagcctgggaaccagtaattgtgaactcaccagggttaacatgaagagggcatgagagcttattccataaggaattgtctgagacatttggttaccttttcttagtttgtccattagcaaccgtaactaaaatagttttggctgtttgggataattagctaattgaatgattttttgattcaggagcagcttgttgctatataccattgaaaagccttcagagctgagaggtactactaaccaataacctgcttggctcaaagggccagcaccttctctctaaagcccaagaggagtttgaggtaaatggctttgcaatagttaccatcaatggctgctatataaaattttctgtgatttttgtgtgtgatagcactgtggtctgggtgaatgtacacagacataactggcttaacccaaagtctttgatctcctgaaccaccagtgatgaattgctgctcaccagtgatgagttgaataccgccccagtctgatcaatgtgtgactgaaaggtattttctgagctgtgagcctgccttccagtgacatgttctaaaaattgcaagttatttgaggaggctttacagccaataggaagttcttgggctaagtagtgtttcctataaaatgtgccctgaaacttctttctgccaagcaatagatacaattgagagattgtaaaatgtgacatagaatgaaagtctctcaagactacatttttctttcttgattttgcaggaaaactaggtgtctgtgttcactccaggctgaagttacaggtgagtaaacctaaatgtaaggtggactatgctaaaaattcccaatgaagaaactttcacatgtcttactctctgtcctagtcccagagcctgtaaaggtgaacccactgggactggctgggggagaagaggaagatttgttccagaaggaactgtctgagggatgataaagatttctatacagagaaagggagtaatcatcacttgttgaaaacattggttttattttttccaggtctgagcaaataaggtgtataaaaaatggtaggtatctgtttaaatatttaactgattttataatagcaaccttttgctcctaggttacatagtgttaaatattgtgttcatttgtattttccaatccaataagaacttttttttttacctctgcaggagaatctgtcttggaggacatcagaaggtgaattttccaagttcttggacaacctagctgttgaaaagctttctgggtttggggggtatttcagatgtaccttaaagtgttagcagacacagattaagacactgggagccaatgaaacagcagttgagggtttgctgtgtatcacatttctgtattttatcacccccttcctgcaacattatttatctggaatctacctgcccttttgttttttagatacaagggcttggttttgttacccaggctggtttcaaggccatagctttaagagatcctctcaccacagatttccaaagtgctgggattgcaggtgtgattcatggcacccagactttgctgcctttcttacatgatccaggcccagaacccaaactcaggcactgtatagatgaccactttcgtaaactactgacctagcttgttgccaattgttgattgaacttcccataactccacttcgtgtctgttcctctgtatacagccaccttctgttcccgtcatgagcctttaggtctccatttgcatattgcaaatactatgttccatgtaggtagctcattcagggccttgctcttcacttcaaaaaaggttcccttgaggactggctgtcaatttgtgttgctgtgttggttgttgatgaaaataataaaatgattgattacata

SEQ ID NO: 50476 - DNA, 1427 bp, Homo sapiens
tgctagtagggcctgggttaatcggccgagggggtaagtggcttcgtggtctttatagctgttactcttttgtactttgtctttttcttttattttcttttgagcgattgtgcgaacatagcatagcacgcactatgccttctgtgttgtagctgcctggccagggcgactggcggataaggtcttgtgcgtggcctcgaggcttaaaagtagcagtggggctttgtgaaggacaaaatggcgatggcgggccgtgtaggtcccccttcctatgatgaggaccttttcacagacctgtactgagctccgtgaggataaataactctgaggagatgggccctgcaagcctcttgcttagccgtctgttcagaaaatagcgttttcgaaatgccctgagttgacctaatgtcttattgggctcctgtctgcaggatttacgcgcacgttggaaccgaagagagctctgttgttgcaatgttcagcccacaagagcttactggtgaaggaatgggacaagacccatctttatgcaaagccagcgttacagtaatgttccaggtattcctgatgacagtctgcctctatcttacagtactactaaccaataacctgcttggctcaaagggccagcaccttctctctaaagcccaagaggagtttgaggaaaactaggtgtctgtgttcactccaggctgaagttacaggtctgagcaaataaggtgtataaaaaatggaatctgtcttggaggacatcagaaggtgaattttccaagttcttggacaacctagctgttgaaaagctttctgggtttggggggtatttcagatgtaccttaaagtgttagcagacacagattaagacactgggagccaatgaaacagcagttgagggtttgctgtgtatcacatttctgtattttatcacccccttcctgcaacattatttatctggaatctacctgcccttttgttttttagatacaagggcttggttttgttacccaggctggtttcaaggccatagctttaagagatcctctcaccacagatttccaaagtgctgggattgcaggtgtgattcatggcacccagactttgctgcctttcttacatgatccaggcccagaacccaaactcaggcactgtatagatgaccactttcgtaaactactgacctagcttgttgccaattgttgattgaacttcccataactccacttcgtgtctgttcctctgtatacagccaccttctgttcccgtcatgagcctttaggtctccatttgcatattgcaaatactatgttccatgtaggtagctcattcagggccttgctcttcacttcaaaaaaggttcccttgaggactggctgtcaatttgtgttgctgtgttggttgttgatgaaaataataaaatgattgattacata

SEQ ID NO: 50477 - DNA, 3519 bp, Homo sapiens
  misc_feature (5)..(5): n is a, c, g, or t
  misc_feature (7)..(8): n is a, c, g, or t
  misc_feature (10)..(11): n is a, c, g, or t
gcctncnncnnctactactactaaattcgcggccgcgtcgaccggtaagtggcttcgtggtctttatagctgttactcttttgtactttgtctttttcttttattttcttttgagcgattgtgcgaacatagcatagcacgcactatgccttctgtgttgtagctgcctggccagggcgactggcggataaggtcttgtgcgtggcctcgaggcttaaaagtagcagtggggctttgtgaaggacaaaatggcgatggcgggccgtgtaggtcccccttcctatgatgaggaccttttcacagacctgtactgagctccgtgaggataaataactctgaggagatgggccctgcaagcctcttgcttagccgtctgttcagaaaatagcgttttcgaaatgccctgagttgacctaatgtcttattgggctcctgtctgcaggatttacgcgcacgttggaaccgaagagagctctgttgttgcagtaagttcttacggccatttcttaatctctgctctttcgttgagtgtgtggaagttgctacggggatgattttacgaactgaactctctctttctgatggattagtgggagaaacagaaaattctgagtagcactgtactgtacgcaacaaatgtcagggccctattgatttgtctgaggtgttagtgaagggtgttattttttcagatgttcagcccacaagagcttactggtgaaggaatgggacaagacccatctttatgcaaagccagcgttacagtaatgttccagcatctcataatctatcctggggaattcagctgcctcccagggtgaatacaggtaattatccaaattggtgtatgtcatctttgtaaatgttcaagaaaacaagtggccggcggaacaatgttttttggcgccttccatcttgttcctcttgaaatgattttctggggagggagatcgcaacccggtactacagttcttgtaagggtgtgctgttaccctcatccatatatcgatcacgttactgtcagatgatttgaattgataagctgatgttctgtgaggtacaaaagttaatagcatgttagagttctgatggcagttgttgtttatgaataagcttcattccatcctaataccttaaaataactaatttgctttcctttccaggtattcctgatgacagtctgcctctatcttacagtaagttgtttttcgaattctatgggcctattatctaatagataacttagccattttgatatttgttaccaaagcctgcttaacccataaagttttctggttcctcttgttctctgtagtgatgtttctagatagatgcccactgatatatgccccttttttctcagatagatgcccactgatctgcccagggtcagacgaatgcttgtcagttgtagctttccaggattctgctccaatgaggaggaaacatcctgccttacccctgttttagcctgggaaccagtaattgtgaactcaccagggttaacatgaagagggcatgagagcttattccataaggaattgtctgagacatttggttaccttttcttagtttgtccattagcaaccgtaactaaaatagttttggctgtttgggataattagctaattgaatgattttttgattcaggagcagcttgttgctatataccattgaaaagccttcagagctgagaggttagttgatattttttgttccttacagcttatgccaccaagtaggcagtttctatgatgaatcaaactagctcactatgaccgacagtgaaaatacatgaacacctgagaaactggagaacgcagggagtggggggtaaccatgtctgaggaatctttcacccacagctttgtttttctctaggtactactaaccaataacctgcttggctcaaagggccagcaccttctctctaaagcccaagaggagtttgaggtaaatggctttgcaatagttaccatcaatggctgctatataaaattttctgtgatttttgtgtgtgatagcactgtggtctgggtgaatgtacacagacataactggcttaacccaaagtctttgatctcctgaaccaccagtgatgaattgctgctcaccagtgatgagttgaataccgccccagtctgatcaatgtgtgactgaaaggtattttctgagctgtgagcctgccttccagtgacatgttctaaaaattgcaagttatttgaggaggctttacagccaataggaagttcttgggctaagtagtgtttcctataaaatgtgccctgaaacttctttctgccaagcaatagatacaattgagagattgtaaaatgtgacatagaatgaaagtctctcaagactacatttttctttcttgattttgcaggaaaactaggtgtctgtgttcactccaggctgaagttacaggtgagtaaacctaaatgtaaggtggactatgctaaaaattcccaatgaagaaactttcacatgtcttactctctgtcctagtcccagagcctgtaaaggtgaacccactgggactggctgggggagaagaggaagatttgttccagaaggaactgtctgagggatgataaagatttctatacagagaaagggagtaatcatcacttgttgaaaacattggttttattttttccaggtctgagcaaataaggtgtataaaaaatggtaggtatctgtttaaatatttaactgattttataatagcaaccttttgctcctaggttacatagtgttaaatattgtgttcatttgtattttccaatccaataagaacttttttttttacctctgcaggagaatctgtcttggaggacatcagaaggtgaattttccaagttcttggacaacctagctgttgaaaagctttctgggtttggggggtatttcagatgtaccttaaagtgttagcagacacagattaagacactgggagccaatgaaacagcagttgagggtttgctgtgtatcacatttctgtattttatcacccccttcctgcaacattatttatctggaatctacctgcccttttgttttttagatacaagggcttggttttgttacccaggctggtttcaaggccatagctttaagagatcctctcaccacagatttccaaagtgctgggattgcaggtgtgattcatggcacccagactttgctgcctttcttacatgatccaggcccagaacccaaactcaggcactgtatagatgaccactttcgtaaactactgacctagcttgttgccaattgttgattgaacttcccataactccacttcgtgtctgttcctctgtatacagccaccttctgttcccgtcatgagcctttaggtctccatttgcatattgcaaatactatgttccatgtaggtagctcattcagggccttgctcttcacttcaaaaaaggttcccttgaggactggctgtcaatttgtgttgctgtgttggttgttgatgaaaataataaaatgattgattacata

SEQ ID NO: 50478 - DNA, 1713 bp, Homo sapiens
tgctagtagggcctgggttaatcggccgagggggtaagtggcttcgtggtctttatagctgttactcttttgtactttgtctttttcttttattttcttttgagcgattgtgcgaacatagcatagcacgcactatgccttctgtgttgtagctgcctggccagggcgactggcggataaggtcttgtgcgtggcctcgaggcttaaaagtagcagtggggctttgtgaaggacaaaatggcgatggcgggccgtgtaggtcccccttcctatgatgaggaccttttcacagacctgtactgagctccgtgaggataaataactctgaggagatgggccctgcaagcctcttgcttagccgtctgttcagaaaatagcgttttcgaaatgccctgagttgacctaatgtcttattgggctcctgtctgcaggatttacgcgcacgttggaaccgaagagagctctgttgttgcaatgttcagcccacaagagcttactggtgaaggaatgggacaagacccatctttatgcaaagccagcgttacagtaatgttccagcatctcataatctatcctggggaattcagctgcctcccagggtgaatacaggtattcctgatgacagtctgcctctatcttacagtactactaaccaataacctgcttggctcaaagggccagcaccttctctctaaagcccaagaggagtttgaggaaaactaggtgtctgtgttcactccaggctgaagttacaggtgagtaaacctaaatgtaaggtggactatgctaaaaattcccaatgaagaaactttcacatgtcttactctctgtcctagtcccagagcctgtaaaggtgaacccactgggactggctgggggagaagaggaagatttgttccagaaggaactgtctgagggatgataaagatttctatacagagaaagggagtaatcatcacttgttgaaaacattggttttattttttccaggtctgagcaaataaggtgtataaaaaatggaatctgtcttggaggacatcagaaggtgaattttccaagttcttggacaacctagctgttgaaaagctttctgggtttggggggtatttcagatgtaccttaaagtgttagcagacacagattaagacactgggagccaatgaaacagcagttgagggtttgctgtgtatcacatttctgtattttatcacccccttcctgcaacattatttatctggaatctacctgcccttttgttttttagatacaagggcttggttttgttacccaggctggtttcaaggccatagctttaagagatcctctcaccacagatttccaaagtgctgggattgcaggtgtgattcatggcacccagactttgctgcctttcttacatgatccaggcccagaacccaaactcaggcactgtatagatgaccactttcgtaaactactgacctagcttgttgccaattgttgattgaacttcccataactccacttcgtgtctgttcctctgtatacagccaccttctgttcccgtcatgagcctttaggtctccatttgcatattgcaaatactatgttccatgtaggtagctcattcagggccttgctcttcacttcaaaaaaggttcccttgaggactggctgtcaatttgtgttgctgtgttggttgttgatgaaaataataaaatgattgattacata

SEQ ID NO: 50479 - DNA, 1365 bp, Homo sapiens
tgctagtagggcctgggttaatcggccgagggggtaagtggcttcgtggtctttatagctgttactcttttgtactttgtctttttcttttattttcttttgagcgattgtgcgaacatagcatagcacgcactatgccttctgtgttgtagctgcctggccagggcgactggcggataaggtcttgtgcgtggcctcgaggcttaaaagtagcagtggggctttgtgaaggacaaaatggcgatggcgggccgtgtaggtcccccttcctatgatgaggaccttttcacagacctgtactgagctccgtgaggataaataactctgaggagatgggccctgcaagcctcttgcttagccgtctgttcagaaaatagcgttttcgaaatgccctgagttgacctaatgtcttattgggctcctgtctgcaggatttacgcgcacgttggaaccgaagagagctctgttgttgcaatgttcagcccacaagagcttactggtgaaggaatgggacaagacccatctttatgcaaagccagcgttacagtaatgttccagcatctcataatctatcctggggaattcagctgcctcccagggtgaatacaggtattcctgatgacagtctgcctctatcttacagtctgagcaaataaggtgtataaaaaatggaatctgtcttggaggacatcagaaggtgaattttccaagttcttggacaacctagctgttgaaaagctttctgggtttggggggtatttcagatgtaccttaaagtgttagcagacacagattaagacactgggagccaatgaaacagcagttgagggtttgctgtgtatcacatttctgtattttatcacccccttcctgcaacattatttatctggaatctacctgcccttttgttttttagatacaagggcttggttttgttacccaggctggtttcaaggccatagctttaagagatcctctcaccacagatttccaaagtgctgggattgcaggtgtgattcatggcacccagactttgctgcctttcttacatgatccaggcccagaacccaaactcaggcactgtatagatgaccactttcgtaaactactgacctagcttgttgccaattgttgattgaacttcccataactccacttcgtgtctgttcctctgtatacagccaccttctgttcccgtcatgagcctttaggtctccatttgcatattgcaaatactatgttccatgtaggtagctcattcagggccttgctcttcacttcaaaaaaggttcccttgaggactggctgtcaatttgtgttgctgtgttggttgttgatgaaaataataaaatgattgattacata

SEQ ID NO: 50480 - DNA, 1398 bp, Homo sapiens
tgctagtagggcctgggttaatcggccgagggggtaagtggcttcgtggtctttatagctgttactcttttgtactttgtctttttcttttattttcttttgagcgattgtgcgaacatagcatagcacgcactatgccttctgtgttgtagctgcctggccagggcgactggcggataaggtcttgtgcgtggcctcgaggcttaaaagtagcagtggggctttgtgaaggacaaaatggcgatggcgggccgtgtaggtcccccttcctatgatgaggaccttttcacagacctgtactgagctccgtgaggataaataactctgaggagatgggccctgcaagcctcttgcttagccgtctgttcagaaaatagcgttttcgaaatgccctgagttgacctaatgtcttattgggctcctgtctgcaggatttacgcgcacgttggaaccgaagagagctctgttgttgcaatgttcagcccacaagagcttactggtgaaggaatgggacaagacccatctttatgcaaagccagcgttacagtaatgttccaggtattcctgatgacagtctgcctctatcttacagtactactaaccaataacctgcttggctcaaagggccagcaccttctctctaaagcccaagaggagtttgaggaaaactaggtgtctgtgttcactccaggctgaagttacaggaatctgtcttggaggacatcagaaggtgaattttccaagttcttggacaacctagctgttgaaaagctttctgggtttggggggtatttcagatgtaccttaaagtgttagcagacacagattaagacactgggagccaatgaaacagcagttgagggtttgctgtgtatcacatttctgtattttatcacccccttcctgcaacattatttatctggaatctacctgcccttttgttttttagatacaagggcttggttttgttacccaggctggtttcaaggccatagctttaagagatcctctcaccacagatttccaaagtgctgggattgcaggtgtgattcatggcacccagactttgctgcctttcttacatgatccaggcccagaacccaaactcaggcactgtatagatgaccactttcgtaaactactgacctagcttgttgccaattgttgattgaacttcccataactccacttcgtgtctgttcctctgtatacagccaccttctgttcccgtcatgagcctttaggtctccatttgcatattgcaaatactatgttccatgtaggtagctcattcagggccttgctcttcacttcaaaaaaggttcccttgaggactggctgtcaatttgtgttgctgtgttggttgttgatgaaaataataaaatgattgattacata

SEQ ID NO: 50481 - DNA, 1551 bp, Homo sapiens
tgctagtagggcctgggttaatcggccgagggggtaagtggcttcgtggtctttatagctgttactcttttgtactttgtctttttcttttattttcttttgagcgattgtgcgaacatagcatagcacgcactatgccttctgtgttgtagctgcctggccagggcgactggcggataaggtcttgtgcgtggcctcgaggcttaaaagtagcagtggggctttgtgaaggacaaaatggcgatggcgggccgtgtaggtcccccttcctatgatgaggaccttttcacagacctgtactgagctccgtgaggataaataactctgaggagatgggccctgcaagcctcttgcttagccgtctgttcagaaaatagcgttttcgaaatgccctgagttgacctaatgtcttattgggctcctgtctgcaggatttacgcgcacgttggaaccgaagagagctctgttgttgcaatgttcagcccacaagagcttactggtgaaggaatgggacaagacccatctttatgcaaagccagcgttacagtaatgttccagcatctcataatctatcctggggaattcagctgcctcccagggtgaatacaggtattcctgatgacagtctgcctctatcttacagagcagcttgttgctatataccattgaaaagccttcagagctgagaggtactactaaccaataacctgcttggctcaaagggccagcaccttctctctaaagcccaagaggagtttgaggaaaactaggtgtctgtgttcactccaggctgaagttacaggtctgagcaaataaggtgtataaaaaatggaatctgtcttggaggacatcagaaggtgaattttccaagttcttggacaacctagctgttgaaaagctttctgggtttggggggtatttcagatgtaccttaaagtgttagcagacacagattaagacactgggagccaatgaaacagcagttgagggtttgctgtgtatcacatttctgtattttatcacccccttcctgcaacattatttatctggaatctacctgcccttttgttttttagatacaagggcttggttttgttacccaggctggtttcaaggccatagctttaagagatcctctcaccacagatttccaaagtgctgggattgcaggtgtgattcatggcacccagactttgctgcctttcttacatgatccaggcccagaacccaaactcaggcactgtatagatgaccactttcgtaaactactgacctagcttgttgccaattgttgattgaacttcccataactccacttcgtgtctgttcctctgtatacagccaccttctgttcccgtcatgagcctttaggtctccatttgcatattgcaaatactatgttccatgtaggtagctcattcagggccttgctcttcacttcaaaaaaggttcccttgaggactggctgtcaatttgtgttgctgtgttggttgttgatgaaaataataaaatgattgattacataaaaaaaaacactccaatcactcacac

SEQ ID NO: 50482 - DNA, 1512 bp, Homo sapiens
tgctagtagggcctgggttaatcggccgagggggtaagtggcttcgtggtctttatagctgttactcttttgtactttgtctttttcttttattttcttttgagcgattgtgcgaacatagcatagcacgcactatgccttctgtgttgtagctgcctggccagggcgactggcggataaggtcttgtgcgtggcctcgaggcttaaaagtagcagtggggctttgtgaaggacaaaatggcgatggcgggccgtgtaggtcccccttcctatgatgaggaccttttcacagacctgtactgagctccgtgaggataaataactctgaggagatgggccctgcaagcctcttgcttagccgtctgttcagaaaatagcgttttcgaaatgccctgagttgacctaatgtcttattgggctcctgtctgcaggatttacgcgcacgttggaaccgaagagagctctgttgttgcaatgttcagcccacaagagcttactggtgaaggaatgggacaagacccatctttatgcaaagccagcgttacagtaatgttccagcatctcataatctatcctggggaattcagctgcctcccagggtgaatacaggtattcctgatgacagtctgcctctatcttacagagcagcttgttgctatataccattgaaaagccttcagagctgagaggtactactaaccaataacctgcttggctcaaagggccagcaccttctctctaaagcccaagaggagtttgaggaaaactaggtgtctgtgttcactccaggctgaagttacaggtctgagcaaataaggtgtataaaaaatggaatctgtcttggaggacatcagaaggtgaattttccaagttcttggacaacctagctgttgaaaagctttctgggtttggggggtatttcagatgtaccttaaagtgttagcagacacagattaagacactgggagccaatgaaacagcagttgagggtttgctgtgtatcacatttctgtattttatcacccccttcctgcaacattatttatctggaatctacctgcccttttgttttttagatacaagggcttggttttgttacccaggctggtttcaaggccatagctttaagagatcctctcaccacagatttccaaagtgctgggattgcaggtgtgattcatggcacccagactttgctgcctttcttacatgatccaggcccagaacccaaactcaggcactgtatagatgaccactttcgtaaactactgacctagcttgttgccaattgttgattgaacttcccataactccacttcgtgtctgttcctctgtatacagccaccttctgttcccgtcatgagcctttaggtctccatttgcatattgcaaatactatgttccatgtaggtagctcattcagggccttgctcttcacttcaaaaaaggttcccttgaggactggctgtcaatttgtgttgctgtgtgcttccggggtccgagccgatcgaa

SEQ ID NO: 50483 - DNA, 1764 bp, Homo sapiens
tgctagtagggcctgggttaatcggccgagggggtaagtggcttcgtggtctttatagctgttactcttttgtactttgtctttttcttttattttcttttgagcgattgtgcgaacatagcatagcacgcactatgccttctgtgttgtagctgcctggccagggcgactggcggataaggtcttgtgcgtggcctcgaggcttaaaagtagcagtggggctttgtgaaggacaaaatggcgatggcgggccgtgtaggtcccccttcctatgatgaggaccttttcacagacctgtactgagctccgtgaggataaataactctgaggagatgggccctgcaagcctcttgcttagccgtctgttcagaaaatagcgttttcgaaatgccctgagttgacctaatgtcttattgggctcctgtctgcaggatttacgcgcacgttggaaccgaagagagctctgttgttgcaatgttcagcccacaagagcttactggtgaaggaatgggacaagacccatctttatgcaaagccagcgttacagtaatgttccagcatctcataatctatcctggggaattcagctgcctcccagggtgaatacaggtattcctgatgacagtctgcctctatcttacagagcagcttgttgctatataccattgaaaagccttcagagctgagaggtactactaaccaataacctgcttggctcaaagggccagcaccttctctctaaagcccaagaggagtttgaggaaaactaggtgtctgtgttcactccaggctgaagttacaggtctgagcaaataaggtgtataaaaaatggaatctgtcttggaggacatcagaaggtgaattttccaagttcttggacaacctagctgttgaaaagctttctgggtttggggggtatttcagatgtaccttaaagtgttagcagacacagattaagacactgggagccaatgaaacagcagttgagggtttgctgtgtatcacatttctgtattttatcacccccttcctgcaacattatttatctggaatctacctgcccttttgttttttagatacaagggcttggttttgttacccaggctggtttcaaggccatagctttaagagatcctctcaccacagatttccaaagtgctgggattgcaggtgtgattcatggcacccagactttgctgcctttcttacatgatccaggcccagaacccaaactcaggcactgtatagatgaccactttcgtaaactactgacctagcttgttgccaattgttgattgaacttcccataactccacttcgtgtctgttcctctgtatacagccaccttctgttcccgtcatgagcctttaggtctccatttgcatattgcaaatactatgttccatgtaggtagctcattcagggccttgctcttcacttcaaaaaaggttcccttgaggactggctgtcaatttgtgttgctgtgttggttgttgatgaaaataataaaatgattgattacataaaaaaaaaaaaaaaaaaaacacccgagagggctctctttttgctcgggtgtcgggggaaaagagagggtgtattgagaattgggccctttgggcccttcgcttgtgttctccttggcacccaagtttctctttggtccaagtgggtgtaatctcctgccggtccctccccttataggggatgccggtttaatttccgaataacccaggtgttacccttggctttattgaatcccggaag

SEQ ID NO: 50484 - DNA, 1515 bp, Homo sapiens
tgctagtagggcctgggttaatcggccgagggggtaagtggcttcgtggtctttatagctgttactcttttgtactttgtctttttcttttattttcttttgagcgattgtgcgaacatagcatagcacgcactatgccttctgtgttgtagctgcctggccagggcgactggcggataaggtcttgtgcgtggcctcgaggcttaaaagtagcagtggggctttgtgaaggacaaaatggcgatggcgggccgtgtaggtcccccttcctatgatgaggaccttttcacagacctgtactgagctccgtgaggataaataactctgaggagatgggccctgcaagcctcttgcttagccgtctgttcagaaaatagcgttttcgaaatgccctgagttgacctaatgtcttattgggctcctgtctgcaggatttacgcgcacgttggaaccgaagagagctctgttgttgcaatgttcagcccacaagagcttactggtgaaggaatgggacaagacccatctttatgcaaagccagcgttacagtaatgttccagcatctcataatctatcctggggaattcagctgcctcccagggtgaatacaggtattcctgatgacagtctgcctctatcttacagagcagcttgttgctatataccattgaaaagccttcagagctgagaggtactactaaccaataacctgcttggctcaaagggccagcaccttctctctaaagcccaagaggagtttgaggaaaactaggtgtctgtgttcactccaggctgaagttacaggtctgagcaaataaggtgtataaaaaatggaatctgtcttggaggacatcagaaggtgaattttccaagttcttggacaacctagctgttgaaaagctttctgggtttggggggtatttcagatgtaccttaaagtgttagcagacacagattaagacactgggagccaatgaaacagcagttgagggtttgctgtgtatcacatttctgtattttatcacccccttcctgcaacattatttatctggaatctacctgcccttttgttttttagatacaagggcttggttttgttacccaggctggtttcaaggccatagctttaagagatcctctcaccacagatttccaaagtgctgggattgcaggtgtgattcatggcacccagactttgctgcctttcttacatgatccaggcccagaacccaaactcaggcactgtatagatgaccactttcgtaaactactgacctagcttgttgccaattgttgattgaacttcccataactccacttcgtgtctgttcctctgtatacagccaccttctgttcccgtcatgagcctttaggtctccatttgcatattgcaaatactatgttccatgtaggtagctcattcagggccttgctcttcacttcaaaaaaggttcccttgaggactggctgtcaatttgtgttgctgtgtgcttccggggacctctagacagccacca

SEQ ID NO: 50485 - DNA, 1504 bp, Homo sapiens
tgctagtagggcctgggttaatcggccgagggggtaagtggcttcgtggtctttatagctgttactcttttgtactttgtctttttcttttattttcttttgagcgattgtgcgaacatagcatagcacgcactatgccttctgtgttgtagctgcctggccagggcgactggcggataaggtcttgtgcgtggcctcgaggcttaaaagtagcagtggggctttgtgaaggacaaaatggcgatggcgggccgtgtaggtcccccttcctatgatgaggaccttttcacagacctgtactgagctccgtgaggataaataactctgaggagatgggccctgcaagcctcttgcttagccgtctgttcagaaaatagcgttttcgaaatgccctgagttgacctaatgtcttattgggctcctgtctgcaggatttacgcgcacgttggaaccgaagagagctctgttgttgcaatgttcagcccacaagagcttactggtgaaggaatgggacaagacccatctttatgcaaagccagcgttacagtaatgttccagcatctcataatctatcctggggaattcagctgcctcccagggtgaatacaggtattcctgatgacagtctgcctctatcttacagagcagcttgttgctatataccattgaaaagccttcagagctgagaggtactactaaccaataacctgcttggctcaaagggccagcaccttctctctaaagcccaagaggagtttgaggaaaactaggtgtctgtgttcactccaggctgaagttacaggtctgagcaaataaggtgtataaaaaatggaatctgtcttggaggacatcagaaggtgaattttccaagttcttggacaacctagctgttgaaaagctttctgggtttggggggtatttcagatgtaccttaaagtgttagcagacacagattaagacactgggagccaatgaaacagcagttgagggtttgctgtgtatcacatttctgtattttatcacccccttcctgcaacattatttatctggaatctacctgcccttttgttttttagatacaagggcttggttttgttacccaggctggtttcaaggccatagctttaagagatcctctcaccacagatttccaaagtgctgggattgcaggtgtgattcatggcacccagactttgctgcctttcttacatgatccaggcccagaacccaaactcaggcactgtatagatgaccactttcgtaaactactgacctagcttgttgccaattgttgattgaacttcccataactccacttcgtgtctgttcctctgtatacagccaccttctgttcccgtcatgagcctttaggtctccatttgcatattgcaaatactatgttccatgtaggtagctcattcagggccttgctcttcgagcttccgttttagcttccccgtgcagactaactctcagatattctgtttcccttgccctccggtgt

SEQ ID NO: 50486 - DNA, 1306 bp, Homo sapiens
tgctagtagggcctgggttaatcggccgagggggtaagtggcttcgtggtctttatagctgttactcttttgtactttgtctttttcttttattttcttttgagcgattgtgcgaacatagcatagcacgcactatgccttctgtgttgtagctgcctggccagggcgactggcggataaggtcttgtgcgtggcctcgaggcttaaaagtagcagtggggctttgtgaaggacaaaatggcgatggcgggccgtgtaggtcccccttcctatgatgaggaccttttcacagacctgtactgagctccgtgaggataaataactctgaggagatgggccctgcaagcctcttgcttagccgtctgttcagaaaatagcgttttcgaaatgccctgagttgacctaatgtcttattgggctcctgtctgcaggatttacgcgcacgttggaaccgaagagagctctgttgttgcaatgttcagcccacaagagcttactggtgaaggaatgggacaagacccatctttatgcaaagccagcgttacagtaatgttccagcatctcataatctatcctggggaattcagctgcctcccagggtgaatacaggtattcctgatgacagtctgcctctatcttacagagcagcttgttgctatataccattgaaaagccttcagagctgagaggtactactaaccaataacctgcttggctcaaagggccagcaccttctctctaaagcccaagaggagtttgaggaaaactaggtgtctgtgttcactccaggctgaagttacaggtctgagcaaataaggtgtataaaaaatggaatctgtcttggaggacatcagaagatacaagggcttggttttgttacccaggctggtttcaaggccatagctttaagagatcctctcaccacagatttccaaagtgctgggattgcaggtgtgattcatggcacccagactttgctgcctttcttacatgatccaggcccagaacccaaactcaggcactgtatagatgaccactttcgtaaactactgacctagcttgttgccaattgttgattgaacttcccataactccacttcgtgtctgttcctctgtatacagccaccttctgttcccgtcatgagcctttaggtctccatttgcatattgcaaatactatgttccatgtaggtagctcattcagggccttgctcttcacttcaaaaaaggttcccttgaggactggctgtcaatttgtgttgctgtgttggttgttgatgaaaataataaaatgattgattacata

SEQ ID NO: 50487 - DNA, 1485 bp, Homo sapiens
  misc_feature (911)..(911): n is a, c, g, or t
  misc_feature (914)..(914): n is a, c, g, or t
  misc_feature (924)..(924): n is a, c, g, or t
  misc_feature (999)..(999): n is a, c, g, or t
  misc_feature (1002)..(1002): n is a, c, g, or t
  misc_feature (1009)..(1009): n is a, c, g, or t
  misc_feature (1016)..(1016): n is a, c, g, or t
  misc_feature (1018)..(1018): n is a, c, g, or t
  misc_feature (1021)..(1021): n is a, c, g, or t
tgctagtagggcctgggttaatcggccgagggggtaagtggcttcgtggtctttatagctgttactcttttgtactttgtctttttcttttattttcttttgagcgattgtgcgaacatagcatagcacgcactatgccttctgtgttgtagctgcctggccagggcgactggcggataaggtcttgtgcgtggcctcgaggcttaaaagtagcagtggggctttgtgaaggacaaaatggcgatggcgggccgtgtaggtcccccttcctatgatgaggaccttttcacagacctgtactgagctccgtgaggataaataactctgaggagatgggccctgcaagcctcttgcttagccgtctgttcagaaaatagcgttttcgaaatgccctgagttgacctaatgtcttattgggctcctgtctgcaggatttacgcgcacgttggaaccgaagagagctctgttgttgcaatgttcagcccacaagagcttactggtgaaggaatgggacaagacccatctttatgcaaagccagcgttacagtaatgttccagcatctcataatctatcctggggaattcagctgcctcccagggtgaatacaggtattcctgatgacagtctgcctctatcttacagagcagcttgttgctatataccattgaaaagccttcagagctgagaggttagttgatattttttgttccttacagcttatgccaccaagtaggcagtttctatgatgaatcaaactagctcactatgaccgacagtgaaaatacatgaacacctgagaaactggagaacgcagggagtggggggtaaccatgtctgaggaatctttcacccacagctttgtttttctctaggtactactaaccaataacctgcttggctcaaaggccancancttctctctnaaagcccaagaggagttgaggaaaactggtgtctgggttcactccaggctgaagttcaggtttgagcaaataggngtntaaaaanggaatcngnctnggaggacatcagaagatacaagggcttggttttgttacccaggctggtttcaaggccatagctttaagagatcctctcaccacagatttccaaagtgctgggattgcaggtgtgattcatggcacccagactttgctgcctttcttacatgatccaggcccagaacccaaactcaggcactgtatagatgaccactttcgtaaactactgacctagcttgttgccaattgttgattgaacttcccataactccacttcgtgtctgttcctctgtatacagccaccttctgttcccgtcatgagcctttaggtctccatttgcatattgcaaatactatgttccatgtaggtagctcattcagggccttgctcttcacttcaaaaaaggttcccttgaggactggctgtcaatttgtgttgctgtgttggttgttgatgaaaataataaaatgattgattacata

SEQ ID NO: 50488 - DNA, 1274 bp, Homo sapiens
tgctagtagggcctgggttaatcggccgagggggtaagtggcttcgtggtctttatagctgttactcttttgtactttgtctttttcttttattttcttttgagcgattgtgcgaacatagcatagcacgcactatgccttctgtgttgtagctgcctggccagggcgactggcggataaggtcttgtgcgtggcctcgaggcttaaaagtagcagtggggctttgtgaaggacaaaatggcgatggcgggccgtgtaggtcccccttcctatgatgaggaccttttcacagacctgtactgagctccgtgaggataaataactctgaggagatgggccctgcaagcctcttgcttagccgtctgttcagaaaatagcgttttcgaaatgccctgagttgacctaatgtcttattgggctcctgtctgcaggatttacgcgcacgttggaaccgaagagagctctgttgttgcaatgttcagcccacaagagcttactggtgaaggaatgggacaagacccatctttatgcaaagccagcgttacagtaatgttccagcatctcataatctatcctggggaattcagctgcctcccagggtgaatacaggtattcctgatgacagtctgcctctatcttacagagcagcttgttgctatataccattgaaaagccttcagagctgagaggtactactaaccaataacctgcttggctcaaagggccagcaccttctctctaaagcccaagaggagtttgaggaaaactaggtgtctgtgttcactccaggctgaagttacaggtctgagcaaataaggtgtataaaaaatggaatctgtcttggaggacatcagaaggtgaattttccaagttcttggacaacctagctgttgaaaagctttctgggtttggggggtatttcagatgtaccttaaagtgttagcagacacagattaagacactgggagccaatgaaacagcagttgagggtttgctgtgtatcacatttctgtattttatcacccccttcctgcaacattatttatctggaatctacctgcccttttgttttttagatacaagggcttggttttgttacccaggctggtttcaaggccatagctttaagagatcctctcaccacagatttccaaagtgctgggattgcaggtgtgattcatggcacccagactttgctgcctttcttacatgatccaggcccagaacccaaactcaggcactcttcccatggtcgtttttcctctagagtcagc

SEQ ID NO: 50489 - DNA, 774 bp, Homo sapiens
tactggccccagttacaagcatgtcccatctcataatctatcctggggaattcagctgcctcccagggtgaatacaggtattcctgatgacagtctgcctctatcttacagagcagcttgttgctatataccattgaaaagccttcagagctgagaggtactactaaccaataacctgcttggctcaaagggccagcaccttctctctaaagcccaagaggagtttgaggaaaactaggtgtctgtgttcactccaggctgaagttacaggtctgagcaaataaggtgtataaaaaatggaatctgtcttggaggacatcagaagatacaagggcttggttttgttacccaggctggtttcaaggccatagctttaagagatcctctcaccacagatttccaaagtgctgggattgcaggtgtgattcatggcacccagactttgctgcctttcttacatgatccaggcccagaacccaaactcaggcactgtatagatgaccactttcgtaaactactgacctagcttgttgccaattgttgattgaacttcccataactccacttcgtgtctgttcctctgtatacagccaccttctgttcccgtcatgagcctttaggtctccatttgcatattgcaaatactatgttccatgtaggtagctcattcagggccttgctcttcacttcaaaaaaggttcccttgaggactggctgtcaatttgtgttgctgtgttggttgttgatgaaaataataaaatgattgattacata

SEQ ID NO: 50490 - DNA, 992 bp, Homo sapiens
tgctagtagggcctgggttaatcggccgagggggtaagtggcttcgtggtctttatagctgttactcttttgtactttgtctttttcttttattttcttttgagcgattgtgcgaacatagcatagcacgcactatgccttctgtgttgtagctgcctggccagggcgactggcggataaggtcttgtgcgtggcctcgaggcttaaaagtagcagtggggctttgtgaaggacaaaatggcgatggcgggccgtgtaggtcccccttcctatgatgaggaccttttcacagacctgtactgagctccgtgaggataaataactctgaggagatgggccctgcaagcctcttgcttagccgtctgttcagaaaatagcgttttcgaaatgccctgagttgacctaatgtcttattgggctcctgtctgcaggatttacgcgcacgttggaaccgaagagagctctgttgttgcaatgttcagcccacaagagcttactggtgaaggaatgggacaagacccatctttatgcaaagccagcgttacagtaatgttccagcatctcataatctatcctggggaattcagctgcctcccagggtgaatacaggtattcctgatgacagtctgcctctatcttacagagcagcttgttgctatataccattgaaaagccttcagagctgagaggtactactaaccaataacctgcttggctcaaagggccagcaccttctctctaaagcccaagaggagtttgaggaaaactaggtgtctgtgttcactccaggctgaagttacaggtctgagcaaataaggtgtataaaaaatggaatctgtcttggaggacatcagaaggtgaattttccaagttcttggacaacctagctgttgaaaagctttctgggtttggggggtatttcagatgtaccttaaagtgttagcagacacagattaagacactgggagcctctgggcactgtttggactctg

SEQ ID NO: 50491 - DNA, 1203 bp, Homo sapiens
tgctagtagggcctgggttaatcggccgagggggtaagtggcttcgtggtctttatagctgttactcttttgtactttgtctttttcttttattttcttttgagcgattgtgcgaacatagcatagcacgcactatgccttctgtgttgtagctgcctggccagggcgactggcggataaggtcttgtgcgtggcctcgaggcttaaaagtagcagtggggctttgtgaaggacaaaatggcgatggcgggccgtgtaggtcccccttcctatgatgaggaccttttcacagacctgtactgagctccgtgaggataaataactctgaggagatgggccctgcaagcctcttgcttagccgtctgttcagaaaatagcgttttcgaaatgccctgagttgacctaatgtcttattgggctcctgtctgcaggatttacgcgcacgttggaaccgaagagagctctgttgttgcaatgttcagcccacaagagcttactggtgaaggaatgggacaagacccatctttatgcaaagccagcgttacagtaatgttccagcatctcataatctatcctggggaattcagctgcctcccagggtgaatacaggtattcctgatgacagtctgcctctatcttacagagcagcttgttgctatataccattgaaaagccttcagagctgagaggtactactaaccaataacctgcttggctcaaagggccagcaccttctctctaaagcccaagaggagtttgaggaaaactaggtgtctgtgttcactccaggctgaagttacaggtctgagcaaataaggtgtataaaaaatggaatctgtcttggaggacatcagaaggtgaattttccaagttcttggacaacctagctgttgaaaagctttctgggtttggggggtatttcagatgtaccttaaagtgttagcagacacagattaagacactgggagcaagtagccataacccaggagaaggacccctagcagggttgcagtctgtaggagcacaacacgcttccgagggcagtaatgcagatatgccaagatatacagggtctgaagcgcagcacccactgtgttgacgacgatgaggatcccgtctcccttcaaagccccataactcagccagcccaggttgttgacttccgtggtgagaaagggcaggaactggacgttgtccacgctc

SEQ ID NO: 50492 - DNA, 775 bp, Homo sapiens
acaggttagcttacaaaatctaaatgaaagaagttgggcacaaggtgacagtttaagtaacttgaccagtgtcttaatttaaatccaggtgtgtctgacttcagagcccatgctcttttcaaggcgggggcggggggggcttcatcttattttgcctaaaacagctttattacacatggtcatgcttaaagcctatgtaaataggaaacatgtctagtttgtgttatgttacggtgttgagttagactagggattaaatgacagcagtgttaggtcatatatctttggatttaaacactttaaagactacagcctagattattacctttcagggtaatctaactaccatctacagagctagctactccttggtgattatggagtggcctgttagcattgttttctgacaatttaagaaactcctttttgatatatacagaaaatgtatccctggtttacttttcttgttttttccccctgggtttataataagtttgatacatttaattttgggagtgacatccattttgtcaagaaaacccaagaaagaattgaagtaggttgatcagtcaacatataattttttccttctccttcttgagacaggatcttgctctgttacccaggctggcgtgcagtagcatgatcatagttcactgcaaactcaacctctgaggtgggagaattgctggaacccaggaggcggaagttgcagtgagctgagaatgtgtcactgcactccagcctgggcaagagagcaaaaactccatctaat

SEQ ID NO: 50493 - DNA, 721 bp, Homo sapiens
acaggttagcttacaaaatctaaatgaaagaagttgggcacaaggtgacagtttaagtaacttgaccagtgtcttaatttaaatccaggtgtgtctgacttcagagcccatgctcttttcaaggcgggggcggggggggcttcatcttattttgcctaaaacagctttattacacatggtcatgcttaaagcctatgtaaataggaaacatgtctagtttgtgttatgttacggtgttgagttagactagggattaaatgacagcagtgttaggtcatatatctttggatttaaacactttaaagactacagcctagattattacctttcagggtaatctaactaccatctacagagctagctactccttggtgattatggagtggcctgttagcattgttttctgacaatttaagaaactcctttttgatatatacagaaaatgtatccctggtttacttttcttgttttttccccctgggtttataataagtttgatacatttaattttgggagtgacatccattttgtcaagtctccttcttgagacaggatcttgctctgttacccaggctggcgtgcagtagcatgatcatagttcactgcaaactcaacctctgaggtgggagaattgctggaacccaggaggcggaagttgcagtgagctgagaatgtgtcactgcactccagcctgggcaagagagcaaaaactccatctaat

SEQ ID NO: 50494 - DNA, 467 bp, Homo sapiens
aaagagaagagccattcctaggagagatggaatacatggctgttttcctcctagggtatggctaagaggagcaaacccaccatagatgaggataaggagaaaatagctgaatttcctacaaacttttgaaggccacatgtaggctggccataaggagccctaattatagagcaaataagtacccacctacccctaaatcgttctcatgaggccttcactgagtacacagtggcagcaagctgatggctaagggcaggacagaaatctgagaaagatccctgcccccacccaatgtacacaggaccttcactgattatacagcagcagtacagtacagtacagtggaacctgagaacagggcaggagggtagagaaagaccccctccaaagcacaaaaatccttcattgaatgcacagaagtggctcaccaagagtgcagagaactccacagcagcccaaagctggca

SEQ ID NO: 50495 - DNA, 1019 bp, Homo sapiens
cacacaaaactctctacactgctagtctttaattctcaaaaacagttccctgagagagggaacataattgcctctattttacagatgacaaaaccaggcttagaagttacacaaattgccttgcacagtggctcacacctataatcccacacattgggaggctgaggcaggaggattgagttagaaaccagcctggtcaacatagcaagacccccatctctacaaaagaaaagataaatttgctgggcatagtggtgcacacctatactcctgcttgggaggctgaggcaggaggatcgcttgagcccgggaggtcgaggctacagtgatccatgatcgcaccattgcactccagcctgggcgacagagcgaggccctatcgcttagaaaacaaaaagttacatgaagttcccccaaggtcccgtagctagcatgtgatgtggcagggagagagcctgtccgcttcactctctcacatgggaccagaaaggggtgatgctgtgcgtggacaggacatctggcaagtggtgtgtccaggacacaggaagcagcgtagtggccaagctgcctccagctgtcacatctgtgtgtctctgcagtaaggatgagtctgccttcatggtccacccgctgacggcacagggagtggccgtggtaatagtggcttacggcatcgcccccaaaggtaataggagtggttgctgcaggtccgagggccggtgggctttaggaggaagtgcatccctgacccagctcatgctctctgtgcaggcaccctggaccacatggtagaccaggtgacccgcagcgttgcgtttgtccagaagcggtatccaagcaacaagtgggtgttgccagtagattttcttcctgttggacctcagtgggtgggaggacagtgcaatcagtacctaggatacagccaagctgcccctctggcctgtggagcagaaagcaaattgggactcttcgaagggggcctgatgttgtgactggctgagggatcctctagaacagct

SEQ ID NO: 50496 - DNA, 583 bp, Homo sapiens
agcgggtagacgccatgatggatgtgtctggtgtgggtttcccaagcaaggttccttggaagaagatgtctgcagaggagctggagaatcagtactgtcccagccgatgggttgtccgactgggagcagaggaagccttgaggacctactcacagataggaattgaaggcttgagaactcctgtgtgaattaaatcacgaccttctgatgaagccactccgatgagcctgtgaggcacattgtcttcacactgtgctggggcagggttgttggcaaacccccatggatggcagccggcaatggcctcacagtgacaaatgcgtctgccttttgacccagaattctacccctgagagtgcgtcctacagatgcttgcaagtggtatggtaatggatgtacaaagctattcacagcaggggtgtttgtggtagcatggcctgggagacagcccagatggctttcagcaaaggattggtggcaggtctgcagccctggggcttatcagacaccaaccctgctggcaccttgatcttggacttccagtttgcagaactgtgagaaaataaaatttccattaagtttc

SEQ ID NO: 50497 - DNA, 858 bp, Homo sapiens
agcgggtagacgccatgatggatgtgtctggtgtgggtttcccaagcaaggttccttggaagaagatgtctgcagaggagctggagaatcagtactgtcccagccgatgggttgtccgactgggagcagaggaagccttgaggacctactcacagataggaattgaagccaccacaagggcccgggccaccaggaagagcctgctgcatgtcccctatggagacggcgaaggggagaaagtggacatttacttccccgacgagtcgtctgaagccttgcctttcttcctgttctttcacggaggatactggcagagcggaagtaaggatgagtctgccttcatggtccacccgctgacggcacagggagtggccgtggtaatagtggcttacggcatcgcccccaaaggcaccctggaccacatggtagaccaggtgacccgcagcgttgcgtttgtccagaagcggtatccaagcaacaagggaatttacctgtgtggacactcagccggggcccacctggctgccatgatgctcctggccgactggaccaagcatggggtcacgcccaacctcagaggctttttcctggtgagtggggtctttgacctggagcccatcgtgtatacttcacagaacgttgctctccagctgaccctggaggacgctcagaggaatagcccccagctgaaggtggcccaggcacagccggtggaccccacctgccgtgtgctggtggtcgtgggccagttcgactcccccgaattcacgagtcctgggttttccagggctcccggcgcccggtagggtgagcgcttgagagcccgggggccttattggattcccagggtggcccttc

SEQ ID NO: 50498 - DNA, 677 bp, Homo sapiens
agcgggtagacgccatgatggatgtgtctggtgtgggtttcccaagcaaggttccttggaagaagatgtctgcagaggagctggagaatcagtactgtcccagccgatgggttgtccgactgggagcagaggaagccttgaggacctactcacagataggaattgaagccaccacaagggcccgggccaccaggaagagcctgctgcatgtcccctatggagacggcgaaggggagaaagtggacatttacttccccgacgagtcgtctgaagccttgcctttcttcctgttctttcacggaggatactggcagagcggaaggtgagtcgggggatgtggatggtggactgcaagagagattccactttccctgggggactcctcctccagggctgccgcaaccaaactgccacaagctgggcactccttgcagggctgtgtctcacagcgctggagaacggaagtctcaagtcaaatgtgggcagggttcctagggagggtccttcctgccttctccagcttctggtggccttagacagcccttagcttgtgtctgcatagctccagcctctgcctccattcacatgtgatcctggtgttcctgggtctcaaatcttcctctctctttttttttttttttttttttttttgagacagagtctcactctaacccaga

SEQ ID NO: 50499 - DNA, 430 bp, Homo sapiens
agcgggtagacgccatgatggatgtgtctggtgtgggtttcccaagcaaggttccttggaagaagatgtctgcagaggtaggtggattgcagggagggactaaggggctggggcggagttagctcatttattagtttggaattccaagaaggaagcttttagaagccgtctagagcactcctgtgggcatgcagagcgcctagtgcgtgccaggtccccagtgcttgagcaccatggtgtattttaccttctcctaaggatttttgttaacctggttttcaggataaagaaaattgaagtcctgactatgctaataatatccgtagaccctgccaggcgtggcggctcacacctgtaatcctagcacttttggcggatcacgaggtcaggagttcgagaccagcctggccaacatggtgaaaccccgttt

SEQ ID NO: 50500 - DNA, 1837 bp, Homo sapiens
cacacaaaactctctacactgctagtctttaattctcaaaaacagttccctgagagagggaacataattgcctctattttacagatgacaaaaccaggcttagaagttacacaaattgccttgcacagtggctcacacctataatcccacacattgggaggctgaggcaggaggattgagttagaaaccagcctggtcaacatagcaagacccccatctctacaaaagaaaagataaatttgctgggcatagtggtgcacacctatactcctgcttgggaggctgaggcaggaggatcgcttgagcccgggaggtcgaggctacagtgatccatgatcgcaccattgcactccagcctgggcgacagagcgaggccctatcgcttagaaaacaaaaagttacatgaagttcccccaaggtcccgtagctagcatgtgatgtggcagggagagagcctgtccgcttcactctctcacatgggaccagaaaggggtgatgctgtgcgtggacaggacatctggcaagtggtgtgtccaggacacaggaagcagcgtagtggccaagctgcctccagctgtcacatctgtgtgtctctgcagtaaggatgagtctgccttcatggtccacccgctgacggcacagggagtggccgtggtaatagtggcttacggcatcgcccccaaaggtaataggagtggttgctgcaggtccgagggccggtgggctttaggaggaagtgcatccctgacccagctcatgctctctgtgcaggcaccctggaccacatggtagaccaggtgacccgcagcgttgcgtttgtccagaagcggtatccaagcaacaagtgggtgttgccagtagattttcttcctgttggacctcagtgggtgggaggacagtgcaatcagtacctaggatacagccaagctgcccctctggcctgtggagcagaaagcaaattgggactcttcgaagggggcctgatgttgtggggaaactgcgtgcaaatccagctctctgctctgacccctcccaggggaatttacctgtgtggacactcagccggggcccacctggctgccatgatgctcctggccgactggaccaagcatggggtcacgcccaacctcagaggctttttcctggtgagtggggtctttgacctggagcccatcgtgtatacttcacagaacgttgctctccagctgaccctggaggacgctcagaggaatagcccccagctgaaggtggcccaggcacagccggtggaccccacctgccgtgtgctggtggtcgtgggccagttcgactcccccgaattccaccgacagtcctgggagttttaccagaccctgtgtcaaggagagtggaaagcctcatttgaagagctccacgatgtggaccactttgaaattgttgagaatctgacccagaaggacaacgtgctcacccagattatcttgaaaacaatcttccagtagttctgacgatacttggagcctggtccacgtgcatcccaccttgggaagcctctccaaagagctttcggagctgacactgacagcttcagtttcccccagcacccaggagagccttgctgtgtctgtctgcccggcaagagtccattctcactgctgggacactcatgaaaatctccacgtcctccctcttcccagcctggatggagctccagggctggggaacgtccgcaagtcaatgctcagagatgcccggagctgcctcttagactcgtctggcccatctacctgctgacagagcatgacaaagatgacgccactgcactccagcctgggtgacagagtaagactccatctca

SEQ ID NO: 50501 - DNA, 2152 bp, Homo sapiens
gctgtgggagtggtgcccatgatggcattaactgaattcgtttgggggacctcatctccccttaaggctgccagctggctaaaggcacagcggtcgctggtatacctctagaccatggatctgagggcatcttggagaccctgggatactggggcgagggcttctaaggcagagaggagcagccgggcatgggcgagggggaggggcacactctgttgagaaggaaagtcttacggagcctcatgtttgtgccctgcaggagctggagaatcagtactgtcccagccgatgggttgtccgactgggagcagaggaagccttgaggacctactcacagataggaattgaagccaccacaagggcccgggccaccaggaagagcctgctgcatgtcccctatggagacggcgaaggggagaaagtggacatttacttccccgacgagtcgtctgaagccttgcctttcttcctgttctttcacggaggatactggcagagcggaagtaaggatgagtctgccttcatggtccacccgctgacggcacagggagtggccgtggtaatagtggcttacggcatcgcccccaaaggtaataggagtggttgctgcaggtccgagggccggtgggctttaggaggaagtgcatccctgacccagctcatgctctctgtgcaggcaccctggaccacatggtagaccaggtgacccgcagcgttgcgtttgtccagaagcggtatccaagcaacaagtgggtgttgccagtagattttcttcctgttggacctcagtgggtgggaggacagtgcaatcagtacctaggatacagccaagctgcccctctggcctgtggagcagaaagcaaattgggactcttcgaagggggcctgatgttgtggggaaactgcgtgcaaatccagctctctgctctgacccctcccaggggaatttacctgtgtggacactcagccggggcccacctggctgccatgatgctcctggccgactggaccaagcatggggtcacgcccaacctcagaggctttttcctggtgagtggggtctttgacctggagcccatcgtgtatacttcacagaacgttgctctccagctgaccctggaggacgctcagaggaatagcccccagctgaaggtggcccaggcacagccggtggaccccacctgccgtgtgctggtggtcgtgggccagttcgactcccccgaattccaccgacagtcctgggagttttaccagaccctgtgtcaaggagagtggaaagcctcatttgaagagctccacgatgtggaccactttgaaattgttgagaatctgacccagaaggacaacgtgctcacccagattatcttgaaaacaatcttccagtagttctgacgatacttggagcctggtccacgtgcatcccaccttgggaagcctctccaaagagctttcggagctgacactgacagcttcagtttcccccagcacccaggagagccttgctgtgtctgtctgcccggcaagagtccattctcactgctgggacactcatgaaaatctccacgtcctccctcttcccagcctggatggagctccagggctggggaacgtccgcaagtcaatgctcagagatgcccggagctgcctcttagactcgtctggcccatctacctgctgacagagcatgacaaagatgacgctcaaaagtaatgccattacttcttttttttttttttttttttttttttttgagaaggagtcttactctgtcacccaggctggagtgcaggggcgtgatcttggcttactggaacctccaccttccgggttcaagctatttttcttgttcagccttctgagcctttgggactggtggtgcctgccattatgcctgggtaatttttgtatttttaggagagacggggtttcaacatattggccaggctggtctcaaactcctaaccttgcgattcgcccgccttggcctcccaaagtgctgggattccaggcgtgagcccctgcgcccggccagtatggcattatttttaaatagttcataaagaagcacaaaagaatattatttcataacatgtaaaaattatataaaacgtaaatttccatgttgataaataaagttgtattggaacacggc

SEQ ID NO: 50502 - DNA, 1970 bp, Homo sapiens
agcgggtagacgccatgatggatgtgtctggtgtgggtttcccaagcaaggttccttggaagaagatgtctgcagaggagctggagaatcagtactgtcccagccgatgggttgtccgactgggagcagaggaagccttgaggacctactcacagataggaattgaagccaccacaagggcccgggccaccaggaagagcctgctgcatgtcccctatggagacggcgaaggggagaaagtggacatttacttccccgacgagtcgtctgaagccttgcctttcttcctgttctttcacggaggatactggcagagcggaagtaaggatgagtctgccttcatggtccacccgctgacggcacagggagtggccgtggtaatagtggcttacggcatcgcccccaaaggtaataggagtggttgctgcaggtccgagggccggtgggctttaggaggaagtgcatccctgacccagctcatgctctctgtgcaggcaccctggaccacatggtagaccaggtgacccgcagcgttgcgtttgtccagaagcggtatccaagcaacaagtgggtgttgccagtagattttcttcctgttggacctcagtgggtgggaggacagtgcaatcagtacctaggatacagccaagctgcccctctggcctgtggagcagaaagcaaattgggactcttcgaagggggcctgatgttgtggggaaactgcgtgcaaatccagctctctgctctgacccctcccaggggaatttacctgtgtggacactcagccggggcccacctggctgccatgatgctcctggccgactggaccaagcatggggtcacgcccaacctcagaggctttttcctggtgagtggggtctttgacctggagcccatcgtgtatacttcacagaacgttgctctccagctgaccctggaggacgctcagaggaatagcccccagctgaaggtggcccaggcacagccggtggaccccacctgccgtgtgctggtggtcgtgggccagttcgactcccccgaattccaccgacagtcctgggagttttaccagaccctgtgtcaaggagagtggaaagcctcatttgaagagctccacgatgtggaccactttgaaattgttgagaatctgacccagaaggacaacgtgctcacccagattatcttgaaaacaatcttccagtagttctgacgatacttggagcctggtccacgtgcatcccaccttgggaagcctctccaaagagctttcggagctgacactgacagcttcagtttcccccagcacccaggagagccttgctgtgtctgtctgcccggcaagagtccattctcactgctgggacactcatgaaaatctccacgtcctccctcttcccagcctggatggagctccagggctggggaacgtccgcaagtcaatgctcagagatgcccggagctgcctcttagactcgtctggcccatctacctgctgacagagcatgacaaagatgacgctcaaaagtaatgccattacttcttttttttttttttttttttttttttttgagaaggagtcttactctgtcacccaggctggagtgcaggggcgtgatcttggcttactggaacctccaccttccgggttcaagctatttttcttgttcagccttctgagcctttgggactggtggtgcctgccattatgcctgggtaatttttgtatttttaggagagacggggtttcaacatattggccaggctggtctcaaactcctaaccttgcgattcgcccgccttggcctcccaaagtgctgggattccaggcgtgagcccctgcgcccggccagtatggcattatttttaaatagttcataaagaagcacaaaagaatattatttcataacatgtaaaaattatataaaacgtaaatttccatgttgataaataaagttgtattggaacacggc

SEQ ID NO: 50503 - DNA, 1299 bp, Homo sapiens
agcgggtagacgccatgatggatgtgtctggtgtgggtttcccaagcaaggttccttggaagaagatgtctgcagaggagctggagaatcagtactgtcccagccgatgggttgtccgactgggagcagaggaagccttgaggacctactcacagataggaattgaagccaccacaagggcccgggccaccaggaagagcctgctgcatgtcccctatggagacggcgaaggggagaaagtggacatttacttccccgacgagtcgtctgaagccttgcctttcttcctgttctttcacggaggatactggcagagcggaaggctttttcctggtgagtggggtctttgacctggagcccatcgtgtatacttcacagaacgttgctctccagctgaccctaccctgtgtcaaggagagtggaaagcctcatttgaagagctccacgatgtggaccactttgaaattgttgagaatctgacccagaaggacaacgtgctcacccagattatcttgaaaacaatcttccagtagttctgacgatacttggagcctggtccacgtgcatcccaccttgggaagcctctccaaagagctttcggagctgacactgacagcttcagtttcccccagcacccaggagagccttgctgtgtctgtctgcccggcaagagtccattctcactgctgggacactcatgaaaatctccacgtcctccctcttcccagcctggatggagctccagggctggggaacgtccgcaagtcaatgctcagagatgcccggagctgcctcttagactcgtctggcccatctacctgctgacagagcatgacaaagatgacgctcaaaagtaatgccattacttcttttttttttttttttttttttttttttgagaaggagtcttactctgtcacccaggctggagtgcaggggcgtgatcttggcttactggaacctccaccttccgggttcaagctatttttcttgttcagccttctgagcctttgggactggtggtgcctgccattatgcctgggtaatttttgtatttttaggagagacggggtttcaacatattggccaggctggtctcaaactcctaaccttgcgattcgcccgccttggcctcccaaagtgctgggattccaggcgtgagcccctgcgcccggccagtatggcattatttttaaatagttcataaagaagcacaaaagaatattatttcataacatgtaaaaattatataaaacgtaaatttccatgttgataaataaagttgtattggaacacggc

SEQ ID NO: 50504 - DNA, 1402 bp, Homo sapiens
gctgtgggagtggtgcccatgatggcattaactgaattcgtttgggggacctcatctccccttaaggctgccagctggctaaaggcacagcggtcgctggtatacctctagaccatggatctgagggcatcttggagaccctgggatactggggcgagggcttctaaggcagagaggagcagccgggcatgggcgagggggaggggcacactctgttgagaaggaaagtcttacggagcctcatgtttgtgccctgcaggagctggagaatcagtactgtcccagccgatgggttgtccgactgggagcagaggaagccttgaggacctactcacagataggaattgaagccaccacaagggcccgggccaccaggaagagcctgctgcatgtcccctatggagacggcgaaggggagaaagtggacatttacttccccgacgagtcgtctgaagccttgcctttcttcctgttctttcacggaggatactggcagagcggaagaccctgtgtcaaggagagtggaaagcctcatttgaagagctccacgatgtggaccactttgaaattgttgagaatctgacccagaaggacaacgtgctcacccagattatcttgaaaacaatcttccagtagttctgacgatacttggagcctggtccacgtgcatcccaccttgggaagcctctccaaagagctttcggagctgacactgacagcttcagtttcccccagcacccaggagagccttgctgtgtctgtctgcccggcaagagtccattctcactgctgggacactcatgaaaatctccacgtcctccctcttcccagcctggatggagctccagggctggggaacgtccgcaagtcaatgctcagagatgcccggagctgcctcttagactcgtctggcccatctacctgctgacagagcatgacaaagatgacgctcaaaagtaatgccattacttcttttttttttttttttttttttttttttgagaaggagtcttactctgtcacccaggctggagtgcaggggcgtgatcttggcttactggaacctccaccttccgggttcaagctatttttcttgttcagccttctgagcctttgggactggtggtgcctgccattatgcctgggtaatttttgtatttttaggagagacggggtttcaacatattggccaggctggtctcaaactcctaaccttgcgattcgcccgccttggcctcccaaagtgctgggattccaggcgtgagcccctgcgcccggccagtatggcattatttttaaatagttcataaagaagcacaaaagaatattatttcataacatgtaaaaattatataaaacgtaaatttccatgttgataaataaagttgtattggaacacggc

SEQ ID NO: 50505 - DNA, 887 bp, Homo sapiens
gctgtgggagtggtgcccatgatggcattaactgaattcgtttgggggacctcatctccccttaaggctgccagctggctaaaggcacagcggtcgctggtatacctctagaccatggatctgagggcatcttggagaccctgggatactggggcgagggcttctaaggcagagaggagcagccgggcatgggcgagggggaggggcacactctgttgagaaggaaagtcttacggagcctcatgtttgtgccctgcaggagctggagaatcagtactgtcccagccgatgggttgtccgactgggagcagaggaagccttgaggacctactcacagataggaattgaagccaccacaagggcccgggccaccaggaagagcctgctgcatgtcccctatggagacggcgaaggggagaaagtggacatttacttccccgacgagtcgtctgaagccttgcctttcttcctgttctttcacggaggatactggcagagcggaagattatcttgaaaacaatcttccagtagttctgacgatacttggagcctggtccacgtgcatcccaccttgggaagcctctccaaagagctttcggagctgacactgacagcttcagtttcccccagcacccaggagagccttgctgtgtctgtctgcccggcaagagtccattctcactgctgggacactcatgaaaatctccacgtcctccctcttcccagcctggatggagctccagggctggggaacgtccgcaagtcaatgctcagagatgcccggagctgcctcttagactcgtctggcccatctacctgctgacagagcatgacaaagatgacgccactgcactccagcctgggtgacagagtaagactccatctca

SEQ ID NO: 50506 - DNA, 659 bp, Homo sapiens
agcgggtagacgccatgatggatgtgtctggtgtgggtttcccaagcaaggttccttggaagaagatgtctgcagaggagctggagaatcagtactgtcccagccgatgggttgtccgactgggagcagaggaagccttgaggacctactcacagataggaattgaagattatcttgaaaacaatcttccagtagttctgacgatacttggagcctggtccacgtgcatcccaccttgggaagcctctccaaagagctttcggagctgacactgacagcttcagtttcccccagcacccaggagagccttgctgtgtctgtctgcccggcaagagtccattctcactgctgggacactcatgaaaatctccacgtcctccctcttcccagcctggatggagctccagggctggggaacgtccgcaagtcaatgctcagagatgcccggagctgcctcttagactcgtctggcccatctacctgctgacagagcatgacaaagatgacgctcaaaagtaatgccattacttctttttttttttttttttttttttttgggaggggggggttcccctttcccccggggcccaaccctgggggtgccccacatgagagatctcctttctccaaagaaaatgcatcatctcactccctcaaca

SEQ ID NO: 50507 - DNA, 2247 bp, Homo sapiens
cacacaaaactctctacactgctagtctttaattctcaaaaacagttccctgagagagggaacataattgcctctattttacagatgacaaaaccaggcttagaagttacacaaattgccttgcacagtggctcacacctataatcccacacattgggaggctgaggcaggaggattgagttagaaaccagcctggtcaacatagcaagacccccatctctacaaaagaaaagataaatttgctgggcatagtggtgcacacctatactcctgcttgggaggctgaggcaggaggatcgcttgagcccgggaggtcgaggctacagtgatccatgatcgcaccattgcactccagcctgggcgacagagcgaggccctatcgcttagaaaacaaaaagttacatgaagttcccccaaggtcccgtagctagcatgtgatgtggcagggagagagcctgtccgcttcactctctcacatgggaccagaaaggggtgatgctgtgcgtggacaggacatctggcaagtggtgtgtccaggacacaggaagcagcgtagtggccaagctgcctccagctgtcacatctgtgtgtctctgcagtaaggatgagtctgccttcatggtccacccgctgacggcacagggagtggccgtggtaatagtggcttacggcatcgcccccaaaggtaataggagtggttgctgcaggtccgagggccggtgggctttaggaggaagtgcatccctgacccagctcatgctctctgtgcaggcaccctggaccacatggtagaccaggtgacccgcagcgttgcgtttgtccagaagcggtatccaagcaacaagtgggtgttgccagtagattttcttcctgttggacctcagtgggtgggaggacagtgcaatcagtacctaggatacagccaagctgcccctctggcctgtggagcagaaagcaaattgggactcttcgaagggggcctgatgttgtggggaaactgcgtgcaaatccagctctctgctctgacccctcccaggggaatttacctgtgtggacactcagccggggcccacctggctgccatgatgctcctggccgactggaccaagcatggggtcacgcccaacctcagaggctttttcctggtgagtggggtctttgacctggagcccatcgtgtatacttcacagaacgttgctctccagctgaccctggaggacgctcagaggaatagcccccagctgaaggtggcccaggcacagccggtggaccccacctgccgtgtgctggtggtcgtgggccagttcgactcccccgaattccaccgacagtcctgggagttttaccagaccctgtgtcaaggagagtggaaagcctcatttgaagagctccacgatgtggaccactttgaaattgttgagaatctgacccagaaggacaacgtgctcacccagattatcttgaaaacaatcttccagtagttctgacgatacttggagcctggtccacgtgcatcccaccttgggaagcctctccaaagagctttcggagctgacactgacagcttcagtttcccccagcacccaggagagccttgctgtgtctgtctgcccggcaagagtccattctcactgctgggacactcatgaaaatctccacgtcctccctcttcccagcctggatggagctccagggctggggaacgtccgcaagtcaatgctcagagatgcccggagctgcctcttagactcgtctggcccatctacctgctgacagagcatgacaaagatgacgctcaaaagtaatgccattacttcttttttttttttttttttttttttttttgagaaggagtcttactctgtcacccaggctggagtgcaggggcgtgatcttggcttactggaacctccaccttccgggttcaagctatttttcttgttcagccttctgagcctttgggactggtggtgcctgccattatgcctgggtaatttttgtatttttaggagagacggggtttcaacatattggccaggctggtctcaaactcctaaccttgcgattcgcccgccttggcctcccaaagtgctgggattccaggcgtgagcccctgcgcccggccagtatggcattatttttaaatagttcataaagaagcacaaaagaatattatttcataacatgtaaaaattatataaaacgtaaatttccatgttgataaataaagttgtattggaacacggc

SEQ ID NO: 50508 - DNA, 1372 bp, Homo sapiens
cacacaaaactctctacactgctagtctttaattctcaaaaacagttccctgagagagggaacataattgcctctattttacagatgacaaaaccaggcttagaagttacacaaattgccttgcacagtggctcacacctataatcccacacattgggaggctgaggcaggaggattgagttagaaaccagcctggtcaacatagcaagacccccatctctacaaaagaaaagataaatttgctgggcatagtggtgcacacctatactcctgcttgggaggctgaggcaggaggatcgcttgagcccgggaggtcgaggctacagtgatccatgatcgcaccattgcactccagcctgggcgacagagcgaggccctatcgcttagaaaacaaaaagttacatgaagttcccccaaggtcccgtagctagcatgtgatgtggcagggagagagcctgtccgcttcactctctcacatgggaccagaaaggggtgatgctgtgcgtggacaggacatctggcaagtggtgtgtccaggacacaggaagcagcgtagtggccaagctgcctccagctgtcacatctgtgtgtctctgcagtaaggatgagtctgccttcatggtccacccgctgacggcacagggagtggccgtggtaatagtggcttacggcatcgcccccaaaggtaataggagtggttgctgcaggtccgagggccggtgggctttaggaggaagtgcatccctgacccagctcatgctctctgtgcaggcaccctggaccacatggtagaccaggtgacccgcagcgttgcgtttgtccagaagcggtatccaagcaacaagtgggtgttgccagtagattttcttcctgttggacctcagtgggtgggaggacagtgcaatcagtacctaggatacagccaagctgcccctctggcctgtggagcagaaagcaaattgggactcttcgaagggggcctgatgttgtggggaaactgcgtgcaaatccagctctctgctctgacccctcccaggggaatttacctgtgtggacactcagccggggcccacctggctgccatgatgctcctggccgactggaccaagcatggggtcacgcccaacctcagaggtttccatgggagctacagcctggctgggcaaccttcatctccccatgagccttggggtttgggccaactgcttgaaatcctcccggccatgagtggcttgaccgcagggcttcgagccctctgagcaaggccttctctgcctcctctgtgccccttcccctggtcctgcccctctggcggtgggggtgggctggccctgccttgctccgcctggagcctggccctgtgacaattctg

SEQ ID NO: 50509 - DNA, 1617 bp, Homo sapiens
gctgtgggagtggtgcccatgatggcattaactgaattcgtttgggggacctcatctccccttaaggctgccagctggctaaaggcacagcggtcgctggtatacctctagaccatggatctgagggcatcttggagaccctgggatactggggcgagggcttctaaggcagagaggagcagccgggcatgggcgagggggaggggcacactctgttgagaaggaaagtcttacggagcctcatgtttgtgccctgcaggagctggagaatcagtactgtcccagccgatgggttgtccgactgggagcagaggaagccttgaggacctactcacagataggaattgaagccaccacaagggcccgggccaccaggaagagcctgctgcatgtcccctatggagacggcgaaggggagaaagtggacatttacttccccgacgagtcgtctgaagccttgcctttcttcctgttctttcacggaggatactggcagagcggaaggctttttcctggtgagtggggtctttgacctggagcccatcgtgtatacttcacagaacgttgctctccagctgaccctggaggacgctcagaggaatagcccccagctgaaggtggcccaggcacagccggtggaccccacctgccgtgtgctggtggtcgtgggccagttcgactcccccgaattccaccgacagtcctgggagttttaccagaccctgtgtcaaggagagtggaaagcctcatttgaagagctccacgatgtggaccactttgaaattgttgagaatctgacccagaaggacaacgtgctcacccagattatcttgaaaacaatcttccagtagttctgacgatacttggagcctggtccacgtgcatcccaccttgggaagcctctccaaagagctttcggagctgacactgacagcttcagtttcccccagcacccaggagagccttgctgtgtctgtctgcccggcaagagtccattctcactgctgggacactcatgaaaatctccacgtcctccctcttcccagcctggatggagctccagggctggggaacgtccgcaagtcaatgctcagagatgcccggagctgcctcttagactcgtctggcccatctacctgctgacagagcatgacaaagatgacgctcaaaagtaatgccattacttcttttttttttttttttttttttttttttgagaaggagtcttactctgtcacccaggctggagtgcaggggcgtgatcttggcttactggaacctccaccttccgggttcaagctatttttcttgttcagccttctgagcctttgggactggtggtgcctgccattatgcctgggtaatttttgtatttttaggagagacggggtttcaacatattggccaggctggtctcaaactcctaaccttgcgattcgcccgccttggcctcccaaagtgctgggattccaggcgtgagcccctgcgcccggccagtatggcattatttttaaatagttcataaagaagcacaaaagaatattatttcataacatgtaaaaattatataaaacgtaaatttccatgttgataaataaagttgtattggaacacggc

SEQ ID NO: 50510 - DNA, 995 bp, Homo sapiens
tgactgataaagccctataagacctacacacagattggaattgaagcctgcagtgctacctgttctaacacgggacgcatacgtggcagagcggaagaccctgtgtcaaggagagtggaaagcctcatttgaagagctccacgatgtggaccactttgaaattgttgagaatctgacccagaaggacaacgtgctcacccagattatcttgaaaacaatcttccagtagttctgacgatacttggagcctggtccacgtgcatcccaccttgggaagcctctccaaagagctttcggagctgacactgacagcttcagtttcccccagcacccaggagagccttgctgtgtctgtctgcccggcaagagtccattctcactgctgggacactcatgaaaatctccacgtcctccctcttcccagcctggatggagctccagggctggggaacgtccgcaagtcaatgctcagagatgcccggagctgcctcttagactcgtctggcccatctacctgctgacagagcatgacaaagatgacgctcaaaagtaatgccattacttcttttttttttttttttttttttttttttgagaaggagtcttactctgtcacccaggctggagtgcaggggcgtgatcttggcttactggaacctccaccttccgggttcaagctatttttcttgttcagccttctgagcctttgggactggtggtgcctgccattatgcctgggtaatttttgtatttttaggagagacggggtttcaacatattggccaggctggtctcaaactcctaaccttgcgattcgcccgccttggcctcccaaagtgctgggattccaggcgtgagcccctgcgcccggccagtatggcattatttttaaatagttcataaagaagcacaaaagaatattatttcataacatgtaaaaattatataaaacgtaaatttccatgttgataaataaagttgtattggaacacggc

SEQ ID NO: 50511 - DNA, 799 bp, Homo sapiens
cagtggcatgacctcagctcactgcaacctctgcctcctgggttcaagcgattctcctgcctcagcctcttgagtagttagtagagacggggtttcaccatgttggccaggctggtgtcgaactcctgacctcaggtgatctgcccgccttggcctcccaaagtgctaattagaaaggagaaggcattcctattctgtttgagagcccattctgaagttgtacacatcactctgctcacattccattggttagaatttaacccgggcatggtgactcatgcctgtaatcccagcactttgggaggccaaggtgggaggattgcttgagctcaggagttcaagaccagcctgggcaacatagtgagactctgtctctacaaaaaaaaagtaaaaacaagctgaacatggtggcatgcatctgtagtcccagctcctcaggaggctggggtgggaggatcacttgagtccaggaggtcatggctgcagtttggtgtgattgagttactgcactccagtgtaggtgacagagcaagaccctgtctcaaaaaaaaaaaaaaaaaaaaaaaagaatttagtcacatgataacacctagctgcaaggatttctagaaaaggagtctattctaggaagtcatgtgctcatccaaaaatttggaagagaggttctttcacaaagactaatgggagaacagatactggggagacaactagcaatctctgacatctcatcagtgagtacataaacactggtaactgtcaaccagatatatacctttaactctattcttccgtcatatca

SEQ ID NO: 50512 - DNA, 421 bp, Homo sapiens
gtttttaacgttagtccatgttgttgtggagctatcgtctttcttttattgctcccttgatttaggagttagccacaactaacccctctgtctcttttatctccctatgtttctggtattggatcatatgattcttcagaaccatgcctacacagttgtccccctttcccagtattgaacttggagataggaggcagtgggtaagtctggtgggtgaactggcttggaaaaagtgctcaagtgacttctttctgagaggaaacttgagactagtcttttctacatcatcttacttaatggggctaataattaatgtagtccgcatgaatagttcccaaccaaatgtttttcaaagccaatcaggttggtcttaatatctaaagatgtcatccagatgtgtaaaaataatgcatgtataata

SEQ ID NO: 50513 - DNA, 2394 bp, Homo sapiens
  misc_feature (856)..(856): n is a, c, g, or t
atgtaccgctacctggccaaagcgctgctgccgtcccgggccgggcccgctgccctgggctccgcggccaaccactcggccgcgttgctgggccggggccgcggacagcccgccgccgcctcgcagccggggctcgcattggccgcccggcgccactacagcgagttggtggccgaccgcgaggacgaccccaacttcttcaagatggtggagggcttcttcgatcgcggcgccagcatcgtggaggacaagttggtgaaggacctgaggacccaggaaagcgaggagcagaagcggaaccgggtgcgcggcatcctgcggatcatcaagccctgcaaccatgtgctgagtctctccttccccatccggcgcgacgacggctcctgggaggtcatcgaaggctaccgggcccagcacagccagcaccgcacgccctgcaagggaggtatccgttacagcactgatgtgagtgtagatgaagtaaaagctttggcttctctgatgacatacaagtgtgcagtggttgatgtgccgtttgggggtgctaaagctggtgttaagatcaatcccaagaactataccgaaaatgaattggaaaagatcacaaggaggttcaccatggagctagcaaagaagggctttattggtcctggcgttgatgtgcctgctccagacatgaacacaggtgagcgggagatgtcctggattgctgatacctatgccagcaccatagggcactatgatattaatgcacacgcctgtgttactggtaaacccatcagccaagggggaatccatggacgcatctctgctactggccgtggtgtcttccatgggattgaaaacttcatcaatnaagcttcttacatgagcattttaggaatgacaccagggtttagagataaaacatttgttgttcagggatttggtaatgtgggcctacactctatgagatatttacatcgttttggtgctaaatgtattgctgttggtgagtctgatgggagtatatggaatccagatggtattgacccaaaggaactggaagacttcaaattgcaacatgggtccattctgggcttccccaaggcaaagccctatgaaggaagcatcttggaggtcgactgtgacatactgatcccagctgccactgagaagcagttgaccaaatccaacgcacccagagtcaaagccaagatcattgctgaaggtgccaatgggccaacaactccagaagctgataagatcttcctggagagaaacattttggttattccagatctctacttgaatgctggaggagtgacagtatcttactttgagtggctgaagaatctaaatcatgtcagctatggccgtttgaccttcaaatatgaaagggattctaactaccacttgctcctgtctgttcaagagagtttagaaagaaaatttggaaagcatggtggaactattcccattgtacccacggcagagttccaagacagtatatcgggtgcatctgagaaagacattgtgcactctgccttggcatacacaatggagcgttctgccaggcaaattatgcacacagccatgaagtataacctgggattggacctgagaacagctgcctatgtcaatgccattgaaaaagtcttcaaagtgtacagtgaagctggtgtgaccttcacatagatggatcatggctgacttcctcactaacctcttcacgtgtaacttctgcagacctaccacaagtttacatgtaaccacagaaatccctttctctcctgactcattactaatggataccattctcaacaagtcaatccaaatcagcccgttaaggagaaagaaattaatatacaagctgagtgtgaaagtagaaatcacctacaccagagagctattttggtattttgcctttaaataaaaagcctcctccatatggctgtgcagccttgctctgtggcttttcccagcacaatcagtgctagtgctggggaagggacagtcaagagcagtcagttgcttacttattttgctctggatgagtctgggacacgctgtaactttaacacatttaagaagaaggtgtgtggccttttcagaaggtggcatggtcctcaagtgagttcttagtattttatatcagcaaaataactcaattttgcagattgcaaacaaatataaaagctgtttctgtttatgaattttattcttttagaatagaataagtacatgctgctgtaataaaattgcctttaatcacttaacaagcctaaccttgactcagtgaatgcctataaaaataataaatgaaaaaaaacagtatttttatatcataaaagtttcatttgtagcttatcattcacgtattgttgtccagcaaacattaaaagccctgtggat

SEQ ID NO: 50514 - DNA, 486 bp, Homo sapiens
agaccatacaattcactcatttaaatgaactacccatttaatagtttttagtatgttcatagatactggcaaccatcaccacagtcagttttagagcattttaatagtcttactaacaaccttcacccagtaccctttaaatatcacctctctactccctcatccgcccagtactatgcaaccatcaatctgtctctatggtggtagattgatactgccacctatagccatttgcatcattgtatattctattcagattctgttagtcaatttagataagaccaaggaataatgagacaataggattccctttaaaaattgcttggaggccaggtgtgatggcctgtgcctgtagttacagctacttggaaggctgaggtagggaaaatcacttgagtccaggagttcgaggctgcagtgagctatggtcacacctatgaataaccactgcactccagtcagggaaacatagtgagaccccatctc

SEQ ID NO: 50515 - DNA, 347 bp, Homo sapiens
ctttgtgtttgagaagcagggtcttgctttgttgcccaggatgaagtacagtggcatgatgatcatggctcaatgctgccttaaacttctgggctcaagtgatcccctgccatagcctccaaaagtgctgacttaacttattgaacccccaatttccctatttgtaaaatggagataatgagagtacctacctgtcaatgagaatgattttggctgagagttcagaaaactcaacacaaatggcttaaatctgaaggaaaataacattacctcgtttagtaggaaagggttcctaggttgtctaatatagttgcttacctagatcccccaaaataaaggactcattc

SEQ ID NO: 50516 - DNA, 279 bp, Homo sapiens
ctggatctgaagaaaaggtggagaaatcagcgccacctctttctcctgggttctccatcactcttgactgtgtggccatggttctccactgacttctaactcatacccacccccacagactcatcaacttccaaaacgtcaccctgcatcctgccctcctctcagtcctcactggatccccctggtcagctcaggcctctcgcctggaccaccacagtggccccctaatgggtcagatgcctccacaccagccaagagcaatgggtctaactgtgcagg

SEQ ID NO: 50517 - DNA, 446 bp, Homo sapiens
tcctgtggtgtaaaaggctttttaacatgttctgtggtgaggaagggaagctaatagggccttgtgggcggggcctttttggtgattcaatgtaaagtggcttctaaatctaaatgtacaatggaattgatgtgttgtatgcccacacttacctgtctgatgattgtcagtgggattctccctttcaagggctcccacatgtacagaggtaataatggactgtgtaaattgctccccaacgtgtctctgacccctcctggtggtcctccagacacaatacaaaatcccaggaggagaaagggaaattgctgactgacttaattgcactcagagcactcaagccttttccaacccagtgtggccacctacctgacgcaaccaccaaacagcatccactttgaaaaacaggcagctattaatgtgcatctctcgaaactgaataccta

SEQ ID NO: 50518 - DNA, 286 bp, Homo sapiens
ccaggcttagagagtgctcagtttatattgttgaatgcatgaatgtggaatcaaagggagagtgtggatgctgggtttggcagagttggatttgagcctgtttttagtattgactggctgtgggtagctgtgagcccgaccatgtctttttggtggaaagggatgataaccccaacttctcctggttgctagaacattcagtgaggtcatatgtcttcatcaatgcctgtttccccattcccttgccttttctttaaggtttgtatggaaaacagtgagaccccag

SEQ ID NO: 50519 - DNA, 511 bp, Homo sapiens
ctacttgctgtttttccttaagtttttgaaacctgactatacttggagtcttgggaacacatcttacagtgtttcctcacactgtgagataaaatggctactttttcttgaagtttttgtcttctaaaatgaacaattcaaatatagttataaaatggagtatttattttgtacttttaaaaaatggtttaaggtgaggctttgtttattcctaatatgtgaataatactgatgtgaaaaatgtgagtcccagcactttgggaggccagggcgggcggatcacgaggtcaggagatcgagaccatcgtggctaacacggtgaaaccccatctctactaaaaatacaaaaaattagccaggcgtggtggcgggcccctgtagtcccagctacttgggaggctgaggcaggagaatggcgtgaacccagaaggcggagcttgcagtgagccgagatcagatcacgacactgcactccagcctgggcgacagagcgagactctgtctcaaaaaa

SEQ ID NO: 50520 - DNA, 354 bp, Homo sapiens
ggactattgctaactaacccatgggactcccactaccttcatgaggctcggatgaggtgaagggtccctaaaatcgtgccaactagtcaggaactcagttgtcaataatttctttatttgtgatacaagcaggcgtggggaaagagaaatgaacagacttggaagcttctccgaggccctagagaagacctctgggttccgaacaccagacaccaggagtaaggagggtagttgatgatttcccactctttctccagcccctgctcctctgtttctccccttcacccactgcagcttcctcaggtcctgggtcccgcgccatcatctcttcgaatgacctccctgctattcctg

SEQ ID NO: 50521 - DNA, 500 bp, Homo sapiens
atctagagatgaaattatgcctctaatattttatgacctgccaattttcattcagggttactgttttttttttcacgttatagtctaagatttattattaaacaatgaaacaggttaacactaccatttggctttaatgtttgactaccgaaaagctaaccattcatcaaatttgttttttaattgtggttccctgggtcactcacacatatacatcgaaacaatttattagtgtaaagattaattgtggtaattttattgtcttgggattagatgaagagaccttcaaaaactccttttgatgaaacaagtaataaaatgtaggaaacagcgagttctgtggttcaatatttatatgtctgtgctaggaagctttacataaatttggaaaactttttgtagggtatttggcagagtggaaaatttgccaatacttcaggcacacttataagcccctcttgtcttcagtctggttggctacgtccaataaagtttgattt

SEQ ID NO: 50522 - DNA, 468 bp, Homo sapiens
agtgtgtggaaaatttccccccaactcacagtttctacagtggaaaaagtgagactgaggtgaacaaccagcttctccacaatcttgagttttctggtgagaaatctttccctgcctcaatgcacaagaagtgttgagagtaccagaagggagaatatccctgaggaaagccagagacaaagtggtgaggtagaaataccatccttatctctggaaactctgctctatatcttggccaaaggagacgccaaatcaaagtggctgtttagcagcaccacacagtaagagtttcatctcacaggtcccctgggtaaaaacccctggctggccttcccacactactgggatatcctctttgggacctctcccattcaggatgggtggcactctgatcatttactaaaaccagtgctaacctgggcttaaggcaccaaccatctagtactgaaaaggaggcagtgacctaga

SEQ ID NO: 50523 - DNA, 726 bp, Homo sapiens
ttttgagttggccaagtacatacacattaaacagtcctttactagagatgctggccctccatttccatccatttcagaattcaccagggagccagagatccaggatggctcattcgtctcacttttgaccgccctgcttctctagttttctctttccctcccgcttagactgctaattgtcttcttcccctcaccagtgaccccacagctccgtggttccttcggcccagatgccacaacctgctggcataatcttttccggttggcccacggagtataatcttaaaatttgatttcatttccaggcattaaaaatcaagagatttcacatggttacatttctgggttccctctaaaaatggaaagatctggaagtaaagaacccatgttccctcatagcaatcattatctgatactggagtagcagctgtcccctttcaatggggtctgctctttttgtttcaccacagtcctcatgactctctgttgcacactcatgccaaagtaaaggtgccctttcctatgaactttgtaacactgtggccttttcttcacacccagcccacgtccctcatatatatcacctgcctgccccagtaggtctatgagtttgaaactggtttgtcagtccttaagctttatcagcttcatccatttctcagggagtaaagaagaaaagagggaaagcgcctaagtagtgatcttccctctgtgtgttagctgaaa

SEQ ID NO: 50524 - DNA, 920 bp, Homo sapiens
aagcagtggtatcaacgcagagtgcccattacggccggggaccctgctttctgcattcttctctccacatccctctctgtacttacagcccccaatggcccccaaaaagccagagcccaagaaggatgatgccaaggcagcccccaaggcagctccagctcccgcacctccccctgagcctgagcgccctaaggaggtcgagtttgatgcttccaagatcaagattgagttcacacctgagcagattgaagagttcaaggaagccttcatgctgttcgaccgcacacccaagtgtgagatgaagatcacctacgggcagtgtggggatgtcctgcgggcgctgggccagaaccccacacaggcagaagtgctccgtgtcctggggaagccaagacaggaagagctcaataccaagatgatggactttgaaactttcctgcctatgctccagcacatttccaagaacaaggacacaggcacctatgaggacttcgtggaggggctgcgggtcttcgacaaggagggcaatggcactgtcatgggtgctgagcttcgccacgtgctggccacgctgggtgagaggctgacagaagacgaagtggagaagttgatggctgggcaagaggactccaatggctgcatcaactatgaagcatttgtgaagcacatcatgtccagctaaacctcgtgcccaggaagcccagggaaggctgtgcagggacgtctcatctcccatgtgtgatgctgacaccagcggcctggagtcgtgggaaggaggggagccttaccaagactcctgcaaaaacccttggacctctccacgtggttgccgtctctggcccctctcaggctgtgcttacctgtgacagcagctctgtccccaccccatgggcctcatgaataaatggcttcttgccggc

SEQ ID NO: 50525 - DNA, 433 bp, Homo sapiens
  misc_feature (31)..(31): n is a, c, g, or t
gggggggggggggggggcatctttgtggtgnaagttctctgctacactgtcatgggtgctgagcttcgccacgtgctggccacgctgggtgagaggctgacagaagacgaagtggagaagttgatggctgggcaagaggactccaatggctgcatcaactatgaagcatttgtgaagcacatcatgtccagctaaacctcgtgcccaggaagcccagggaaggctgtgcagggacgtctcatctcccatgtgtgatgctgacaccagcggcctggagtcgtgggaaggaggggagccttaccaagactcctgcaaaaacccttggacctctccacgtggttgccgtctctggcccctctcaggctgtgcttacctgtgacagcagctctgtccccaccccatgggcctcatgaataaatggcttcttgccggc

SEQ ID NO: 50526 - DNA, 416 bp, Homo sapiens
gtgtggtggattcccggctcgagccggcactgtcatgggtgctgagcttcgccacgtgctggccacgctgggtgagaggctgacagaagacgaagtggagaagttgatggctgggcaagaggactccaatggctgcatcaactatgaagcatttgtgaagcacatcatgtccagctaaacctcgtgcccaggaagcccagggaaggctgtgcagggacgtctcatctcccatgtgtgatgctgacaccagcggcctggagtcgtgggaaggaggggagccttaccaagactcctgcaaaaacccttggacctctccacgtggttgccgtctctggcccctctcaggctgtgcttacctgtgacagcagctctgtccccaccccatgggcctcatgaataaatggcttcttgccggc

SEQ ID NO: 50527 - DNA, 898 bp, Homo sapiens
gggtgaggcggctcacctaccctgctttctgcattcttctctccacatccctctctgtacttacagcccccaatggcccccaaaaagccagagcccaagaaggatgatgccaaggcagcccccaaggcagctccagctcccgcacctccccctgagcctgagcgccctaaggaggtcgagtttgatgcttccaagatcaagattgagttcacacctgagcagattgaagagttcaaggaagccttcatgctgttcgaccgcacacccaagtgtgagatgaagatcacctacgggcagtgtggggatgtcctgcgggcgctgggccagaaccccacacaggcagaagtgctccgtgtcctggggaagccaagacaggaagagctcaataccaagatgatggactttgaaactttcctgcctatgctccagcacatttccaagaacaaggacacaggcacctatgaggacttcgtggaggggctgcgggtcttcgacaaggagggcaatggcactgtcatgggtgctgagcttcgccacgtgctggccacgctgggtgagaggctgacagaagacgaagtggagaagttgatggctgggcaagaggactccaatggctgcatcaactatgaagcatttgtgaagcacatcatgtccagctaaacctcgtgcccaggaagcccagggaaggctgtgcagggacgtctcatctcccatgtgtgatgctgacaccagcggcctggagtcgtgggaaggaggggagccttaccaagactcctgcaaaaacccttggacctctccacgtggttgccgtctctggcccctctcaggctgtgcttacctgtgacagcagctctgtccccaccccatgggcctcatgaataaatggcttcttgccggc

SEQ ID NO: 50528 - DNA, 1027 bp, Homo sapiens
gggtgaggcggctcacctaccctgctttctgcattcttctctccacatccctctctgtacttacagcccccaatggcccccaaaaagccagagcccaagaaggatgatgccaaggcagcccccaaggcagctccagctcccgcacctccccctgagcctgagcgccctaaggaggtcgagtttgatgcttccaagatcaagattgagttcacacctgagcagattgaagagttcaaggaagccttcatgctgttcgaccgcacacccaagtgtgagatgaagatcacctacgggcagtgtggggatgtcctgcgggcgctgggccagaaccccacacaggcagaagtgctccgtgtcctggggaagccaagacaggaagagctcaataccaagatgatggactttgaaactttcctgcctatgctccagcacatttccaagaacaaggacacaggcacctatgaggacttcgtggaggggctgcgggtcttcgacaaggagggcaatggcactgtcatgggtgctgagcttcgccacgtgctggccacgctgggtgagaggctgacagaagacgaagtggagaagttgatggctgggcaagaggactccaatggctgcatcaactatgaagcatttgtgaagcacatcatgtccagctaaacctcgtgcccaggtaggcacccactccctcctgaacccgctgctgccacctgcccacactccaccagctgcagtgctcacttgacatcctgctgcctccgtctccctcctcctctgtaatctgcactgcctttgctctcaggaagcccagggaaggctgtgcagggacgtctcatctcccatgtgtgatgctgacaccagcggcctggagtcgtgggaaggaggggagccttaccaagactcctgcaaaaacccttggacctctccacgtggttgccgtctctggcccctctcaggctgtgcttacctgtgacagcagctctgtccccaccccatgggcctcatgaataaatggcttcttgccggc

SEQ ID NO: 50529 - DNA, 893 bp, Homo sapiens
aagcagtggtatcaacgcagagtgcccattacggccggggaccctgctttctgcattcttctctccacatccctctctgtacttacagcccccaatggcccccaaaaagccagagcccaagaaggatgatgccaaggcagcccccaaggcagctccagctcccgcacctccccctgagcctgagcgccctaaggaggtcgagtttgatgcttccaagatcaagattgagttcacacctgagcagattgaagagttcaaggaagccttcatgctgttcgaccgcacacccaagtgtgagatgaagatcacctacgggcagtgtggggatgtcctgcgggcgctgggccagaaccccacacaggcagaagtgctccgtgtcctggggaagccaagacaggaagagctcaataccaagatgatggactttgaaactttcctgcctatgctccagcacatttccaagaacaaggacacaggcacctatgaggacttcgtggaggggctgcgggtcttcgacaaggagggcaatggcactgtcatgggtgctgagcttcgccacgtgctggccacgctgggtgagaggctgacagaagacgaagtggagaagttgatggctgggcaagaggactccaatggctgcatcaactatgaagcatttgtgaagcacatcatgtccagctaaacctcgtgcccaggtacaggatttctccatgttgcccaggctggatatgaactcgtgactcatgggctcaagcaatcctcctgccttggcctctcaaagtgctgggattacaggtgtgagccaccgcacctggctgccacttggttgttttaaacctgaactcagtggtggctcacacttgactaccaagtgtgatatgtcagaaattcct

SEQ ID NO: 50530 - DNA, 585 bp, Homo sapiens
  misc_feature (579)..(579): n is a, c, g, or t
gggtgaggcggctcacctaccctgctttctgcattcttctctccacatccctctctgtacttacagcccccaatggcccccaaaaagccagagcccaagaaggatgatgccaaggcagcccccaaggcagctccagctcccgcacctccccctgagcctgagcgccctaaggaggtcgagtttgatgcttccaagatcaagattgagttcacacctgagcagattgaagagttcaaggaagccttcatgctgttcgaccgcacacccaagtgtgagatgaagatcacctacgggcagtgtggggatgtcctgcgggcgctgggccagaaccccacacaggcagaagtgctccgtgtcctggggaagccaagacaggaagagctcaataccaagatgatggactttgaaactttcctgcctatgctccagcacatttccaagaacaaggacacaggcacctatgaggacttcgtggaggggctgcgggtcttcgacaaggagggcaatggcactgtcatgggtgctgagcttcgccacgtgctggccacgctgggtgagaggcttgttcaggaaggacgnaagttg

SEQ ID NO: 50531 - DNA, 694 bp, Homo sapiens
tgccttgcaatactgaacatattgtctcatggtattcgccgtttgaacctctcatgtggactgcgtgtccacccacatctgccatcttatacagggggcccacttatttaatgtaaattcactagaactctgtgtatattaaagagattatgaatcgtatttaaaagatgggacatgtggaggaatagttgtctaagttgtagaaaaccacatcagctaaaatgtcttggtgggagttagtgtgatcatagcagagagggagatgggaactagattttcagaagcagagagctggaaactcacgatggaaaaagctggaggggtaggttaggttcaggttagagagccactgaatgctaggtttggaggcttgttttgggataagaaaatagatacataagatcaagcaatttgcccaaagccatctggggagctttggaaagccctgaaaagcagagaaacttaattttgccggagtagttattgagttctcaattaatttaaatggtgaggaactgctcacctaaagccttgaaatgccgatgaatgcttataagaaaatcctgccaatatcctgcttctaacatatcaaccttggtgggctccagccagccctacacttgattcccataagataccccaaaagataaatgagtatgttaattaattccattcatagccttccccactaatc

SEQ ID NO: 50532 - DNA, 429 bp, Homo sapiens
gttaacagacagtgagtgaaaaaataaatatatattttgtcaggcagtgacagatgctatgaagaaaaggacagcagattcagaagatggtgaatgatgaaagtgacgcatgccacttagaggaagtgatcacaaaacgcagcctgatcggatggcatttgaggacagctctaacagaagtgaaaaagcaagctatatagacttctggaaaaagatcatttcaaacagatataatagtaagtgtaaaggctctgaggcagaaagttcttgatagagacaacaacaaaaaaagaaaacagcaggaagtttttcacttgtaaggttagttttgcctggatcttcttctctatttagaccttactggtcctttaaagtatctctcaagtgaaatcccttaaaagaagaaatgcctggtatctctccaaaaag

SEQ ID NO: 50533 - DNA, 454 bp, Homo sapiens
tccacatttcttgaaataagcttgtaccacatttggaactggtattgtggtgggagagaattgggcatttgtgaaagatacttgggtagagtctcccaaggaggtactatatgaacggctggtatgttatccagctcatcatacaaccagttactcgtgggctagtcactacagaatacacagcagaaataaaagacccattttaaaggagaggctgacacaaaagcttgcaggtgttttttcttgtctgtgaatggtcactgcactccagcctggccaacatagcttgactccatctctaaatacacacacacacacacacagacacacatgagttttcctcatgtgaattgatttttttaataatataacttatttcaatctgtatgttttaaaaattgaatgctgaaaattatgttacccacccagagataagtattttaacattttggat

SEQ ID NO: 50534 - DNA, 314 bp, Homo sapiens
  misc_feature (3)..(3): n is a, c, g, or t
  misc_feature (309)..(309): n is a, c, g, or t
ctnctctcacacatatactacagatttggtctgaagaaaggcttaagaaagccatcttctcttagcattggggaaaaacaaaaataaagaattgtttagttgtctagaactctattaaatttgccatgatgtatatgaaaccccgactgagttgctgtcttggcatgatgtcagagagctaaaggagccatggtgatggtacttagactctcaatgctcacacagtcccctctcactttttttaaggctgaaaagatgaaaacaagggaaatggtgcaaagacactaaaattctccatctgcaaaaaanaaaaa

SEQ ID NO: 50535 - DNA, 584 bp, Homo sapiens
gtctgcaccgtctcttttatgcagagcattaggagaggtacatactggaaaagcggcgagcttcacccccaggtgcaggagggcacttgcaggatgggttccggaggaaatgttcagcctccattttgtgattgtctcagtgatggacacagacgatgacgttttggctccataccacgagtgttcgctacaatttgctgcccgtgtcaccagagccagttgctaacacatcagcatttgccactgttcatcctgactgccctgtcagatgtgaggatgttctttcattgcttagtattctggcagaggactttgaaagactcatgtaggccagtgtgcccccgccttccctggggtctggaggtggaattccaagcggtgtttgggcgtgtgtgtgaggacacggggtgggggcagctgtcacagtagtagccggtcttcacagcatgttaaattttttctgttcctaggaatccatattcaggtgtacagtgctttctgcacagacggtggtgtaggaaacacgagaatttcctatagctaaaaatcccaaatgttgcagaggtattgcagctatttctctt

SEQ ID NO: 50536 - DNA, 466 bp, Homo sapiens
gctgagaaaccagcccacaattacacaaagacaaaaaaagggggacccaggtcttctgtaaccacctcataggtctccctggtgccacctgcagcatttctagataccgacaataagggtctccctatccccaactttcagaggtacatagtggaatttcttggcattatttgctgagggtaggaaagtcctaggcaatggagtccagattttagtaagtcagaccccatgtgtgagaaggaaagctggaatcatgggtggtaatccccactttgctgccctgagcgggacctgtgccatttaaaccttggaacgcaactagtgaacaagcgcctatgcagtgcttataacagagttggtgtttccactctaaaattaccacctcttcttatcaaaatttgcaactttcttcccgtgaaaataggcttacagttccttaactggagcaatgatataaaagctacag

SEQ ID NO: 50537 - DNA, 306 bp, Homo sapiens
ccctgcctggccaataagagtgtggtcctggattgagcccttgaactttcacccaatgaggtggtgattggctaaggcaatggtgtcaccggcttcatccccaccagatatcctcagtgtgtatgtggtagtttctcaatcggaagtatgaaaatcaggaacattgcgaaagggagggcaagagctctgagcgattaatatcctgtgaagtgtgagagggaaacttgagctttttactttgcagtaacaaccttggaatggaaagctatttcggtagccaagtgtggaaagtgaacattaaccaaa

SEQ ID NO: 50538 - DNA, 1198 bp, Homo sapiens
  misc_feature (604)..(604): n is a, c, g, or t
  misc_feature (667)..(667): n is a, c, g, or t
  misc_feature (672)..(672): n is a, c, g, or t
agaacccagtctctggggtggtgaggcccacccagtgtggagctcaaaggtgccactgttctgctcctctttataaagggagctgccatggttctcccagcacagagttgggagtgactccagagcctccagcaagatgctactgattctgctgtcggtggccctgctggccctgagctcagctcagagcttaaatgaagatgtcagccaggaagaatctccctccgtaatatcaggaaagccagaaggacgacgcccacaaggaggaaaccagccccaacgtaccccacctcctccaggaaagccagaaggacgacccccacaaggaggcaaccagtcccaaggtcccccacctcgtccaggaaagccagaaggaccacccccacaaggaggaaaccagtcccaaggtcccccacctcgtccgggaaagccagaaggacaacccccacaaggaggaaaccagtcccaaggtcccccacctcgtccgggaaagccagaaggaccacccccacaaggaggaaaccagtcccaaggtcccccgcctcgtccgggaaagccagaaggaccacccccacaaggaggaaaccagtcccaaggtcccccncctcgtccgggaaagccagaaggaccacccccacaaggaggaaaccagtcccaaggtcccccncctcntccgggaaagccagaaggaccacccccacaaggaggaaaccagtcccaaggtcccccacctcgtccgggaaagccagaaggaccacccccacaaggaggaaaccagtcccaaggtcccccacctcgtccaggaaagccagaaggatcaccttcacaaggaggcaacaaacctcaaggtcccccacctcatccaggaaagccacaaggaccacccccacaagaaggtaacaaacctcaacgtccccctcctccaggaaggccacaaggaccacccccaccaggaggcaatccccagcagcctctgccacctcccgctggaaagccccagggaccacctccacctcctcaagggggcagaccacacagacctccccagggacagcctccccagtaatcaaggttcaatgacaggaagtgaacaagaagatgacagtgattcaaatgattcaaatgccatgacattggaagaaggtggtcatagctctacctttaatataccaataaaataaacagcttacaatttctg

SEQ ID NO: 50539 - DNA, 1239 bp, Homo sapiens
  misc_feature (604)..(604): n is a, c, g, or t
  misc_feature (667)..(667): n is a, c, g, or t
  misc_feature (672)..(672): n is a, c, g, or t
agaacccagtctctggggtggtgaggcccacccagtgtggagctcaaaggtgccactgttctgctcctctttataaagggagctgccatggttctcccagcacagagttgggagtgactccagagcctccagcaagatgctactgattctgctgtcggtggccctgctggccctgagctcagctcagagcttaaatgaagatgtcagccaggaagaatctccctccgtaatatcaggaaagccagaaggacgacgcccacaaggaggaaaccagccccaacgtaccccacctcctccaggaaagccagaaggacgacccccacaaggaggcaaccagtcccaaggtcccccacctcgtccaggaaagccagaaggaccacccccacaaggaggaaaccagtcccaaggtcccccacctcgtccgggaaagccagaaggacaacccccacaaggaggaaaccagtcccaaggtcccccacctcgtccgggaaagccagaaggaccacccccacaaggaggaaaccagtcccaaggtcccccgcctcgtccgggaaagccagaaggaccacccccacaaggaggaaaccagtcccaaggtcccccncctcgtccgggaaagccagaaggaccacccccacaaggaggaaaccagtcccaaggtcccccncctcntccgggaaagccagaaggaccacccccacaaggaggaaaccagtcccaaggtcccccacctcgtccgggaaagccagaaggaccacccccacaaggaggaaaccagtcccaaggtcccccacctcgtccaggaaagccagaaggatcaccttcacaaggaggcaacaaacctcaaggtcccccacctcatccaggaaagccacaaggaccacccccacaagaaggtaacaaacctcaacgtccccctcctccaggaaggccacaaggaccacccccaccaggaggcaatccccagcagcctctgccacctcccgctggaaagccccagggaccacctccacctcctcaagggggcagaccacacagacctccccagggacagcctccccagtaatcaaggttcaatgacaggaagtgaacaagaagatgacagtgattcaaatgattcaaatgccatgacattggaagaaggtggtcatagcattgggagatatacctaatgctagatgatgagttagtgggtgcagcacaccagcagtgcacatgtatacatgatctactggatcc

SEQ ID NO: 50540 - DNA, 634 bp, Homo sapiens
agaccccagaacttggtgtctgcctcccatggcaccgggaagggtggaggcaggttagaaaaatatcccctttctcccacagccatcagagcaggactctggctcacaggtgcctttagaagtaccatttcatgtgaaggctacaatgccccattttacaggtggggaaacaaaggccttgagggctagggaagagggcagcctccccaggtggggcaacgcaccagctcctcgaagccgctgtggggctcggcccgctgcttgtagagggcttcccaccccaactccagcatcctctccagctcccgtagagtctcctgctgccacagcctctcatcctgctcccgaaaacctctcctgttccagcagctcctccaccttgtccagcagcctctcctgttcctcctgccacccctcctgttcctgcagcctctcctcctgtctcctgttcaggagactcaacatctgattgttttccacctcagcctggagctgtcttcccacactctccagctccttccttaggtggttggtctcatcttggagctgctccaccttagagggccctgctgggggctctggggccaggggttcagctgagaaaggaagcagacaataagggcctctggataaa

SEQ ID NO: 50541 - DNA, 289 bp, Homo sapiens
atggccatgctcccgccaaggtctctggaaaaaaattcccctttgcctcttcctacttctggtggttaccagcaatttttggcattccttggcttgtagctgtgtcacttcaatttatgcttgtgtcttcacatggctgtcttctctctgtgtgtgtctgtgtctttttctctgaatccgcctctcctttcacttataaaaatcctggtcattgaatttagggtctaccctgatgcagtatgacctcatctttatttgattatttctacaacaccctataccaagtaat

SEQ ID NO: 50542 - DNA, 621 bp, Homo sapiens
aagccacaaagcctccccgagccaccacagccccaacctgggccccctctgccagggccctctcctctttgctccagccacacgtgccttccttggtgcggacaagcctgctcctgcactggggttttgtctgttccttctgtgccttccatccacgacgctgacaccagcctacaccctccaggccccactcagacgttactcctcagaaagacccctggcaacagccccagctggaccagctctcctcccgccactctgcagctggcaggagccatagctgtctcactgggggtggtaacccagtgtcccacacacctgcctcccattgggccctcatacaacatgttagacaacatgtgctgaggctaccgagagagggcaccaagtcacagttggaaaaatgtgccccctgccaacccttcccagaggtttctcagccaaagctatggagtctccacggcccctgcagcacagaagtgcccgagcagtggagcaggctcagcccctgcctggtgtgtgctggtgtgcatcccgagatagctgaggaggaggctgccgaggccactggctcacctcgggcaaccgcaggactttgcagtacttcactccgttccgcag

SEQ ID NO: 50543 - DNA, 420 bp, Homo sapiens
acttattcattactacaaattccccaccacgcagaaaagagaaactgatattttggcacatctctaaatcaccaatttatctaccaaaatttcttctaaaaatgcattcagttctctgcagccatagaggaagagaaatgtttcctactttttttaacccagtaatattcccataactaggccctgaggttctgtttgaaaccactcccaaaatatacagatctgaaaaacttattacacgtgtcaagggaaaacgaaagaatttttaacaaatataccattagacattttttaagtttacatatttatgcctctttgagaatattctcctatctttcaaactctaccaataaaatgcattgtacagttaataaaatggaagttgaaataaataaacatttttttcaagatgacaaaccc

SEQ ID NO: 50544 - DNA, 379 bp, Homo sapiens
ctctatcttcttatcagatttgttaacaatgtctactttttttgttacaaatttataattattataacttggactgggaggttctctgggctgcaccctcatcagtggggggccctcctcgcacactcacagtttgcaggactccgaactgggcccgcgagatctccacctgcgcaaaacgaaagggcggattctccttggactcacgaggcaaccgctccccggggtgagaacgggggactcattcctccggcactgggagaagacgattctttaggaggaggacagggaagcgaatgctacccaggtgcgtaatcacatttgggcaccctcgggggcctgagaggaggccaggggtgacctgcccccattctcacag

SEQ ID NO: 50545 - DNA, 352 bp, Homo sapiens
ccggggccgcgacgcgtctctccagcccgggatccggggagctgggctgtccccagaccgacgggacagcggcatctcctccacctgaaaaggaaagaggaccagtttgcaggactccgaactgggcccgcgagatctccacctgcgcaaaacgaaagggcggattctccttggactcacgaggcaaccgctccccggggtgagaacgggggactcattcctccggcactgggagaagacgattctttaggaggaggacagggaagcgaatgctacccaggtgcgtaatcacatttgggcaccctcgggggcctgagaggaggccaggggtgacctgcccccattctcacag

SEQ ID NO: 50546 - DNA, 103 bp, Homo sapiens
  misc_feature (3)..(5): n is a, c, g, or t
  misc_feature (53)..(53): n is a, c, g, or t
  misc_feature (76)..(76): n is a, c, g, or t
ttnnngaagaaacactgtttcgcaaagttactttgagactatatggtcttttnaagtttggtagcatttccctgtnaaactatctggggattgatactttttg

SEQ ID NO: 50547 - DNA, 374 bp, Homo sapiens
ttgttttatagttatactgttcataaatcatttttccccatttgtgatcaccaagaatggttaaaacaaagctttggtctaaattagcatgcaattgctagacatttttctttcctcttgtggggagactggaaaatatttttgaagtatatatgggtagctacactttgtctgctccaacattagactaggtctagggtgaagtgcagtaaactgcttcccaaggcagagtgaggcttttagaataggaagtcaacatggctcagcaagtaattcacatgcaaatgaacctgcctggaacattttagttagaaaaaaatatgtaattagcagactggaatgtatccaggatcctagattcggttaccacatat

SEQ ID NO: 50548 - DNA, 297 bp, Homo sapiens
gatcattcgcacagcagctccaggtctcccctcgaggcccctggaggaaggaggcacagtacattggatctgtggatgagcagatacattgatgagtggtgcttcagcaagatgacagatctcccagggcagctgaaaacattcaagtgctgaaaaattaaggcatctttttccttgatacttgcaaaacagtttattcatcatattgtttttacttttactaattcctctgaccatgagtgacaggtttatgccattggatgagtgatattgcatcccagagcccagagtccactg

SEQ ID NO: 50549 - DNA, 412 bp, Homo sapiens
acatttgcatattaaaatacacattatgttgttgttgtcagcctttctggaaattacgtttatataggacatatctgtgaattttgtttcaggatggtaaaggaggtggtgttacatttctgtactgctggtgcattgagagacccaagcaagtatcaggcttttcatccgtggaacacatgctccagaaccttctagctgttcacttgtgatggatactctgttagccttcactattgaatgcacttttaaaaatgatcaaaaccaacatttcccacagtatgaaatgtttgcaaaaaaggtatgttgggtttgttagggctagaaattgttattctaagtaaagaaacctggagaattttcctaagccagctaaatttattcgacaacagtacagttttatttgatgcct

SEQ ID NO: 50550 - DNA, 719 bp, Homo sapiens
  misc_feature (549)..(549): n is a, c, g, or t
tggcagactgcaactttgtattacaagctcttatctccatttccacaatgaccaggcagcatctttcaaaagaaataaaaacctaagaaacttcattgatctgtccttttgcaggtggcggtgagggcggacaggacgccatgaaggcctcaggcacactatgagagtacaaggtggtgggtcgctgcctgcccacccccaaatgccatacactacccctctaccacatgcgaatctttgcacctaatcatgtcgtcgccaagtcctgcttttggtacttggtatctcagttaaagaagatgaagaagtcttcaggagagattgctactgtgggcaggtgtttgagaagtgcccctgcgggtgaagaacttcggcatctggctgcactgtgacgcccagagcagcacccacaacatgtgccgggaatatggggacctgaaccaccgcgggtgctgtcacccagtgctaccaagacatgggcgcctggcaccacgcccgggcccactccgtccagatcatgaaggtggaggagaccacagccagcaagtnccgcgccagccgtcaagcagttccatgactccaagatcaaattcctgctgccccactaggtactgcactatccgcacaagccacacttcaccaagaggcccaacaccttcttctaaggcagggccctcacccgggtgtgccccaaataaactcaggaatgccccagtgga

SEQ ID NO: 50551 - DNA, 111 bp, Homo sapiens
catatcaagtaagggggagagttgaggtccccattgagtacaactagtaggtcctagagctgcattagggttcctgtggtgtgctataagctctatgctactgaggctgaa

SEQ ID NO: 50552 - DNA, 403 bp, Homo sapiens
ggctggcgaaggaataaagacatgctcctatctttaaggacatgtcccaaacgttgctcagatcactagccagatctgattgaatccaagtgaggctgggaaagtaatccttatattctgggtggccttgcacttatctgaaaatcagagttctaaaagggaggatgaatattgagagaccatagcctctgccagtgtgcttaatgagtatgccaagaataaaaagtagaacttaaatcccttcatcttccccttcattcaagtgtatattctgctagcaaagtgagacattcatctgtacttttcttgatacttgaagtattttgttagaaccagagtaacaaatccccatggacccaccatccagaatttaacaaatgcttacatcttccttcagatcttt

SEQ ID NO: 50553 - DNA, 258 bp, Homo sapiens
actacttcccagggtctccctagacaagttcggccctcccctgaccccctagtctcttaagcctctcctctggactcatggctgccccctcaggctgggaggactctgaggaaagttacttcccaaagtgtacatattttatcacactaaatcaggccacaggggaagtctctcagcctactctggctcaggaggctgcccaatagaaaacaaacaaacaaaccaataaataagtaataaatcaggccacatggcaac

SEQ ID NO: 50554 - DNA, 430 bp, Homo sapiens
ccagttttattaagaaggtatttaaggccaggtgcagtggctcacatctgtaaaccccccactttgggaggcaggaggattgcttgagtccagaaactcaagaccagattgggtaacatagagagaccctctctctacaaagaattagttgggtgtggtggcacacacctgtagtcctagctacttaggaggctgagtgggaggatcgattgaacacaggaattagaggctgcagtgcagctatgattgcaccactgtcctccagcctgggtgacagagaaagactgtctaaaaataaaataaaataaaataaaataaaaaaggtatttaagacttctaggaagagactagctgattaattcaaattaggtactctccaataaagcatttgaatttgtatgatgagttcagagtctttaaaaacttaaaa

SEQ ID NO: 50555 - DNA, 279 bp, Homo sapiens
gtgagcctgtaatcccagctactggggaggctgaggcaggagaatcgagtgaatccaggaggcagaggtttcagtgagccaagactgtgccattgcactccagcccgggtgacagtacgagaccccatatcgagagaaaaaaaaaatctgagtgatatacggcaatcagccattcagttattctgattgcctaaatatgagatgttctaacagacactgcatgcgaaatctcttttgctgggattacaggcgtgagcaaccgcgccagggacttttttt

SEQ ID NO: 50556 - DNA, 367 bp, Homo sapiens
acctaacacctctgtgggtttatgaggatcagcaaaatagctggtctcttatctagttttttcctaagaaggttgtagagagaaatgcagggtagaaaaataagctatgtctgggtgtggtggcaacctcccaaattcccaaagttggtaaccttgggaagccaaggtaggtggattgcttgagcccaggagttcaagaccagcctggccaatatggtgaaaccttgtctctactaaaaatacaaaaatcagcctggtgtggtggcacatacctgtaatcccagctttttgggaggcttaggcacaagaattgcttcaatctaggaggcagaggttatagtaagctgagatcacactattgcactcc

SEQ ID NO: 50557 - DNA, 307 bp, Homo sapiens
tcgcagtcagaccgagaggatcctccctcacggctcacctcgaatcacactactccccatatctccacaaaaaaataaacaaaattagccaggtgtggtggcgtgcgcctgtggtcccggctactcaggaggctgaggtgggaagagcacttgagctctggaggtcgaggcttcagtgagccatgatctcgcccctgtactctagcctgggcaacagagtaagaccctgtctcaaacaaaaatgggtgaatagagaatgttctaagtcattactttccttgtgttgaggtatccgtatggtgaggca

SEQ ID NO: 50558 - DNA, 503 bp, Homo sapiens
agagaatggctttggtcacaactcagggatcgccacttaggcagacctgcaccctgcctcttgaccttgggaatcgcagtagaacagacagctaaccaatgaaacacatctagaaaacttctagaaaatagtttattaaaacattccaaggctgggcgtggtggctcatgcctatcatcccagcactttgggaggctgaggcggaagggtcacttgagcccaggagtttgagaccagcctagacaacatggcaacccctctccacaaaaaataaacaaaattagccaggtgtggtggcgtgcgcctgtggtcccggctactcaggaggctgaggtgggaagagcacttgagctctggaggtcgaggcttcagtgagccatgatctcgcccctgtactctagcctgggcaacagagtaagaccctgtctcaaacaaaaatgggtgaatagagaatgttctaagtcattactttccttgtgttgaggtatccgtatggtgaggca

SEQ ID NO: 50559 - DNA, 830 bp, Homo sapiens
aacagatactgtgtacctcctgatatgatgcactcagaagaccacagcatctcttctgggagaagataaatttctgcccaaaagatgttaagaattctgaagaactatagttcttcccagctgcattcgcacacaacagactctgaaatcctttttaccttacagagcctgccttggtcatcttcccaggaggaattcatgacaactgggatgcagaagagagcaaatgatctgctgggatggaaactgctcaatggagagtttgtggactgcatgatattccttgaacatcagggatggtacagggataccaatagtctggcctccaagacaggagagtaataggaggaagagcaaatctgtcttcacctgcagtattaatgggtggtgggccagaatggaggaaagcaagtgagtcatgtgctgctacaggttacaccaaactcccatccctctgttactcactgctgttgtcaaagccaaactttatcttgctaatttctcacagcttggcacctaacaaatgacaaggcaggacatccaatgccttcgagctctgtggtctggcctgtctctccagatcagatttagagtgaggtagcagatgacataatattctctttggtgttcaatccgaagaggccaatgcttcagcacaatgtcccctagccatcacccccagcccgactccccaccaagcatcctgcatccctctgccacatcttcattcttttccattctgtcttttccccgataccttctgaccccagggatttctaatagagcataatgatcaagaaaataaagacctggtacataaaaagtctcag

SEQ ID NO: 50560 - DNA, 320 bp, Homo sapiens
gaaatagggacggtgctattgaggatccagacacagttcaaaaagcttaccttcaagtcgggtagcctactcttttgtggactgtgtgtcacactgtaggaggcaggagaatggggatatcctcctaggaagatgtatcagaatctcagcaaagcagacctttcaagctgtctgtgtgttcccactgcacattctgatagacccccctccagggaggttgtcttctcatgtttaccattgcattttgagaatcactgctgctactgaaagatgggagaatgtgacccctgatgcgacccctgtgaatagttaggcgaagg

SEQ ID NO: 50561 - DNA, 192 bp, Homo sapiens
gaggctacaaacatgaggaaacaagtttacaagctaaagctggtggaaaggaaagctagggaaaaagtaggagtctgacagcattactacacagttgaactactgccagcaaccactcacctctagacctcttgctaggtaagaaaaataactccaggttacttaacctctgccaggtttctttcacctgta

SEQ ID NO: 50562 - DNA, 346 bp, Homo sapiens
aagctatttgcgtaattcacagtgcttatgactgaagcatagacttaggagaaagagttgcttcatggttctttagatttgataaagttaggaaaaagttccttccaaaccataaggaagttgtgcaataatatatttagagtttggtaaatttgtttgggggaagggagcattattttgttgagaaagacatgagatgtcctgattcaatatctaagttctagctccagtcctgggagcggtagaggtgcctgcacaccaagctgctccagttattaaggcttctccttgactttttgagaaaagacatattgcaggaattaaacttatccttgctagaagaaca

SEQ ID NO: 50563 - DNA, 555 bp, Homo sapiens
tcccgcagaggcctgggaggctgagggtgaggaaggccagctgtgctggctgcaagagggctttgctgtttctccacagagcagcaggtcgccccttcccttctccctccctccacctcacctccatgggctccactggatgggaaccatgtgcttgttctccccacccctagactgggatctcctggggcagaagaggcttcccaagtggcacagacagagccaggctgactgaatgtgagattcatgaatgaacagtgataccaggcatagccctgccctttagcatcctgagggccacgtggagttttctgcaacactgcccgccgtgttccagcatctgccttccacttgctagggagaggtagaggtgaagtggcccttctttctgtcttggcattcctgtccaccctgcctctagatctccactttccatggccgtaggagaacaggacctctaccctcctcgagtgccgctatagccagcgtgtgctgagcagggcccaggcagccctgagaaggcgccagcatgctctgcctcctctgcactagcag

SEQ ID NO: 50564 - DNA, 344 bp, Homo sapiens
aagtgtttcaggtgggtcaagaacagccctgagccaggcggagttggagagaagctgtagtttttaccaaattgtgtacatctgggcagatgtttaatttctgtgactaatcactgaactagatgaatgttaaattttttatgtctgaagcctgagtctattttggatctgtaaataatcattgccagtgtgacttttgttcaacaaaaggattgtactgtattaagaaccgatgaaaaaaattctcctgtaacatttttttaagaaaactttgtttgtttaaagaaaaagtattgtataaattataatttttatttaaataaacctaaaatgctttgtgctaa

SEQ ID NO: 50565 - DNA, 4376 bp, Homo sapiens
ctggaggcggctcacgcgggttcccaggagctgattgatggattttcaggaattctggaacccgagcgtcatgttagggtgaagcagaggacctcagtgctgaacatgctaaggaggttggacaaaatcaggttcagaggtcacaagagagatgacttcctcgatctagcggagtctccaaatgcctcggacaccgaatgcagcgacgaaatccccctgaaggtaccgcggacctcgccccgggacagcgaggagctgagggaccctgctggtccagggaccctcatcatggccacaggagtccaggactttaaccggacagagtttgatcgactgaatgagatcaaaggtcacctggaaattgccttattggaaaaacatttcttacaggaggagctccggaagctgcgagaagaaaccaacgcggagatgctgcggcaggagctggaccgcgagcggcagcggcggatggagctggagcagaaggtgcaggaggtgctgaaggccagaaccgaggagcagatggctcagcagcccccaaaagggcaggcccaggccagcaatggagcagagcgccggagccaggggctgtcctcgcgcctgcagaagtggttctacgagcggttcggggagtacgtggaggacttccggttccagcccgaggagaacactgtggagacagaggaacccctgagcgcccgcaggttaactgaaaatatgagacggctcaagcgcggtgccaagccggtcactaactttgtgaagaacctctctgccttatccgactggtactccgtctacacgtctgccattgccttcaccgtgtacatgaatgccgtgtggcatggctgggccatcccattgttcttatttctagcaattctgaggttatccctcaattacctcatcgccagggggtggcggatacagtggagcatcgtgcccgaagtgtctgagcccgtggaacctccaaaggaagacctgactgtgtctgagaagttccagctggtgctggacgtcgcccagaaagcccagaaccttttcgggaagatggctgacatcctggagaagatcaagaacttgttcatgtgggtccagccggagatcacacagaagctgtatgtggcgctctgggctgccttcctggcctcctgcttcttcccctaccgcctggtggggcttgccgtgggactctatgctggtatcaagttcttcctcattgatttcatctttaaacgctgcccgaggctgcgcgccaagtacgacacgccctatatcatctggaggagtctccccaccgacccgcagctcaaggagcgctccagcgccgcagtctcacgcaggctgcagacgacctcgtcacggagctacgtacccagcgcaccggccggcctgggtaaagaggaggacgccggtcgcttccacagcaccaagaagggcaatttccacgagatcttcaatctgacagaaaacgagcgtccgctggcggtgtgcgagaatggctggcgctgctgcctcatcaacagggaccggaagatgcccacggactacatcaggaacggggtgctctacgtcacggagaattacttgtgcttcgaaagctccaaatctgggtcctcaaagaggaacaaagtcatcaagctagtggacatcacggacatccagaagtacaaggtcctgtctgtcctcccaggctcaggcatggggattgccgtgtcgacgccatccacccagaaaccgctcgtgtttggtgccatggtgcacagggatgaggccttcgagaccattctcagccagtacatcaagatcacctcagcggcagcgtctggcggggacagctagtattgacttgcccaggacgttgctggaattttctttttctttttctttttctttttttttttttacgatttggtagtggaaacaattggacatcctcatgagcttttgcaataattctcctggacctgtggttctattgtgttgacctctgcgttttatcgaccaagaaggggccagggctcacagggacgggggtgcccctctcccacagggcacgtcaggtgcctctgagggccacccgcagactgggggagggggcagaggccctcgggggcccgtggagaagacacacaggacccctggccctgcccttctccgttccagcctggacagagaaacctctccagccaccccaagaggttctcgcaaccttgtgtcccgctctccagaggccagaagctcgtccaccaccaaagccatagctgaagagtgcggggcccttcctcctggggacagaaagatgtcgtcaaggagggacatgggggcctttcaccaaccaccgagaaacgggcctggcggccctccttcctcttacatgagaccctcctgtggcatttgcccttggtgccgggctggggccgggcgcagtgaccctgcctgcgctccacactcgctccacgggaacagagagggtgagaagggcccacccctcgcctgccctcagtgtctttggtggcaccttccttgctggcctccagggcgctcagcaccgcgtctgtaagggcctgcctgctgctctcggcctgacacgccggccaggaggtctgtagctggggaccagtaagggcacaggatggtgcaggtaaaagcacatctttctcacactttgctctttggaaggcccaggagaacatccgcgaaggctgttggaggtgctccgagcactgtggcatgtctggcacatggcccccaggctgcggttgcctgggttggttgggggaggaagtggggaggagtgttccgggaccatggtggcccaggctgcagccgcctttgggccatccgagaggctctggcagcccctgtgctttagggagcaaccgtgagccgagcccagaggcctgggcctgcactgcctgcagccgacatgcgacagcgttccctcccccgcgtgcctagccggtgccggtccgggcacagacccccccagcccccgccctgccccagggaagcctgggcttcccgggaacaaggtggcatttgtggagggagcgcccgcaggcctggtctgctggggccgcctgcgctgggctgaagggagggaaaggcggcttgggcctcctggaaggaggtggccaccccgcgggcctgcgtgtctgctggggcggatcccgcagctccctcagcttgtcctgagtcccttgggtgtcgttgagattgttgttttttgaagaaacagaagattctattttttacagcgagcaagctggttttcttatttttgtatcctttttcagatgtaatttttatctttgctccgatcctcatttgctggtgtgggtgagggatccggcggcatgggctggtttcacccccttcacgaggggccgcagagtcacacgctggtgccgggggtgctttggggggagctgcgccgatcaccagattaagcacatgtcctatcccaggcggtggagcggagcccccgtggctctggactgcgcggacgttggcgtcaggatgaccacacggcggcctttcccgaatggggacagaacccgctctgagccgtgggtctggctcctgtaggggactggctctcttggtgcaccaggggagggggacatatcccagtgaaccccaccttggcgcctgaggcaacacagggtgggcactgacccacccccaggggcggctgcagaggcagtgcccgcagacaatggccacacctctctccccagggcccggcagtgcccaaggatgggtccggggcctcggggccaatgagcgcctcttcctaggtgctgggattcagtccccaaacacagcgggaggggtccctggggcagatggggctttaccagcgtcgggtggtttagttcgagtcccttttgtggagaaagggagatgaaaactgaccacgtgccaggtgtggccgaagcccccagggagggccacattcggggagcggggggtcgggggagggccaccgactggctctgctgccagcacaggcccctccctggaagtcctcgggagcggagcgcggatcggcacgggctctgggctccccgtggagagaagctgtagtttttaccaaattgtgtacatctgggcagatgtttaatttctgtgactaatcactgaactagatgaatgttaaattttttatgtctgaagcctgagtctattttggatctgtaaataatcattgccagtgtgacttttgttcaacaaaaggattgtactgtattaagaaccgatgaaaaaaattctcctgtaacatttttttaagaaaactttgtttgtttaaagaaaaagtattgtataaattataatttttatttaaataaacctaaaatgctttgtgctaa

SEQ ID NO: 50566 - DNA, 4344 bp, Homo sapiens
gtggggagggcggatccaggtctggagtctttggattgaaaggttggagatgcctgtgggactcccaagggaacccgagcgtcatgttagggtgaagcagaggacctcagtgctgaacatgctaaggaggttggacaaaatcaggttcagaggtcacaagagagatgacttcctcgatctagcggagtctccaaatgcctcggacaccgaatgcagcgacgaaatccccctgaaggctggtccagggaccctcatcatggccacaggagtccaggactttaaccggacagagtttgatcgactgaatgagatcaaaggtcacctggaaattgccttattggaaaaacatttcttacaggaggagctccggaagctgcgagaagaaaccaacgcggagatgctgcggcaggagctggaccgcgagcggcagcggcggatggagctggagcagaaggtgcaggaggtgctgaaggccagaaccgaggagcagatggctcagcagcccccaaaagggcaggcccaggccagcaatggagcagagcgccggagccaggggctgtcctcgcgcctgcagaagtggttctacgagcggttcggggagtacgtggaggacttccggttccagcccgaggagaacactgtggagacagaggaacccctgagcgcccgcaggttaactgaaaatatgagacggctcaagcgcggtgccaagccggtcactaactttgtgaagaacctctctgccttatccgactggtactccgtctacacgtctgccattgccttcaccgtgtacatgaatgccgtgtggcatggctgggccatcccattgttcttatttctagcaattctgaggttatccctcaattacctcatcgccagggggtggcggatacagtggagcatcgtgcccgaagtgtctgagcccgtggaacctccaaaggaagacctgactgtgtctgagaagttccagctggtgctggacgtcgcccagaaagcccagaaccttttcgggaagatggctgacatcctggagaagatcaagaacttgttcatgtgggtccagccggagatcacacagaagctgtatgtggcgctctgggctgccttcctggcctcctgcttcttcccctaccgcctggtggggcttgccgtgggactctatgctggtatcaagttcttcctcattgatttcatctttaaacgctgcccgaggctgcgcgccaagtacgacacgccctatatcatctggaggagtctccccaccgacccgcagctcaaggagcgctccagcgccgcagtctcacgcaggctgcagacgacctcgtcacggagctacgtacccagcgcaccggccggcctgggtaaagaggaggacgccggtcgcttccacagcaccaagaagggcaatttccacgagatcttcaatctgacagaaaacgagcgtccgctggcggtgtgcgagaatggctggcgctgctgcctcatcaacagggaccggaagatgcccacggactacatcaggaacggggtgctctacgtcacggagaattacttgtgcttcgaaagctccaaatctgggtcctcaaagaggaacaaagtcatcaagctagtggacatcacggacatccagaagtacaaggtcctgtctgtcctcccaggctcaggcatggggattgccgtgtcgacgccatccacccagaaaccgctcgtgtttggtgccatggtgcacagggatgaggccttcgagaccattctcagccagtacatcaagatcacctcagcggcagcgtctggcggggacagctagtattgacttgcccaggacgttgctggaattttctttttctttttctttttctttttttttttttacgatttggtagtggaaacaattggacatcctcatgagcttttgcaataattctcctggacctgtggttctattgtgttgacctctgcgttttatcgaccaagaaggggccagggctcacagggacgggggtgcccctctcccacagggcacgtcaggtgcctctgagggccacccgcagactgggggagggggcagaggccctcgggggcccgtggagaagacacacaggacccctggccctgcccttctccgttccagcctggacagagaaacctctccagccaccccaagaggttctcgcaaccttgtgtcccgctctccagaggccagaagctcgtccaccaccaaagccatagctgaagagtgcggggcccttcctcctggggacagaaagatgtcgtcaaggagggacatgggggcctttcaccaaccaccgagaaacgggcctggcggccctccttcctcttacatgagaccctcctgtggcatttgcccttggtgccgggctggggccgggcgcagtgaccctgcctgcgctccacactcgctccacgggaacagagagggtgagaagggcccacccctcgcctgccctcagtgtctttggtggcaccttccttgctggcctccagggcgctcagcaccgcgtctgtaagggcctgcctgctgctctcggcctgacacgccggccaggaggtctgtagctggggaccagtaagggcacaggatggtgcaggtaaaagcacatctttctcacactttgctctttggaaggcccaggagaacatccgcgaaggctgttggaggtgctccgagcactgtggcatgtctggcacatggcccccaggctgcggttgcctgggttggttgggggaggaagtggggaggagtgttccgggaccatggtggcccaggctgcagccgcctttgggccatccgagaggctctggcagcccctgtgctttagggagcaaccgtgagccgagcccagaggcctgggcctgcactgcctgcagccgacatgcgacagcgttccctcccccgcgtgcctagccggtgccggtccgggcacagacccccccagcccccgccctgccccagggaagcctgggcttcccgggaacaaggtggcatttgtggagggagcgcccgcaggcctggtctgctggggccgcctgcgctgggctgaagggagggaaaggcggcttgggcctcctggaaggaggtggccaccccgcgggcctgcgtgtctgctggggcggatcccgcagctccctcagcttgtcctgagtcccttgggtgtcgttgagattgttgttttttgaagaaacagaagattctattttttacagcgagcaagctggttttcttatttttgtatcctttttcagatgtaatttttatctttgctccgatcctcatttgctggtgtgggtgagggatccggcggcatgggctggtttcacccccttcacgaggggccgcagagtcacacgctggtgccgggggtgctttggggggagctgcgccgatcaccagattaagcacatgtcctatcccaggcggtggagcggagcccccgtggctctggactgcgcggacgttggcgtcaggatgaccacacggcggcctttcccgaatggggacagaacccgctctgagccgtgggtctggctcctgtaggggactggctctcttggtgcaccaggggagggggacatatcccagtgaaccccaccttggcgcctgaggcaacacagggtgggcactgacccacccccaggggcggctgcagaggcagtgcccgcagacaatggccacacctctctccccagggcccggcagtgcccaaggatgggtccggggcctcggggccaatgagcgcctcttcctaggtgctgggattcagtccccaaacacagcgggaggggtccctggggcagatggggctttaccagcgtcgggtggtttagttcgagtcccttttgtggagaaagggagatgaaaactgaccacgtgccaggtgtggccgaagcccccagggagggccacattcggggagcggggggtcgggggagggccaccgactggctctgctgccagcacaggcccctccctggaagtcctcgggagcggagcgcggatcggcacgggctctgggctccccgtggagagaagctgtagtttttaccaaattgtgtacatctgggcagatgtttaatttctgtgactaatcactgaactagatgaatgttaaattttttatgtctgaagcctgagtctattttggatctgtaaataatcattgccagtgtgacttttgttcaacaaaaggattgtactgtattaagaaccgatgaaaaaaattctcctgtaacatttttttaagaaaactttgtttgtttaaagaaaaagtattgtataaattataatttttatttaaataaacctaaaatgctttgtgctaa

SEQ ID NO: 50567 - DNA, 4328 bp, Homo sapiens
ccccaactcctcgcaaccatcctcctgggctggtccagggaccctcatcatggccacaggagtccaggactttaaccggacagagtttgatcgactgaatgagatcaaaggtcacctggaaattgccttattggaaaaacatttcttacaggaggagctccggaagctgcgagaagaaaccaacgcggagatgctgcggcaggagctggaccgcgagcggcagcggcggatggagctggagcagaaggtgcaggaggtgctgaaggccagaaccgaggagcagatggctcagcagcccccaaaagggcaggcccaggccagcaatggagcagagcgccggagccaggggctgtcctcgcgcctgcagaagtggttctacgagcggttcggggagtacgtggaggacttccggttccagcccgaggagaacactgtggagacagaggaacccctgagcgcccgcaggttaactgaaaatatgagacggctcaagcgcggtgccaagccggtcactaactttgtgaagaacctctctgccttatccgactggtactccgtctacacgtctgccattgccttcaccgtgtacatgaatgccgtgtggcatggctgggccatcccattgttcttatttctagcaattctgaggttatccctcaattacctcatcgccagggggtggcggatacagtggagcatcgtgcccgaagtgtctgagcccgtggaacctccaaaggaagacctgactgtgtctgagaagttccagctggtgctggacgtcgcccagaaagcccagaaccttttcgggaagatggctgacatcctggagaagatcaagaacttgttcatgtgggtccagccggagatcacacagaagctgtatgtggcgctctgggctgccttcctggcctcctgcttcttcccctaccgcctggtggggcttgccgtgggactctatgctggtatcaagttcttcctcattgatttcatctttaaacgctgcccgaggctgcgcgccaagtacgacacgccctatatcatctggaggagtctccccaccgacccgcagctcaaggagcgctccagcgccgcagtctcacgcaggctgcagacgacctcgtcacggagctacgtacccagcgcaccggccggcctgggtaaagaggaggacgccggtcgcttccacagcaccaagaagggcaatttccacgagatcttcaatctgacagaaaacgagcgtccgctggcggtgtgcgagaatggctggcgctgctgcctcatcaacagggaccggaagatgcccacggactacatcaggaacggggtgctctacgtcacggagaattacttgtgcttcgaaagctccaaatctgggtcctcaaagaggaacaaagtcatcaagctagtggacatcacggacatccagaagtacaaggtcctgtctgtcctcccaggctcaggcatggggattgccgtgtcgacgccatccacccagaaaccgctcgtgtttggtgccatggtgcacagggatgaggccttcgagaccattctcagccagtacatcaagatcacctcagcggcagcgtctggcggggacagctagtattgacttgcccaggacgttgctggaattttctttttctttttctttttctttttttttttttacgatttggtagtggaaacaattggacatcctcatgagcttttgcaataattctcctggacctgtggttctattgtgttgacctctgcgttttatcgaccaagaaggggccagggctcacagggacgggggtgcccctctcccacagggcacgtcaggtgcctctgagggccacccgcagactgggggagggggcagaggccctcgggggcccgtggagaagacacacaggacccctggccctgcccttctccgttccagcctggacagagaaacctctccagccaccccaagaggttctcgcaaccttgtgtcccgctctccagaggccagaagctcgtccaccaccaaagccatagctgaagagtgcggggcccttcctcctggggacagaaagatgtcgtcaaggagggacatgggggcctttcaccaaccaccgagaaacgggcctggcggccctccttcctcttacatgagaccctcctgtggcatttgcccttggtgccgggctggggccgggcgcagtgaccctgcctgcgctccacactcgctccacgggaacagagagggtgagaagggcccacccctcgcctgccctcagtgtctttggtggcaccttccttgctggcctccagggcgctcagcaccgcgtctgtaagggcctgcctgctgctctcggcctgacacgccggccaggaggtctgtagctggggaccagtaagggcacaggatggtgcaggtaaaagcacatctttctcacactttgctctttggaaggcccaggagaacatccgcgaaggctgttggaggtgctccgagcactgtggcatgtctggcacatggcccccaggctgcggttgcctgggttggttgggggaggaagtggggaggagtgttccgggaccatggtggcccaggctgcagccgcctttgggccatccgagaggctctggcagcccctgtgctttagggagcaaccgtgagccgagcccagaggcctgggcctgcactgcctgcagccgacatgcgacagcgttccctcccccgcgtgcctagccggtgccggtccgggcacagacccccccagcccccgccctgccccagggaagcctgggcttcccgggaacaaggtggcatttgtggagggagcgcccgcaggcctggtctgctggggccgcctgcgctgggctgaagggagggaaaggcggcttgggcctcctggaaggaggtggccaccccgcgggcctgcgtgtctgctggggcggatcccgcagctccctcagcttgtcctgagtcccttgggtgtcgttgagattgttgttttttgaagaaacagaagattctattttttacagcgagcaagctggttttcttatttttgtatcctttttcagatgtaatttttatctttgctccgatcctcatttgctggtgtgggtgagggatccggcggcatgggctggtttcacccccttcacgaggggccgcagagtcacacgctggtgccgggggtgctttggggggagctgcgccgatcaccagattaagcacatgtcctatcccaggcggtggagcggagcccccgtggctctggactgcgcggacgttggcgtcaggatgaccacacggcggcctttcccgaatggggacagaacccgctctgagccgtgggtctggctcctgtaggggactggctctcttggtgcaccaggggagggggacatatcccagtgaaccccaccttggcgcctgaggcaacacagggtgggcactgacccacccccaggggcggctgcagaggcagtgcccgcagacaatggccacacctctctccccagggcccggcagtgcccaaggatgggtccggggcctcggggccaatgagcgcctcttcctaggtgctgggattcagtccccaaacacagcgggaggggtccctggggcagatggggctttaccagcgtcgggtggtttagttcgagtcccttttgtggagaaagggagatgaaaactgaccacgtgccaggtgtggccgaagcccccagggagggccacattcggggagcggggggtcgggggagggccaccgactggctctgctgccagcacaggcccctccctggaagtcctcgggagcggagcgcggatcggcacgggctctgggctccccgtggagagaagctgtagtttttaccaaattgtgtacatctgggcagatgtttaatttctgtgactaatcactgaactagatgaatgttaaattttttatgtctgaagcctgagtctattttggatctgtaaataatcattgccagtgtgacttttgttcaacaaaaggattgtactgtattaagaaccgatgaaaaaaattctcctgtaacatttttttaagaaaactttgtttgtttaaagaaaaagtattgtataaattataatttttatttaaataaacctaaaatgctttgtgctaaaaaaaaaaaaacaaaacatcacaacaaaaacaaggcgggggggcgcaaaaaaatcccccgggggcccagataggccccccgttttttggtcaaggggccccaagggggcgaataagagcagggccgggcgggtaacacgcggggggaaaaggcgctgggccggagggccctctggggggcgggccacccag

SEQ ID NO: 50568 - DNA, 1781 bp, Homo sapiens
ccccaactcctcgcaaccatcctcctgggctggtccagggaccctcatcatggccacaggagtccaggactttaaccggacagagtttgatcgactgaatgagatcaaaggtcacctggaaattgccttattggaaaaacatttcttacaggaggagctccggaagctgcgagaagaaaccaacgcggagatgctgcggcaggagctggaccgcgagcggcagcggcggatggagctggagcagaaggtgcaggaggtgctgaaggccagaaccgaggagcagatggctcagcagcccccaaaagggcaggcccaggccagcaatggagcagagcgccggagccaggggctgtcctcgcgcctgcagaagtggttctacgagcggttcggggagtacgtggaggacttccggttccagcccgaggagaacactgtggagacagaggaacccctgagcgcccgcaggttaactgaaaatatgagacggctcaagcgcggtgccaagccggtcactaactttgtgaagaacctctctgccttatccgactggtactccgtctacacgtctgccattgccttcaccgtgtacatgaatgccgtgtggcatggctgggccatcccattgttcttatttctagcaattctgaggttatccctcaattacctcatcgccagggggtggcggatacagtggagcatcgtgcccgaagtgtctgagcccgtggaacctccaaaggaagacctgactgtgtctgagaagttccagctggtgctggacgtcgcccagaaagcccagaaccttttcgggaagatggctgacatcctggagaagatcaagaacttgttcatgtgggtccagccggagatcacacagaagctgtatgtggcgctctgggctgccttcctggcctcctgcttcttcccctaccgcctggtggggcttgccgtgggactctatgctggtatcaagttcttcctcattgatttcatctttaaacgctgcccgaggctgcgcgccaagtacgacacgccctatatcatctggaggagtctccccaccgacccgcagctcaaggagcgctccagcgccgcagtctcacgcaggctgcagacgacctcgtcacggagctacgtacccagcgcaccggccggcctgggtaaagaggaggacgccggtcgcttccacagcaccaagaagggcaatttccacgagatcttcaatctgacagaaaacgagcgtccgctggcggtgtgcgagaatggctggcgctgctgcctcatcaacagggaccggaagatgcccacggactacatcaggaacggggtgctctacgtcacggagaattacttgtgcttcgaaagctccaaatctgggtcctcaaagaggaacaaagtcatcaagctagtggacatcacggacatccagaaggtaaatcatcatcataggagtgtggaagctgctggtacaaaatgagtcaggggaggccgtgaagaagctctcgaagacctgcctgtagcagaactcaccccagaaccctcgggactgcgacgagggcgcccgcccagtgacggccactcctgcggtgaacagtactgcctcctgccaggagctgctgtgacctgtgaacttcgttctagagcagcttacatggacttctttgccttttaaagtgttgcctttgtcgcgaacaccccccaaaatgccttccagtgtagcacgcatatcctgactgcaatccccttgctgttcctgaataaactctttcttaggagaacactct

SEQ ID NO: 50569 - DNA, 4389 bp, Homo sapiens
gtggggagggcggatccaggtctggagtctttggattgaaaggttggagatgcctgtgggactcccaagggaacccgagcgtcatgttagggtgaagcagaggacctcagtgctgaacatgctaaggaggttggacaaaatcaggttcagaggtcacaagagagatgacttcctcgatctagcggagtctccaaatgcctcggacaccgaatgcagcgacgaaatccccctgaaggtaccgcggacctcgccccgggacagcgaggagctgagggaccctgctggtccagggaccctcatcatggccacaggagtccaggactttaaccggacagagtttgatcgactgaatgagatcaaaggtcacctggaaattgccttattggaaaaacatttcttacaggaggagctccggaagctgcgagaagaaaccaacgcggagatgctgcggcaggagctggaccgcgagcggcagcggcggatggagctggagcagaaggtgcaggaggtgctgaaggccagaaccgaggagcagatggctcagcagcccccaaaagggcaggcccaggccagcaatggagcagagcgccggagccaggggctgtcctcgcgcctgcagaagtggttctacgagcggttcggggagtacgtggaggacttccggttccagcccgaggagaacactgtggagacagaggaacccctgagcgcccgcaggttaactgaaaatatgagacggctcaagcgcggtgccaagccggtcactaactttgtgaagaacctctctgccttatccgactggtactccgtctacacgtctgccattgccttcaccgtgtacatgaatgccgtgtggcatggctgggccatcccattgttcttatttctagcaattctgaggttatccctcaattacctcatcgccagggggtggcggatacagtggagcatcgtgcccgaagtgtctgagcccgtggaacctccaaaggaagacctgactgtgtctgagaagttccagctggtgctggacgtcgcccagaaagcccagaaccttttcgggaagatggctgacatcctggagaagatcaagaacttgttcatgtgggtccagccggagatcacacagaagctgtatgtggcgctctgggctgccttcctggcctcctgcttcttcccctaccgcctggtggggcttgccgtgggactctatgctggtatcaagttcttcctcattgatttcatctttaaacgctgcccgaggctgcgcgccaagtacgacacgccctatatcatctggaggagtctccccaccgacccgcagctcaaggagcgctccagcgccgcagtctcacgcaggctgcagacgacctcgtcacggagctacgtacccagcgcaccggccggcctgggtaaagaggaggacgccggtcgcttccacagcaccaagaagggcaatttccacgagatcttcaatctgacagaaaacgagcgtccgctggcggtgtgcgagaatggctggcgctgctgcctcatcaacagggaccggaagatgcccacggactacatcaggaacggggtgctctacgtcacggagaattacttgtgcttcgaaagctccaaatctgggtcctcaaagaggaacaaagtcatcaagctagtggacatcacggacatccagaagtacaaggtcctgtctgtcctcccaggctcaggcatggggattgccgtgtcgacgccatccacccagaaaccgctcgtgtttggtgccatggtgcacagggatgaggccttcgagaccattctcagccagtacatcaagatcacctcagcggcagcgtctggcggggacagctagtattgacttgcccaggacgttgctggaattttctttttctttttctttttctttttttttttttacgatttggtagtggaaacaattggacatcctcatgagcttttgcaataattctcctggacctgtggttctattgtgttgacctctgcgttttatcgaccaagaaggggccagggctcacagggacgggggtgcccctctcccacagggcacgtcaggtgcctctgagggccacccgcagactgggggagggggcagaggccctcgggggcccgtggagaagacacacaggacccctggccctgcccttctccgttccagcctggacagagaaacctctccagccaccccaagaggttctcgcaaccttgtgtcccgctctccagaggccagaagctcgtccaccaccaaagccatagctgaagagtgcggggcccttcctcctggggacagaaagatgtcgtcaaggagggacatgggggcctttcaccaaccaccgagaaacgggcctggcggccctccttcctcttacatgagaccctcctgtggcatttgcccttggtgccgggctggggccgggcgcagtgaccctgcctgcgctccacactcgctccacgggaacagagagggtgagaagggcccacccctcgcctgccctcagtgtctttggtggcaccttccttgctggcctccagggcgctcagcaccgcgtctgtaagggcctgcctgctgctctcggcctgacacgccggccaggaggtctgtagctggggaccagtaagggcacaggatggtgcaggtaaaagcacatctttctcacactttgctctttggaaggcccaggagaacatccgcgaaggctgttggaggtgctccgagcactgtggcatgtctggcacatggcccccaggctgcggttgcctgggttggttgggggaggaagtggggaggagtgttccgggaccatggtggcccaggctgcagccgcctttgggccatccgagaggctctggcagcccctgtgctttagggagcaaccgtgagccgagcccagaggcctgggcctgcactgcctgcagccgacatgcgacagcgttccctcccccgcgtgcctagccggtgccggtccgggcacagacccccccagcccccgccctgccccagggaagcctgggcttcccgggaacaaggtggcatttgtggagggagcgcccgcaggcctggtctgctggggccgcctgcgctgggctgaagggagggaaaggcggcttgggcctcctggaaggaggtggccaccccgcgggcctgcgtgtctgctggggcggatcccgcagctccctcagcttgtcctgagtcccttgggtgtcgttgagattgttgttttttgaagaaacagaagattctattttttacagcgagcaagctggttttcttatttttgtatcctttttcagatgtaatttttatctttgctccgatcctcatttgctggtgtgggtgagggatccggcggcatgggctggtttcacccccttcacgaggggccgcagagtcacacgctggtgccgggggtgctttggggggagctgcgccgatcaccagattaagcacatgtcctatcccaggcggtggagcggagcccccgtggctctggactgcgcggacgttggcgtcaggatgaccacacggcggcctttcccgaatggggacagaacccgctctgagccgtgggtctggctcctgtaggggactggctctcttggtgcaccaggggagggggacatatcccagtgaaccccaccttggcgcctgaggcaacacagggtgggcactgacccacccccaggggcggctgcagaggcagtgcccgcagacaatggccacacctctctccccagggcccggcagtgcccaaggatgggtccggggcctcggggccaatgagcgcctcttcctaggtgctgggattcagtccccaaacacagcgggaggggtccctggggcagatggggctttaccagcgtcgggtggtttagttcgagtcccttttgtggagaaagggagatgaaaactgaccacgtgccaggtgtggccgaagcccccagggagggccacattcggggagcggggggtcgggggagggccaccgactggctctgctgccagcacaggcccctccctggaagtcctcgggagcggagcgcggatcggcacgggctctgggctccccgtggagagaagctgtagtttttaccaaattgtgtacatctgggcagatgtttaatttctgtgactaatcactgaactagatgaatgttaaattttttatgtctgaagcctgagtctattttggatctgtaaataatcattgccagtgtgacttttgttcaacaaaaggattgtactgtattaagaaccgatgaaaaaaattctcctgtaacatttttttaagaaaactttgtttgtttaaagaaaaagtattgtataaattataatttttatttaaataaacctaaaatgctttgtgctaa

SEQ ID NO: 50570 - DNA, 4137 bp, Homo sapiens
ccccaactcctcgcaaccatcctcctgggctggtccagggaccctcatcatggccacaggagtccaggactttaaccggacagagtttgatcgactgaatgagatcaaaggtcacctggaaattgccttattggaaaaacatttcttacaggaggagctccggaagctgcgagaagaaaccaacgcggagatgctgcggcaggagctggaccgcgagcggcagcggcggatggagctggagcagaaggtgcaggaggtgctgaaggccagaaccgaggagcagatggctcagcagcccccaaaagggcaggcccaggccagcaatggagcagagcgccggagccaggggctgtcctcgcgcctgcagaagtggttctacgagcggttcggggagtacgtggaggacttccggttccagcccgaggagaacactgtggagacagaggaacccctgagcgcccgcaggttaactgaaaatatgagacggctcaagcgcggtgccaagccggtcactaactttgtgaagaacctctctgccttatccgactggtactccgtctacacgtctgccattgccttcaccgtgtacatgaatgccgtgtggcatggctgggccatcccattgttcttatttctagcaattctgaggttatccctcaattacctcatcgccagggggtggcggatacagtggagcatcgtgcccgaagtgtctgagcccgtggaacctccaaaggaagacctgactgtgtctgagaagttccagctggtgctggacgtcgcccagaaagcccagaaccttttcgggaagatggctgacatcctggagaagatcaagaacttgttcatgtgggtccagccggagatcacacagaagctgtatgtggcgctctgggctgccttcctggcctcctgcttcttcccctaccgcctggtggggcttgccgtgggactctatgctggtatcaagttcttcctcattgatttcatctttaaacgctgcccgaggctgcgcgccaagtacgacacgccctatatcatctggaggagtctccccaccgacccgcagctcaaggagcgctccagcgccgcagtctcacgcaggctgcagacgacctcgtcacggagctacgtacccagcgcaccggccggcctgggtaaagaggaggacgccggtcgcttccacagcaccaagaagggcaatttccacgagatcttcaatctgacagaaaacgagcgtccgctggcggtgtgcgagaatggctggcgctgctgcctcatcaacagggaccggaagatgcccacggactacatcaggaacggggtgctctacgtcacggagaattacttgtgcttcgaaagctccaaatctgggtcctcaaagaggaacaaagtcatcaagctagtggacatcacggacatccagaagtacaaggtcctgtctgtcctcccaggctcaggcatggggattgccgtgtcgacgccatccacccagaaaccgctcgtgtttggtgccatggtgcacagggatgaggccttcgagaccattctcagccagtacatcaagatcacctcagcggcagcgtctggcggggacagctagtattgacttgcccaggacgttgctggaattttctttttctttttctttttctttttttttttttacgatttggtagtggaaacaattggacatcctcatgagcttttgcaataattctcctggacctgtggttctattgtgttgacctctgcgttttatcgaccaagaaggggccagggctcacagggacgggggtgcccctctcccacagggcacgtcaggtgcctctgagggccacccgcagactgggggagggggcagaggccctcgggggcccgtggagaagacacacaggacccctggccctgcccttctccgttccagcctggacagagaaacctctccagccaccccaagaggttctcgcaaccttgtgtcccgctctccagaggccagaagctcgtccaccaccaaagccatagctgaagagtgcggggcccttcctcctggggacagaaagatgtcgtcaaggagggacatgggggcctttcaccaaccaccgagaaacgggcctggcggccctccttcctcttacatgagaccctcctgtggcatttgcccttggtgccgggctggggccgggcgcagtgaccctgcctgcgctccacactcgctccacgggaacagagagggtgagaagggcccacccctcgcctgccctcagtgtctttggtggcaccttccttgctggcctccagggcgctcagcaccgcgtctgtaagggcctgcctgctgctctcggcctgacacgccggccaggaggtctgtagctggggaccagtaagggcacaggatggtgcaggtaaaagcacatctttctcacactttgctctttggaaggcccaggagaacatccgcgaaggctgttggaggtgctccgagcactgtggcatgtctggcacatggcccccaggctgcggttgcctgggttggttgggggaggaagtggggaggagtgttccgggaccatggtggcccaggctgcagccgcctttgggccatccgagaggctctggcagcccctgtgctttagggagcaaccgtgagccgagcccagaggcctgggcctgcactgcctgcagccgacatgcgacagcgttccctcccccgcgtgcctagccggtgccggtccgggcacagacccccccagcccccgccctgccccagggaagcctgggcttcccgggaacaaggtggcatttgtggagggagcgcccgcaggcctggtctgctggggccgcctgcgctgggctgaagggagggaaaggcggcttgggcctcctggaaggaggtggccaccccgcgggcctgcgtgtctgctggggcggatcccgcagctccctcagcttgtcctgagtcccttgggtgtcgttgagattgttgttttttgaagaaacagaagattctattttttacagcgagcaagctggttttcttatttttgtatcctttttcagatgtaatttttatctttgctccgatcctcatttgctggtgtgggtgagggatccggcggcatgggctggtttcacccccttcacgaggggccgcagagtcacacgctggtgccgggggtgctttggggggagctgcgccgatcaccagattaagcacatgtcctatcccaggcggtggagcggagcccccgtggctctggactgcgcggacgttggcgtcaggatgaccacacggcggcctttcccgaatggggacagaacccgctctgagccgtgggtctggctcctgtaggggactggctctcttggtgcaccaggggagggggacatatcccagtgaaccccaccttggcgcctgaggcaacacagggtgggcactgacccacccccaggggcggctgcagaggcagtgcccgcagacaatggccacacctctctccccagggcccggcagtgcccaaggatgggtccggggcctcggggccaatgagcgcctcttcctaggtgctgggattcagtccccaaacacagcgggaggggtccctggggcagatggggctttaccagcgtcgggtggtttagttcgagtcccttttgtggagaaagggagatgaaaactgaccacgtgccaggtgtggccgaagcccccagggagggccacattcggggagcggggggtcgggggagggccaccgactggctctgctgccagcacaggcccctccctggaagtcctcgggagcggagcgcggatcggcacgggctctgggctccccgtggagagaagctgtagtttttaccaaattgtgtacatctgggcagatgtttaatttctgtgactaatcactgaactagatgaatgttaaattttttatgtctgaagcctgagtctattttggatctgtaaataatcattgccagtgtgacttttgttcaacaaaaggattgtactgtattaagaaccgatgaaaaaaattctcctgtaacatttttttaagaaaactttgtttgtttaaagaaaaagtattgtataaattataatttttatttaaataaacctaaaatgctttgtgctaa

SEQ ID NO: 50571 - DNA, 3904 bp, Homo sapiens
ccccaactcctcgcaaccatcctcctgggctggtccagggaccctcatcatggccacaggagtccaggactttaaccggacagagtttgatcgactgaatgagatcaaaggtcacctggaaattgccttattggaaaaacatttcttacaggaggagctccggaagctgcgagaagaaaccaacgcggagatgctgcggcaggagctggaccgcgagcggcagcggcggatggagctggagcagaaggtgcaggaggtgctgaaggccagaaccgaggagcagatggctcagcagcccccaaaagggcaggcccaggccagcaatggagcagagcgccggagccaggggctgtcctcgcgcctgcagaagtggttctacgagcggttcggggagtacgtggaggacttccggttccagcccgaggagaacactgtggagacagaggaacccctgagcgcccgcaggttaactgaaaatatgagacggctcaagcgcggtgccaagccggtcactaactttgtgaagaacctctctgccttatccgactggtactccgtctacacgtctgccattgccttcaccgtgtacatgaatgccgtgtggcatggctgggccatcccattgttcttatttctagcaattctgaggttatccctcaattacctcatcgccagggggtggcggatacagtggagcatcgtgcccgaagtgtctgagcccgtggaacctccaaaggaagacctgactgtgtctgagaagttccagctggtgctggacgtcgcccagaaagcccagaaccttttcgggaagatggctgacatcctggagaagatcaagaacttgttcatgtgggtccagccggagatcacacagaagctgtatgtggcgctctgggctgccttcctggcctcctgcttcttcccctaccgcctggtggggcttgccgtgggactctatgctggtatcaagttcttcctcattgatttcatctttaaacgctgcccgaggctgcgcgccaagtacgacacgccctatatcatctggaggagtctccccaccgacccgcagctcaaggagcgctccagcgccgcagtctcacgcaggctgcagacgacctcgtcacggagctacgtacccagcgcaccggccggcctgggtaaagaggaggacgccggtcgcttccacagcaccaagaagggcaatttccacgagatcttcaatctgacagaaaacgagcgtccgctggcggtgtgcgagaatggctggcgctgctgcctcatcaacagggaccggaagatgcccacggactacatcaggaacggggtgctctacgtcacggagaattacttgtgcttcgaaagctccaaatctgggtcctcaaagaggaacaaagtcatcaagctagtggacatcacggacatccagaagtacaaggtcctgtctgtcctcccaggctcaggcatggggattgccgtgtcgacgccatccacccagaaaccgctcgtgtttggtgccatggtgcacagggatgaggccttcgagaccattctcagccagtacatcaagatcacctcagcggcagcgtctggcggggacagctagtattgacttgcccaggacgttgctggaattttctttttctttttctttttctttttttttttttacgatttggtagtggaaacaattggacatcctcatgagcttttgcaataattctcctggacctgtggttctattgtgttgacctctgcgttttatcgaccaagaaggggccagggctcacagggacgggggtgcccctctcccacagggcacgtcaggtgcctctgagggccacccgcagactgggggagggggcagaggccctcgggggcccgtggagaagacacacaggacccctggccctgcccttctccgttccagcctggacagagaaacctctccagccaccccaagaggttctcgcaaccttgtgtcccgctctccagaggccagaagctcgtccaccaccaaagccatagctgaagagtgcggggcccttcctcctggggacagaaagatgtcgtcaaggagggacatgggggcctttcaccaaccaccgagaaacgggcctggcggccctccttcctcttacatgagaccctcctgtggcatttgcccttggtgccgggctggggccgggcgcagtgaccctgcctgcgctccacactcgctccacgggaacagagagggtgagaagggcccacccctcgcctgccctcagtgtctttggtggcaccttccttgctggcctccagggcgctcagcaccgcgtctgtaagggcctgcctgctgctctcggcctgacacgccggccaggaggtctgtagctggggaccagtaagggcacaggatggtgcaggtaaaagcacatctttctcacactttgctctttggaaggcccaggagaacatccgcgaaggctgttggaggtgctccgagcactgtggcatgtctggcacatggcccccaggctgcggttgcctgggttggttgggggaggaagtggggaggagtgttccgggaccatggtggcccaggctgcagccgcctttgggccatccgagaggctctggcagcccctgtgctttagggagcaaccgtgagccgagcccagaggcctgggcctgcactgcctgcagccgacatgcgacagcgttccctcccccgcgtgcctagccggtgccggtccgggcacagacccccccagcccccgccctgccccagggaagcctgggcttcccgggaacaaggtggcatttgtggagggagcgcccgcaggcctggtctgctggggccgcctgcgctgggctgaagggagggaaaggcggcttgggcctcctggaaggaggtggccaccccgcgggcctgcgtgtctgctggggcggatcccgcagctccctcagcttgtcctgagtcccttgggtgtcgttgagattgttgttttttgaagaaacagaagattctattttttacagcgagcaagctggttttcttatttttgtatcctttttcagatgtaatttttatctttgctccgatcctcatttgctggtgtgggtgagggatccggcggcatgggctggtttcacccccttcacgaggggccgcagagtcacacgctggtgccgggggtgctttggggggagctgcgccgatcaccagattaagcacatgtcctatcccaggcggtggagcggagcccccgtggctctggactgcgcggacgttggcgtcaggatgaccacacggcggcctttcccgaatggggacagaacccgctctgagccgtgggtctggctcctgtaggggactggctctcttggtgcaccaggggagggggacatatcccagtgaaccccaccttggcgcctgaggcaacacagggtgggcactgacccacccccaggggcggctgcagaggcagtgcccgcagacaatggccacacctctctccccagggcccggcagtgcccaaggatgggtccggggcctcggggccaatgagcgcctcttcctaggtgctgggattcagtccccaaacacagcgggaggggtccctggggcagatggggctttaccagcgtcgggtggtttagttcgagtcccttttgtggagaaagggagatgaaaactgaccacgtgccaggtgtggccgaagcccccagggagggccacattcggggagcggggggtcgggggaggctcctttgctcctcatttgtcctgaaaatcttaatttgggattgatccaaaaatttgccccccccttcccttcgaaccatctgtttaattttgaatgccccctacaaaatttccgtgaatggctcgtgaacctttcctgttggattcaaagaccct

SEQ ID NO: 50572 - DNA, 1068 bp, Homo sapiens
ccccaactcctcgcaaccatcctcctgggctggtccagggaccctcatcatggccacaggagtccaggactttaaccggacagagtttgatcgactgaatgagatcaaaggtcacctggaaattgccttattggaaaaacatttcttacaggaggagctccggaagctgcgagaagaaaccaacgcggagatgctgcggcaggagctggaccgcgagcggcagcggcggatggagctggagcagaaggtgcaggaggtgctgaaggccagaaccgaggagcagatggctcagcagcccccaaaagggcaggcccaggccagcaatggagcagagcgccggagccaggggctgtcctcgcgcctgcagaagtggttctacgagcggttcggggagtacgtggaggacttccggttccagcccgaggagaacactgtggagacagaggaacccctgagcgcccgcaggttaactgaaaatatgagacggctcaagcgcggtgccaagccggtcactaactttgtgaagaacctctctgccttatccgactggtactccgtctacacgtctgccattgccttcaccgtgtacatgaatgccgtgtggcatggctgggccatcccattgttcttatttctagcaattctgaggttatccctcaattacctcatcgccagggggtggcggatacagtggagcatcgtgcccgaagtgtctgagcccgtggaacctccaaaggaagacctgactgtgtctgagaagttccagctggtgctggacgtcgcccagaaagcccagaaccttttcgggaagatggctgacatcctggagaagatcaagaacttgttcatgtgggtccagccggagatcacacagaagctgtatgtggcgctctgggctgccttcctggcctcctgcttcttcccctaccgcctggtggggcttgccgtggtgctgacaagggacctcagcttagaggggcagaggctgcctgctccaagcaaggatggccccagctgggacttgggctctcttgagctgagctgtccctcctgggtcggccaccacgt

SEQ ID NO: 50573 - DNA, 1069 bp, Homo sapiens
tgaaattgttaatgattttattcttgaaccaggggttctcttcataggtacttgctatatgtttttaaatatttactggatgaatgtaacggatgaatgagtaaataaatcagagagggcctcacatggaccaaagtgagtgacgctgggaacccagggttgtggtccattctgctcgtcctgcagaactccaggaggcagcattctatgggcttatgagctccagcagtgtttggaggacagggttggccagagactacaggagccacagactaagggcacagccaaggaaggaccccaagaccccgtcctgtgttggtgtgagctgggaaagccgcccagggaaagggctgtgcagccacccagtgctgctgaaatcagaaatctgccctcaaaacccctggaaccaggaagcccagctctgccctcctcctggggccctcgggtccacgtcagctggaagggagacacctgggatcacagaggggcagctggggtggggctggagccaagaggcagtgatgggcagctgaccactccctcagacaggagctggccatgcccctgccatcctctctgctcaactctctaccacatgtcacagctggcatcgcaagctagggggaaatagctggaccatgcacgattgtaaagaagacattcagtgttactatctgttaaatgatatgatgaccagaaaaccccgaaaattcacaggtaaatcatcatcataggagtgtggaagctgctggtacaaaatgagtcaggggaggccgtgaagaagctctcgaagacctgcctgtagcagaactcaccccagaaccctcgggactgcgacgagggcgcccgcccagtgacggccactcctgcggtgaacagtactgcctcctgccaggagctgctgtgacctgtgaacttcgttctagagcagcttacatggacttctttgccttttaaagtgttgcctttgtcgcgaacaccccccaaaatgccttccagtgtagcacgcatatcctgactgcaatccccttgctgttcctgaataaactctttcttaggagaacactct

SEQ ID NO: 50574 - DNA, 953 bp, Homo sapiens
gaaaaagcattattacataatgcaaatattttttaatatagttatctctctcctttttagaaatagaaattttctgccgttaaatttttttttgagatagagtctcactctgtctccaggctggaatgcagtggcacgatcttggctcactgcaacctctgcctcccgggttcaagtgattctcctgcctcagcctcccaagtagctgggactacaggcgcacaccgccacacccagctaatttttttgtattttagtagaaaaggggtttcaccatgttggccaggatggtctcaatctcttgacctcttgatcccctctcccggcctcccaaagtgccggaattacaggcatgagccaccacgctcagccgctattaaatattttaaaatgtgtagaacttctagtcagcatttttaaatctgtagaccttaatatgtgaaatagccaagtcccctcatgtttgactgtcaaataaaattctgctgctcaaattgtattcctccataattccctgctatagacctttaggctgttttaatgtccctacttgtaccacagagtattaggacttccttggcctgcctgcattcattttagagtctgaattctggggactcaaaagtttctacaagacagctgagcagtgctttgactttaatgtgacttacacatcataaatgactttcaaatgaaatttgaatttcaaaattctgtaaaagtggttgctcaaaagatgtatgatactattttaatcagtttaagagcaaaaatgtctaattgtatttaacaatggtatttgggcagccagaaaatattttaagcgttgctctaaaataatttgaagtagctcatctgttattacatcagatgcttcttgagtgcccaatttatacatggcctgtggtaaataccatgtgagctttgtaggaatacctttaaatattcctcac

SEQ ID NO: 50575 - DNA, 521 bp, Homo sapiens
gtaatatggaatgccaatctaaaaactacatgttttgggtggtctttatggaattttttagctataaccatcagaaaacaggcatacctagatgacagatgaaccttcttgatttttgaaacccattgaacaaaaatattttgccaattattgtgtttatgttatttaaaattttatgtaaaccttaattttgtagcagtaaattttgtttaagattttgctatcagctccctatcacctgagcaactttttttttgttgtatatgtttttttctattctatttcggaatagagaatttacttaaaatttttattttctccaaaaatgtggaaaatatgtcacctggtttcctggtttatggtagcatattctgtttaaattagtgtcacatatttagatgtgtggccagacgcttgatttattagttaatttttgagacagagtctaactgtgtcactcaggctggagttcagtgagctgaggtctccagcgtgggcgacagagtgagactctatctcaa

SEQ ID NO: 50576 - DNA, 2104 bp, Homo sapiens
acgtcatttccggcgtttgggcggggcccgggcagggcgcgctgcccggagctgcctgggttgcgctgccggccacgtccccgcgccgggcctcaggctccttcctactgtccgagggccaccaggccgccgggggcctgctgcgcccggatgcgtctgttactagagtggagagtctaccttcgtctcacatgtgccacaaaggatggcatggcccgggagtgccccaccacgtggctttcaccccctgcaaagccagacttcgcccagcgacacagtgtcaagcccacagctctccaaggaggaagatggtccaggctgggagcatccccttagcagcagcctctgatcccttggccaagcaggagggaaccattagcagcctgaggagctggctggctgggagcctcggggaccgcccagccttgctcccagctcacccacaagatgtggacagctcttgtgctcatttggattttctccttgtccttatctgaaagccatgcggcatccaacgatccacgcaactttgtccctaacaaaatgtggaagggattagtcaagaggaatgcatctgtggaaacagttgataataaaacgtctgaggatgtaaccatggcagcagcttctcctgtcacattgaccaaagggacttcggcagcccacctcaactctatggaagtcacaacagaggacacaagcaggacagatgtgagtgaaccagcaacttcaggaggtgcagctgatggtgtgacctccattgctcccacggctgtggcctccagtacgactgcggcctccattacgactgcggcctccagtatgactgtggcctccagtgctcccacgactgcagcctccagtacaactgtggcctccattgctcccacgactgcagcctccagtatgactgcggcctccagcactcccatgacacttgcactccccgcgcccacgtccacttccacagggcggaccccgtccactaccgccactgggcatccatctctcagcacagccctcgcacaagtgccaaagagcagcgcgttgccaagaacagcaaccctggccacattggccacacgtgctcagactgtagcgaccacagcaaacacaagcagccccatgagcactcgtccaagtccttccaagcacatgcccagtgacaccgcggcaagccctgtaccccctatgcgtccccaagcacaaggtcccattagccaggtgtcagtggaccagcctgtggttaacacaacaaataaatccacacccatgccctcaaacacaaccccagagcccgcccccacccccacagtggtgaccaccaccaaggcacaagccagggagccaactgccagcccagtgccagtacctcacaccagcccaatccctgagatggaggccatgtcccccacgacacagccaagccccatgccatatacccagagggccgctgggccaggcacatcccaggcaccggagcaggtagagactgaagccacaccaggtactgattccactgggccaacacccaggagctcagggggcactaagatgccagccacggactcgtgccagcccagcacccaaggccagtacatggtggtcaccactgagcccctcacccaggccgtggtagacaaaactctccttctggtggtgctgttactcggggtgacccttttcatcacagtcttggttttgtttgccctgcaggcctatgagagctacaagaagaaggactacacccaggtggactacttaatcaacgggatgtatgcggactcagaaatgtgaggggggcgggggcctggcgggaggcctggccccttcctcgtcctttccttttgcctttgagaccaaaccaagtgcttccaaattcttttggtgcaattgaggagatatgccagatgcttaaacacatttaattgctgtcagattaattccatgatcactaaagagttgctgcttttttcatatttatttttgtaaatgattctgtgcccaggagcagctgggggttccacctcagggtggggcgggcaggaccccgtctccccaggtgtcggagcctgacctgaattaaagtactgactgctcgcca

SEQ ID NO: 50577 - DNA, 460 bp, Homo sapiens
catttccaagaattcctgcagtgaatcctttcacaaagccaagcgttcttttatgatgtgaatacctgtgcagtttatctgctttgtaaacctgggtgtgcgttcagtgggcttttaatggtgaaactctccttctggtggtgctgttactcggggtgacccttttcatcacagtcttggttttgtttgccctgcaggcctatgagagctacaagaagaaggactacacccaggtggactacttaatcaacgggatgtatgcggactcagaaatgtgaggggggcgggggcctggcgggaggcctggccccttcctcgtcctttccttttgcctttgagaccaaaccaagtgcttccaaattcttttggtgcaattgaggagatatgccagatgcttaaacacatttaattgctgtcagattaattccatgatcactaaagagttgctgcttttttcata

SEQ ID NO: 50578 - DNA, 857 bp, Homo sapiens
acgtcatttccggcgtttgggcggggcccgggcagggcgcgctgcccggagctgcctgggttgcgctgccggccacgtccccgcgccgggcctcaggctccttcctactgtccgagggccaccaggccgccgggggcctgctgcgcccgggtaaggggctcgcactgccgtccgggtagctgctgtcagggctccctgactggcttgggactgagagacagaggttggggggcaggaggagggttggatgggggcacgaggggcagtgggagagtgagtggggctgagagaggcaggaggaacgggacaggaggagcggcggatggggcacgcacagagtgcaagacgctgagcaatgcagatgcgtctgttactagagtggagagtctaccttcgtctcacatgtgccacaaaggatggcatggcccgggagtgccccaccacgtggctttcaccccctgcaaagccagacttcgcccagcgacacagtgtcaagcccacagctctccaaggaggaagatggtccaggctgggagcatccccttagcagcagcctctgggaggctgtgtcttactcatgcagggtggtggaggggcgcctcttagcagaagatgatgaaaggctgtcccctctcaggaaggagaaggtcctcgtctgttccaaggcaaagaactggacaagaaggaggaggttcattcagtacattgagtctgatcctccctgctgtagctggagcacggtccctgaagctggctgaagtgctaaagcaggggctagcaaactgtggccgaatcccacctgctgcctgtttgtataaataaagttttattgggacacaaccatgcccaccattcac

SEQ ID NO: 50579 - DNA, 934 bp, Homo sapiens
acgtcatttccggcgtttgggcggggcccgggcagggcgcgctgcccggagctgcctgggttgcgctgccggccacgtccccgcgccgggcctcaggctccttcctactgtccgagggccaccaggccgccgggggcctgctgcgcccggatgcgtctgttactagagtggagagtctaccttcgtctcacatgtgccacaaaggatggcatggcccgggagtgccccaccacgtggctttcaccccctgcaaagccagacttcgcccagcgacacagtgtcaagcccacagctctccaaggaggaagatggtccaggctgggagcatccccttagcagcagcctctgagatggggttccgccatgttgcccaggctggtctctaactcatgagctcagtccatccgcctacctcagcctctcaaagtgcggggattacatgcatgagtcattgcatctgatcaggaggccttatcttctgagtggactggggtggtggcccatgaacaggatggggatcacgcaatcccctgcaaccctcttcggcttcgtgacacaaatgcaagttacctcaagaggttctccctgaccttggtgatgccgtgggcactcacagaagcctcctctgtgctgcagggaggctgtgtcttactcatgcagggtggtggaggggcgcctcttagcagaagatgatgaaaggctgtcccctctcaggaaggagaaggtcctcgtctgttccaaggcaaagaactggacaagaaggaggaggttcattcagtacattgagtctgatcctccctgctgtagctggagcacggtccctgaagctggctgaagtgctaaagcaggggctagcaaactgtggccgaatcccacctgctgcctgtttgtataaataaagttttattgggacacaaccatgcccaccattcac

SEQ ID NO: 50580 - DNA, 1806 bp, Homo sapiens
  misc_feature (1806)..(1806): n is a, c, g, or t
acgtcatttccggcgtttgggcggggcccgggcagggcgcgctgcccggagctgcctgggttgcgctgccggccacgtccccgcgccgggcctcaggctccttcctactgtccgagggccaccaggccgccgggggcctgctgcgcccggatgcgtctgttactagagtggagagtctaccttcgtctcacatgtgccacaaaggatggcatggcccgggagtgccccaccacgtggctttcaccccctgcaaagccagacttcgcccagcgacacagtgtcaagcccacagctctccaaggaggaagatggtccaggctgggagcatccccttagcagcagcctctgatcccttggccaagcaggagggaaccattagcagcctgaggagctggctggctgggagcctcggggaccgcccagccttgctcccagctcacccacaagatgtggacagctcttgtgctcatttggattttctccttgtccttatctgaaagccatgcggcatccaacgatccacgcaactttgtccctaacaaaatgtggaagggattagtcaagaggaatgcatctgtggaaacagttgataataaaacgtctgaggatgtaaccatggcagcagcttctcctgtcacattgaccaaagggacttcggcagcccacctcaactctatggaagtcacaacagaggacacaagcaggacagatgtgagtgaaccagcaacttcaggaggtgcagctgatggtgtgacctccattgctcccacggctgtggcctccagtacgactgcggcctccattacgactgcggcctccagtatgactgtggcctccagtgctcccacgactgcagcctccagtacaactgtggcctccattgctcccacgactgcagcctccagtatgactgcggcctccagcactcccatgacacttgcactccccgcgcccacgtccacttccacagggcggaccccgtccactaccgccactgggcatccatctctcagcacagccctcgcacaagtgccaaagagcagcgcgttgccaagaacagcaaccctggccacattggccacacgtgctcagactgtagcgaccacagcaaacacaagcagccccatgagcactcgtccaagtccttccaagcacatgcccagtgacaccgcggcaagccctgtaccccctatgcgtccccaagcacaaggtcccattagccaggtgtcagtggaccagcctgtggttaacacaacaaataaatccacacccatgccctcaaacacaaccccagagcccgcccccacccccacagtggtgaccaccaccaaggcacaagccagggagccaactgccagcccagtgccagtacctcacaccagcccaatccctgagatggaggccatgtcccccacgacacagccaagccccatgccatatacccagagggccgctgggccaggcacatcccaggcaccggagcaggtagagactgaagccacaccaggtactgattccactgggccaacacccaggagctcagggggcactaagatgccagccacggactcgtgccagcccagcacccaaggccagtacatggtggtcaccactgagcccctcacccaggccgtggtagacaaaactctccttctggtggtgctgttactcggggtgacccttttcatcacagtcttggttttgtttgccctgcaggcctatgagagctacaagaagaaggactacacccaggtgaccacccccccccccccccccccccccacccccacgaaaccctgagcgggn

SEQ ID NO: 50581 - DNA, 2132 bp, Homo sapiens
acgtcatttccggcgtttgggcggggcccgggcagggcgcgctgcccggagctgcctgggttgcgctgccggccacgtccccgcgccgggcctcaggctccttcctactgtccgagggccaccaggccgccgggggcctgctgcgcccgggaatgtggactttttttcaaactctagaatgcgtctgttactagagtggagagtctaccttcgtctcacatgtgccacaaaggatggcatggcccgggagtgccccaccacgtggctttcaccccctgcaaagccagacttcgcccagcgacacagtgtcaagcccacagctctccaaggaggaagatggtccaggctgggagcatccccttagcagcagcctctgatcccttggccaagcaggagggaaccattagcagcctgaggagctggctggctgggagcctcggggaccgcccagccttgctcccagctcacccacaagatgtggacagctcttgtgctcatttggattttctccttgtccttatctgaaagccatgcggcatccaacgatccacgcaactttgtccctaacaaaatgtggaagggattagtcaagaggaatgcatctgtggaaacagttgataataaaacgtctgaggatgtaaccatggcagcagcttctcctgtcacattgaccaaagggacttcggcagcccacctcaactctatggaagtcacaacagaggacacaagcaggacagatgtgagtgaaccagcaacttcaggaggtgcagctgatggtgtgacctccattgctcccacggctgtggcctccagtacgactgcggcctccattacgactgcggcctccagtatgactgtggcctccagtgctcccacgactgcagcctccagtacaactgtggcctccattgctcccacgactgcagcctccagtatgactgcggcctccagcactcccatgacacttgcactccccgcgcccacgtccacttccacagggcggaccccgtccactaccgccactgggcatccatctctcagcacagccctcgcacaagtgccaaagagcagcgcgttgccaagaacagcaaccctggccacattggccacacgtgctcagactgtagcgaccacagcaaacacaagcagccccatgagcactcgtccaagtccttccaagcacatgcccagtgacaccgcggcaagccctgtaccccctatgcgtccccaagcacaaggtcccattagccaggtgtcagtggaccagcctgtggttaacacaacaaataaatccacacccatgccctcaaacacaaccccagagcccgcccccacccccacagtggtgaccaccaccaaggcacaagccagggagccaactgccagcccagtgccagtacctcacaccagcccaatccctgagatggaggccatgtcccccacgacacagccaagccccatgccatatacccagagggccgctgggccaggcacatcccaggcaccggagcaggtagagactgaagccacaccaggtactgattccactgggccaacacccaggagctcagggggcactaagatgccagccacggactcgtgccagcccagcacccaaggccagtacatggtggtcaccactgagcccctcacccaggccgtggtagacaaaactctccttctggtggtgctgttactcggggtgacccttttcatcacagtcttggttttgtttgccctgcaggcctatgagagctacaagaagaaggactacacccaggtggactacttaatcaacgggatgtatgcggactcagaaatgtgaggggggcgggggcctggcgggaggcctggccccttcctcgtcctttccttttgcctttgagaccaaaccaagtgcttccaaattcttttggtgcaattgaggagatatgccagatgcttaaacacatttaattgctgtcagattaattccatgatcactaaagagttgctgcttttttcatatttatttttgtaaatgattctgtgcccaggagcagctgggggttccacctcagggtggggcgggcaggaccccgtctccccaggtgtcggagcctgacctgaattaaagtactgactgctcgcca

SEQ ID NO: 50582 - DNA, 2315 bp, Homo sapiens
acgtcatttccggcgtttgggcggggcccgggcagggcgcgctgcccggagctgcctgggttgcgctgccggccacgtccccgcgccgggcctcaggctccttcctactgtccgagggccaccaggccgccgggggcctgctgcgcccgggtaaggggctcgcactgccgtccgggtagctgctgtcagggctccctgactggcttgggactgagagacagaggttggggggcaggaggagggttggatgggggcacgaggggcagtgggagagtgagtggggctgagagaggcaggaggaacgggacaggaggagcggcggatggggcacgcacagagtgcaagacgctgagcaatgcagatgcgtctgttactagagtggagagtctaccttcgtctcacatgtgccacaaaggatggcatggcccgggagtgccccaccacgtggctttcaccccctgcaaagccagacttcgcccagcgacacagtgtcaagcccacagctctccaaggaggaagatggtccaggctgggagcatccccttagcagcagcctctgatcccttggccaagcaggagggaaccattagcagcctgaggagctggctggctgggagcctcggggaccgcccagccttgctcccagctcacccacaagatgtggacagctcttgtgctcatttggattttctccttgtccttatctgaaagccatgcggcatccaacgatccacgcaactttgtccctaacaaaatgtggaagggattagtcaagaggaatgcatctgtggaaacagttgataataaaacgtctgaggatgtaaccatggcagcagcttctcctgtcacattgaccaaagggacttcggcagcccacctcaactctatggaagtcacaacagaggacacaagcaggacagatgtgagtgaaccagcaacttcaggaggtgcagctgatggtgtgacctccattgctcccacggctgtggcctccagtacgactgcggcctccattacgactgcggcctccagtatgactgtggcctccagtgctcccacgactgcagcctccagtacaactgtggcctccattgctcccacgactgcagcctccagtatgactgcggcctccagcactcccatgacacttgcactccccgcgcccacgtccacttccacagggcggaccccgtccactaccgccactgggcatccatctctcagcacagccctcgcacaagtgccaaagagcagcgcgttgccaagaacagcaaccctggccacattggccacacgtgctcagactgtagcgaccacagcaaacacaagcagccccatgagcactcgtccaagtccttccaagcacatgcccagtgacaccgcggcaagccctgtaccccctatgcgtccccaagcacaaggtcccattagccaggtgtcagtggaccagcctgtggttaacacaacaaataaatccacacccatgccctcaaacacaaccccagagcccgcccccacccccacagtggtgaccaccaccaaggcacaagccagggagccaactgccagcccagtgccagtacctcacaccagcccaatccctgagatggaggccatgtcccccacgacacagccaagccccatgccatatacccagagggccgctgggccaggcacatcccaggcaccggagcaggtagagactgaagccacaccaggtactgattccactgggccaacacccaggagctcagggggcactaagatgccagccacggactcgtgccagcccagcacccaaggccagtacatggtggtcaccactgagcccctcacccaggccgtggtagacaaaactctccttctggtggtgctgttactcggggtgacccttttcatcacagtcttggttttgtttgccctgcaggcctatgagagctacaagaagaaggactacacccaggtggactacttaatcaacgggatgtatgcggactcagaaatgtgaggggggcgggggcctggcgggaggcctggccccttcctcgtcctttccttttgcctttgagaccaaaccaagtgcttccaaattcttttggtgcaattgaggagatatgccagatgcttaaacacatttaattgctgtcagattaattccatgatcactaaagagttgctgcttttttcatatttatttttgtaaatgattctgtgcccaggagcagctgggggttccacctcagggtggggcgggcaggaccccgtctccccaggtgtcggagcctgacctgaattaaagtactgactgctcgcca

SEQ ID NO: 50583 - DNA, 1153 bp, Homo sapiens
tgaaattgctatcgaaagtccggactgcagcctccagtacaactgtggcctccattgctcccacgactgcagcctccagtatgactgcggcctccagcactcccatgacacttgcactccccgcgcccacgtccacttccacagggcggaccccgtccactaccgccactgggcatccatctctcagcacagccctcgcacaagtgccaaagagcagcgcgttgccaagaacagcaaccctggccacattggccacacgtgctcagactgtagcgaccacagcaaacacaagcagccccatgagcactcgtccaagtccttccaagcacatgcccagtgacaccgcggcaagccctgtaccccctatgcgtccccaagcacaaggtcccattagccaggtgtcagtggaccagcctgtggttaacacaacaaataaatccacacccatgccctcaaacacaaccccagagcccgcccccacccccacagtggtgaccaccaccaaggcacaagccagggagccaactgccagcccagtgccagtacctcacaccagcccaatccctgagatggaggccatgtcccccacgacacagccaagccccatgccatatacccagagggccgctgggccaggcacatcccaggcaccggagcaggtagagactgaagccacaccaggtactgattccactgggccaacacccaggagctcagggggcactaagatgccagccacggactcgtgccagcccagcacccaaggccagtacatggtggtcaccactgagcccctcacccaggccgtggtagacaaaactctccttctggtggtgctgttactcggggtgacccttttcatcacagtcttggttttgtttgccctgcaggcctatgagagctacaagaagaaggactacacccaggtggactacttaatcaacgggatgtatgcggactcagaaatgtgaggggggcgggggcctggcgggaggcctggccccttcctcgtcctttccttttgcctttgagaccaaaccaagtgcttccaaattcttttggtgcaattgaggagatatgccagatgcttaaacacatttaattgctgtcagattaattccatgatcactaaagagttgctgcttttttcata

SEQ ID NO: 50584 - DNA, 1167 bp, Homo sapiens
acgtcatttccggcgtttgggcggggcccgggcagggcgcgctgcccggagctgcctgggttgcgctgccggccacgtccccgcgccgggcctcaggctccttcctactgtccgagggccaccaggccgccgggggcctgctgcgcccggatgcgtctgttactagagtggagagtctaccttcgtctcacatgtgccacaaaggatggcatggcccgggagtgccccaccacgtggctttcaccccctgcaaagccagacttcgcccagcgacacagtgtcaagcccacagctctccaaggaggaagatggtccaggctgggagcatccccttagcagcagcctctgatcccttggccaagcaggagggaaccattagcagcctgaggagctggctggctgggagcctcggggaccgcccagccttgctcccagctcacccacaagatgtggacagctcttgtgctcatttggattttctccttgtccttatctgaaagccatgcggcatccaacgatccacgcaactttgtccctaacaaaatgtggaagggattagtcaagaggaatgcatctgtggaaacagttgataataaaacgtctgaggatgtaaccatggcagcagcttctcctgtcacattgaccaaagggacttcggcagcccacctcaactctatggaagtcacaacagaggacacaagcaggacagatgtgagtgaaccagcaacttcaggaggtgcagctgatggtgtgacctccattgctcccacggctgtggcctccagtacgactgcggcctccattacgactgcggcctccagtatgactgtggcctccagtgctcccacgactgcagcctccagtacaactgtggcctccattgctcccacgactgcagcctccagcctatgagagctacaagaagaaggactacacccaggtggactacttaatcaacgggatgtatgcggactcagaaatgtgaggggggcgggggcctggcgggaggcctggccccttcctcgtcctttccttttgcctttgagaccaaaccaagtgcttccaaattcttttggtgcaattgaggagatatgccagatgcttaaacacatttaattgctgtcagattaattccatgatcactaaagagttgctgcttttttcata

SEQ ID NO: 50585 - DNA, 1533 bp, Homo sapiens
acgtcatttccggcgtttgggcggggcccgggcagggcgcgctgcccggagctgcctgggttgcgctgccggccacgtccccgcgccgggcctcaggctccttcctactgtccgagggccaccaggccgccgggggcctgctgcgcccggatgcgtctgttactagagtggagagtctaccttcgtctcacatgtgccacaaaggatggcatggcccgggagtgccccaccacgtggctttcaccccctgcaaagccagacttcgcccagcgacacagtgtcaagcccacagctctccaaggaggaagatggtccaggctgggagcatccccttagcagcagcctctgatcccttggccaagcaggagggaaccattagcagcctgaggagctggctggctgggagcctcggggaccgcccagccttgctcccagctcacccacaagatgtggacagctcttgtgctcatttggattttctccttgtccttatctgaaagccatgcggcatccaacgatccacgcaactttgtccctaacaaaatgtggaagggattagtcaagaggaatgcatctgtggaaacagttgataataaaacgtctgaggatgtaaccatggcagcagcttctcctgtcacattgaccaaagggacttcggcagcccacctcaactctatggaagtcacaacagaggacacaagcaggacagatgcctatgagagctacaagaagaaggactacacccaggtggactacttaatcaacgggatgtatgcggactcagaaatgtgaggggggcgggggcctggcgggaggcctggccccttcctcgtcctttccttttgcctttgagaccaaaccaagtgcttccaaattcttttggtgcaattgaggagatatgccagatgcttaaacacatttaattgctgtcagattaattccatgatcactaaagagttgctgcttttttcatatttatttttgtaaatgattctgtgcccaggagcagctgggggttccacctcagggtggggcgggcaggaccccgtctccccaggtgtcggagcctgacctgaattaaagtactgactgctcgccaaaaaaaaaaaacaaaaaaaaaaaaaaaaaaaaaaaaaaaaaaaaaaaaaaaaaaaaaaacaaaacacacgaaccacacacaacacgggacacatccatcgagggcggaaacaaccacaaacaagggcgccacgcacacacggtcccacaccccccctttgtaaaacgggagaaaatcggggggccccccaccaagaggggccgcccaacatctacagcagacacccgggtcctccgtatagggcgcgacgaacgagacagcagcacgccatgcgcgcacgcgcgcgcctgcgccgcgcgaggtctagtaacgcgcggggagcacactaccgcgaagcacacaaacagtccacggaggactaacggacgcacagcctcaccgccgcagaaacacgacaacagaccaacgtaagcaacgaaagcatgcgcacggcc

SEQ ID NO: 50586 - DNA, 844 bp, Homo sapiens
acgtcatttccggcgtttgggcggggcccgggcagggcgcgctgcccggagctgcctgggttgcgctgccggccacgtccccgcgccgggcctcaggctccttcctactgtccgagggccaccaggccgccgggggcctgctgcgcccggatgcgtctgttactagagtggagagtctaccttcgtctcacatgtgccacaaaggatggcatggcccgggagtgccccaccacgtggctttcaccccctgcaaagccagacttcgcccagcgacacagtgtcaagcccacagctctccaaggaggaagatggtccaggctgggagcatccccttagcagcagcctctgatcccttggccaagcaggagggaaccattagcagcctgaggagctggctggctgggagcctcggggaccgcccagccttgctcccagctcacccacaagatgtggacagctcttgtgctcatttggattttctccttgtccttatctgaaagccatgcggcatccaacgatccacgcaactttgtccctaacaaaatgtggaagggattagtcaagaggaatgcatctgtggaaacagttgataataaaacgtctgaggatgtaaccatggcagcagcttctcctgtcacattgaccaaagggacttcggcagcccacctcaactctatggaagtcacaacagaggacacaagcaggacagatgtgagtgaaccagcaacttcaggaggtgcagctgatggtgtgacctccattgctcccacggctgtggcctccagtacgactgcgccgcaagaccgtcccactcaacaggctgcgaacagggatccttagatct

SEQ ID NO: 50587 - DNA, 646 bp, Homo sapiens
acgtcatttccggcgtttgggcggggcccgggcagggcgcgctgcccggagctgcctgggttgcgctgccggccacgtccccgcgccgggcctcaggctccttcctactgtccgagggccaccaggccgccgggggcctgctgcgcccggatgcgtctgttactagagtggagagtctaccttcgtctcacatgtgccacaaaggatggcatggcccgggagtgccccaccacgtggctttcaccccctgcaaagccagacttcgcccagcgacacagtgtcaagcccacagctctccaaggaggaagatggtccaggctgggagcatccccttagcagcagcctctgggaggctgtgtcttactcatgcagggtggtggaggggcgcctcttagcagaagatgatgaaaggctgtcccctctcaggaaggagaaggtcctcgtctgttccaaggcaaagaactggacaagaaggaggaggttcattcagtacattgagtctgatcctccctgctgtagctggagcacggtccctgaagctggctgaagtgctaaagcaggggctagcaaactgtggccgaatcccacctgctgcctgtttgtataaataaagttttattgggacacaaccatgcccaccattcac

SEQ ID NO: 50588 - DNA, 1979 bp, Homo sapiens
acgtcatttccggcgtttgggcggggcccgggcagggcgcgctgcccggagctgcctgggttgcgctgccggccacgtccccgcgccgggcctcaggctccttcctactgtccgagggccaccaggccgccgggggcctgctgcgcccggatgcgtctgttactagagtggagagtctaccttcgtctcacatgtgccacaaaggatggcatggcccgggagtgccccaccacgtggctttcaccccctgcaaagccagacttcgcccagcgacacagtgtcaagcccacagctctccaaggaggaagatggtccaggctgggagcatccccttagcagcagcctctgatcccttggccaagcaggagggaaccattagcagcctgaggagctggctggctgggagcctcggggaccgcccagccttgctcccagctcacccacaagatgtggacagctcttgtgctcatttggattttctccttgtccttatctgaaagccatgcggcatccaacgatccacgcaactttgtccctaacaaaatgtggaagggattagtcaagaggaatgcatctgtggaaacagttgataataaaacgtctgaggatgtaaccatggcagcagcttctcctgtcacattgaccaaagggacttcggcagcccacctcaactctatggaagtcacaacagaggacacaagcaggacagatgtgagtgaaccagcaacttcaggaggtgcagctgatggtgtgacctccattgctcccacggctgtggcctccagtacgactgcggcctccattacgactgcggcctccagtatgactgtggcctccagtgctcccacgactgcagcctccagtacaactgtggcctccattgctcccacgactgcagcctccagtatgactgcggcctccagcactcccatgacacttgcactccccgcgcccacgtccacttccacagggcggaccccgtccactaccgccactgggcatccatctctcagcacagccctcgcacaagtgccaaagagcagcgcgttgccaagaacagcaaccctggccacattggccacacgtgctcagactgtagcgaccacagcaaacacaagcagccccatgagcactcgtccaagtccttccaagcacatgcccagtgacaccgcggcaagccctgtaccccctatgcgtccccaagcacaaggtcccattagccaggtgtcagtggaccagcctgtggttaacacaacaaataaatccacacccatgccctcaaacacaaccccagagcccgcccccacccccacagtggtgaccaccaccaaggcacaagccagggagccaactgccagcccagtgccagtacctcacaccagcccaatccctgagatggaggccatgtcccccacgacacagccaagccccatgccatatacccagagggccgctgggccaggcacatcccaggcaccggagcaggtagagactgaagccacaccaggtactgattccactgggccaacacccaggagctcagggggcactaagatgccagccacggactcgtgccagcccagcacccaaggccagtacatggtggtcaccactgagcccctcacccaggccgtggtagacaaaactctccttctggtggtgctgttactcggggtgacccttttcatcacagtcttggttttgtttgccctgcaggcctatgagagctacaagaagaaggactacacccaggtggactacttaatcaacgggatgtatgcggactcagaaatgtgaggggggcgggggcctggcgggaggcctggccccttcctcgtcctttccttttgcctttgagaccaaaccaagtgcttccaaattcttttggtgcaattgaggagatatgccagatgcttaaacacatttaattgctgtcagattaattccatgatcactaaagagttgctgcttttttcata

SEQ ID NO: 50589 - DNA, 2538 bp, Homo sapiens
acgtcatttccggcgtttgggcggggcccgggcagggcgcgctgcccggagctgcctgggttgcgctgccggccacgtccccgcgccgggcctcaggctccttcctactgtccgagggccaccaggccgccgggggcctgctgcgcccggatgcgtctgttactagagtggagagtctaccttcgtctcacatgtgccacaaaggatggcatggcccgggagtgccccaccacgtggctttcaccccctgcaaagccagacttcgcccagcgacacagtgtcaagcccacagctctccaaggaggaagatggtccaggctgggagcatccccttagcagcagcctctgatcccttggccaagcaggagggaaccattagcagcctgaggagctggctggctgggagcctcggggaccgcccagccttgctcccagctcacccacaagatgtggacagctcttgtgctcatttggattttctccttgtccttatctgaaagccatgcggcatccaacgatccacgcaactttgtccctaacaaaatgtggaagggattagtcaagaggaatgcatctgtggaaacagttgataataaaacgtctgaggatgtaaccatggcagcagcttctcctgtcacattgaccaaagggacttcggcagcccacctcaactctatggaagtcacaacagaggacacaagcaggacagatgtgagtgaaccagcaacttcaggaggtgcagctgatggtgtgacctccattgctcccacggctgtggcctccagtacgactgcggcctccattacgactgcggcctccagtatgactgtggcctccagtgctcccacgactgcagcctccagtacaactgtggcctccattgctcccacgactgcagcctccagtatgactgcggcctccagcactcccatgacacttgcactccccgcgcccacgtccacttccacagggcggaccccgtccactaccgccactgggcatccatctctcagcacagccctcgcacaagtgccaaagagcagcgcgttgccaagaacagcaaccctggccacattggccacacgtgctcagactgtagcgaccacagcaaacacaagcagccccatgagcactcgtccaagtccttccaagcacatgcccagtgacaccgcggcaagccctgtaccccctatgcgtccccaagcacaaggtcccattagccaggtgtcagtggaccagcctgtggttaacacaacaaataaatccacacccatgccctcaaacacaaccccagagcccgcccccacccccacagtggtgaccaccaccaaggcacaagccagggagccaactgccagcccagtgccagtacctcacaccagcccaatccctgagatggaggccatgtcccccacgacacagccaagccccatgccatatacccagagggccgctgggccaggcacatcccaggcaccggagcaggtagagactgaagccacaccaggtactgattccactgggccaacacccaggagctcagggggcactaagatgccagccacggactcgtgccagcccagcacccaaggccagtacatggtggtcaccactgagcccctcacccaggccgtggtagacaaaactctccttctggtggtgctgttactcggggtgacccttttcatcacagtcttggttttgtttgccctgcaggcctatgagagctacaagaagaaggactacacccaggtggactacttaatcaacgggatgtatgcggactcagaaatgtgaggggggcgggggcctggcgggaggcctggccccttcctcgtcctttccttttgcctttgagaccaaaccaagtgcttccaaattcttttggtgcaattgaggagatatgccagatgcttaaacacatttaattgctgtcagattaattccatgatcactaaagagttgctgcttttttcatatttatttttgtaaatgattctgtgcccaggagcagctgggggttccacctcagggtggggcgggcaggaccccgtctccccaggtgtcggagcctgacctgaattaaagtactgactgctcgccaaaaaaaaaaaacaaaaaaaaaaaaaaaaaaaaaaaaaaaaaaaaaaaaaaaaaaaaaaacaaaacacacgaaccacacacaacacgggacacatccatcgagggcggaaacaaccacaaacaagggcgccacgcacacacggtcccacaccccccctttgtaaaacgggagaaaatcggggggccccccaccaagaggggccgcccaacatctacagcagacacccgggtcctccgtatagggcgcgacgaacgagacagcagcacgccatgcgcgcacgcgcgcgcctgcgccgcgcgaggtctagtaacgcgcggggagcacactaccgcgaagcacacaaacagtccacggaggactaacggacgcacagcctcaccgccgcagaaacacgacaacagaccaacgtaagcaacgaaagcatgcgcacggcc

SEQ ID NO: 50590 - DNA, 2042 bp, Homo sapiens
tacaacgaacaaacgaacaggagagacaccaaagatgtactacgggcgagacgcgggtggtaatttcaatcacggggctggtagtataatgcgtctgttactagagtggagagtctaccttcgtctcacatgtgccacaaaggatggcatggcccgggagtgccccaccacgtggctttcaccccctgcaaagccagacttcgcccagcgacacagtgtcaagcccacagctctccaaggaggaagatggtccaggctgggagcatccccttagcagcagcctctgatcccttggccaagcaggagggaaccattagcagcctgaggagctggctggctgggagcctcggggaccgcccagccttgctcccagctcacccacaagatgtggacagctcttgtgctcatttggattttctccttgtccttatctgaaagccatgcggcatccaacgatccacgcaactttgtccctaacaaaatgtggaagggattagtcaagaggaatgcatctgtggaaacagttgataataaaacgtctgaggatgtaaccatggcagcagcttctcctgtcacattgaccaaagggacttcggcagcccacctcaactctatggaagtcacaacagaggacacaagcaggacagatgtgagtgaaccagcaacttcaggaggtgcagctgatggtgtgacctccattgctcccacggctgtggcctccagtacgactgcggcctccattacgactgcggcctccagtatgactgtggcctccagtgctcccacgactgcagcctccagtacaactgtggcctccattgctcccacgactgcagcctccagtatgactgcggcctccagcactcccatgacacttgcactccccgcgcccacgtccacttccacagggcggaccccgtccactaccgccactgggcatccatctctcagcacagccctcgcacaagtgccaaagagcagcgcgttgccaagaacagcaaccctggccacattggccacacgtgctcagactgtagcgaccacagcaaacacaagcagccccatgagcactcgtccaagtccttccaagcacatgcccagtgacaccgcggcaagccctgtaccccctatgcgtccccaagcacaaggtcccattagccaggtgtcagtggaccagcctgtggttaacacaacaaataaatccacacccatgccctcaaacacaaccccagagcccgcccccacccccacagtggtgaccaccaccaaggcacaagccagggagccaactgccagcccagtgccagtacctcacaccagcccaatccctgagatggaggccatgtcccccacgacacagccaagccccatgccatatacccagagggccgctgggccaggcacatcccaggcaccggagcaggtagagactgaagccacaccaggtactgattccactgggccaacacccaggagctcagggggcactaagatgccagccacggactcgtgccagcccagcacccaaggccagtacatggtggtcaccactgagcccctcacccaggccgtggtagacaaaactctccttctggtggtgctgttactcggggtgacccttttcatcacagtcttggttttgtttgccctgcaggcctatgagagctacaagaagaaggactacacccaggtggactacttaatcaacgggatgtatgcggactcagaaatgtgaggggggcgggggcctggcgggaggcctggccccttcctcgtcctttccttttgcctttgagaccaaaccaagtgcttccaaattcttttggtgcaattgaggagatatgccagatgcttaaacacatttaattgctgtcagattaattccatgatcactaaagagttgctgcttttttcatatttatttttgtaaatgattctgtgcccaggagcagctgggggttccacctcagggtggggcgggcaggaccccgtctccccaggtgtcggagcctgacctgaattaaagtactgactgctcgcca

SEQ ID NO: 50591 - DNA, 1074 bp, Homo sapiens
acgtcatttccggcgtttgggcggggcccgggcagggcgcgctgcccggagctgcctgggttgcgctgccggccacgtccccgcgccgggcctcaggctccttcctactgtccgagggccaccaggccgccgggggcctgctgcgcccggatgcgtctgttactagagtggagagtctaccttcgtctcacatgtgccacaaaggatggcatggcccgggagtgccccaccacgtggctttcaccccctgcaaagccagacttcgcccagcgacacagtgtcaagcccacagctctccaaggaggaagatggtccaggctgggagcatccccttagcagcagcctctgatcccttggccaagcaggagggaaccattagcagcctgaggagctggctggctgggagcctcggggaccgcccagccttgctcccagctcacccacaagatgtggacagctcttgtgctcatttggattttctccttgtccttatctgaaagccatgcggcatccaacgatccacgcaactttgtccctaacaaaatgtggaagggattagtcaagaggaatgcatctgtggaaacagttgataataaaacgtctgaggatgtaaccatggcagcagcttctcctgtcacattgaccaaagggacttcggcagcccacctcaactctatggaagtcacaacagaggacacaagcaggacagatgtgagtgaaccagcaacttcaggaggtgcagctgatggtgtgacctccattgctcccacggctgtggcctccagtacgactgcggcctccattacgactgcggcctccagtatgactgtggcctccagtgctcccacgactgcagcctccagtacaactgtggcctccattgctcccacgactgcagcctccagtatgactgcggcctccagcactcccatgacacttgcactccccgcgcccacgtccacttccacagggcggaccccgtccactaccgccactgggcatccatctctcagcacagccctcgcacaagtgccaaagagcagaaggagagcagaagtcgacaagtcctgtaga

SEQ ID NO: 50592 - DNA, 1053 bp, Homo sapiens
gtgcactggctttcagcataggactaggagaaaatccaaatgagcacaagacccgtccactaccgccactgggcatccatctctcagcacagccctcgcacaagtgccaaagagcagcgcgttgccaagaacagcaaccctggccacattggccacacgtgctcagactgtagcgaccacagcaaacacaagcagccccatgagcactcgtccaagtccttccaagcacatgcccagtgacaccgcggcaagccctgtaccccctatgcgtccccaagcacaaggtcccattagccaggtgtcagtggaccagcctgtggttaacacaacaaataaatccacacccatgccctcaaacacaaccccagagcccgcccccacccccacagtggtgaccaccaccaaggcacaagccagggagccaactgccagcccagtgccagtacctcacaccagcccaatccctgagatggaggccatgtcccccacgacacagccaagccccatgccatatacccagagggccgctgggccaggcacatcccaggcaccggagcaggtagagactgaagccacaccaggtactgattccactgggccaacacccaggagctcagggggcactaagatgccagccacggactcgtgccagcccagcacccaaggccagtacatggtggtcaccactgagcccctcacccaggccgtggtagacaaaactctccttctggtggtgctgttactcggggtgacccttttcatcacagtcttggttttgtttgccctgcaggcctatgagagctacaagaagaaggactacacccaggtggactacttaatcaacgggatgtatgcggactcagaaatgtgaggggggcgggggcctggcgggaggcctggccccttcctcgtcctttccttttgcctttgagaccaaaccaagtgcttccaaattcttttggtgcaattgaggagatatgccagatgcttaaacacatttaattgctgtcagattaattccatgatcactaaagagttgctgcttttttcata

SEQ ID NO: 50593 - DNA, 974 bp, Homo sapiens
acgtcatttccggcgtttgggcggggcccgggcagggcgcgctgcccggagctgcctgggttgcgctgccggccacgtccccgcgccgggcctcaggctccttcctactgtccgagggccaccaggccgccgggggcctgctgcgcccggatgcgtctgttactagagtggagagtctaccttcgtctcacatgtgccacaaaggatggcatggcccgggagtgccccaccacgtggctttcaccccctgcaaagccagacttcgcccagcgacacagtgtcaagcccacagctctccaaggaggaagatggtccaggctgggagcatccccttagcagcagcctctgatcccttggccaagcaggagggaaccattagcagcctgaggagctggctggctgggagcctcggggaccgcccagccttgctcccagctcacccacaagatgtggacagctcttgtgctcatttggattttctccttgtccttatctgaaagccatgcggcatccaacgatccacgcaactttgtccctaacaaaatgtggaagggattagtcaagaggaatgcatctgtggaaacagttgataataaaacgtctgaggatgtaaccatggcagcagcttctcctgtcacattgaccaaagggacttcggcagcccacctcaactctatggaagtcacaacagaggacacaagcaggacagatgcctatgagagctacaagaagaaggactacacccaggtggactacttaatcaacgggatgtatgcggactcagaaatgtgaggggggcgggggcctggcgggaggcctggccccttcctcgtcctttccttttgcctttgagaccaaaccaagtgcttccaaattcttttggtgcaattgaggagatatgccagatgcttaaacacatttaattgctgtcagattaattccatgatcactaaagagttgctgcttttttcata

SEQ ID NO: 50594 - DNA, 1185 bp, Homo sapiens
acgtcatttccggcgtttgggcggggcccgggcagggcgcgctgcccggagctgcctgggttgcgctgccggccacgtccccgcgccgggcctcaggctccttcctactgtccgagggccaccaggccgccgggggcctgctgcgcccgggtaaggggctcgcactgccgtccgggtagctgctgtcagggctccctgactggcttgggactgagagacagaggttggggggcaggaggagggttggatgggggcacgaggggcagtgggagagtgagtggggctgagagaggcaggaggaacgggacaggaggagcggcggatggggcacgcacagagtgcaagacgctgagcaatgcagatgcgtctgttactagagtggagagtctaccttcgtctcacatgtgccacaaaggatggcatggcccgggagtgccccaccacgtggctttcaccccctgcaaagccagacttcgcccagcgacacagtgtcaagcccacagctctccaaggaggaagatggtccaggctgggagcatccccttagcagcagcctctgatcccttggccaagcaggagggaaccattagcagcctgaggagctggctggctgggagcctcggggaccgcccagccttgctcccagctcacccacaagatgtggacagctcttgtgctcatttggattttctccttgtccttatctgaaagccatgcggcatccaacgatccacgcaactttgtccctaacaaaatgtggaagggattagtcaagaggaatgcatctgtggaaacagttgataataaaacgtctgaggatgtaaccatggcagcagcttctcctgtcacattgaccaaagggacttcggcagcccacctcaactctatggaagtcacaacagaggacacaagcaggacagatgcctatgagagctacaagaagaaggactacacccaggtggactacttaatcaacgggatgtatgcggactcagaaatgtgaggggggcgggggcctggcgggaggcctggccccttcctcgtcctttccttttgcctttgagaccaaaccaagtgcttccaaattcttttggtgcaattgaggagatatgccagatgcttaaacacatttaattgctgtcagattaattccatgatcactaaagagttgctgcttttttcata

SEQ ID NO: 50595 - DNA, 2369 bp, Homo sapiens
gtcagtgcccgcgcagcgttgagttgcacagcggtattctcaccaggccctgcaatcggtgggccacagtgccggccacagagatggtggaaggaccaggctgtactctgaatggagagaagattcgcgcgcgggtgctcccgggccaggcggtgaccggcgtgcggggaagcgctctgcggagtctgcagggccgcgccttgcggctcgcagcctccacggttgtggtctccccgcaggctgctgcactgaataatgattccagccagaatgtcttgagcctgtttaatggatatgtttacagtggcgtggaaactttggggaaggagctctttatgtactttggaccaaaagctttacggattcatttcggaatgaaaggcttcatcatgattaatccacttgagtataaatataaaaatggagcttctcctgttttggaagtgcagctcaccaaagatttgatttgtttctttgactcatcagtagaactcagaaactcaatggaaagccaacagagaataagaatgatgaaagaattagatgtatgttcacctgaatttagtttcttgagagcagaaagtgaagttaaaaaacagaaaggccggatgctaggtgatgtgctaatggatcagaacgtattgcctggagtagggaacatcatcaaaaatgaagctctctttgacagtggtctccacccagctgttaaagtttgtcaattaacagatgaacagatccatcacctcatgaaaatgatacgtgatttcagcattctcttttacaggtgccgtaaagcaggacttgctctctctaaacactataaggtttacaagcgtcctaattgtggtcagtgccactgcagaataactgtgtgccgctttggggacaataacagaatgacatatttctgtcctcactgtcaaaaagaaaatcctcaacatgttgacatatgcaagctaccgactagaaatactataatcagttggacatctagcagggtggatcatgttatggactccgtggctcggaagtcggaagagcactggacctgtgtggtgtgtactttaatcaataagccctcttctaaggcatgtgatgcttgcttgacctcaaggcctattgattcagtgctcaagagtgaagaaaattctactgtctttagccacttaatgaagtacccgtgtaatacttttggaaaacctcatacagaagtcaagatcaacaggaaaactgcatttggaactacaactcttgtcttgactgattttagcaataaatccagtactttggaaagaaaaacaaagcaaaaccagatactagatgaggagtttcaaaactctcctcctgctagtgtgtgtttgaatgatatacagcacccctccaagaagacaacaaacgatataactcaactatccagcaaagtaaacatatcacctacaatcagttcagaatctaaattatttagtccagcacataaaaaaccgaaaacagcccactactcatcaccagagcttaaaagctgcaaccctggatattctaacagtgaacttcaaattaatatgacagatggccctcgtaccttaaatcctgacagccctcgctgcagtaaacacaaccgcctctgcattctccgagttgtgaggaaggatggggaaaacaagggcaggcagttttatgcctgtcctctacctagagaagcacaatgtggattttttgaatgggcagatttgtccttcccattctgcaaccatggcaagcgttccaccatgaaaacagtattgaagattggacctaacaatggaaagaatttttttgtgtgtcctcttgggaaggaaaaacaatgcaattttttccagtgggcagaaaatgggccaggaataaaaattattcctggatgctaatatctgtagattctctggcatttagtctcttcaaactgtgtataatgtttggtcctcctctgtttcatagaaaagtcatagaatatctatgatacattgaaaagttactgcaatatttgagaactgttctttttttttcttgtgtgtgccatctttccattgttggctacgtcttttcttttgccttgatgaacgttctatgtatttcatcggatatacagcatattccatttaggatgtgtatttaatgcatttagtaatgacgataaagtgtttttagtatgcttttagtctcttgtaactggggagaagcagtgttttttttttaggaaaggattatgcgacacaataaaataagatattctgtctgtagtgaatacatttctcatgtactaacactatttataatatatgattaaagatatttcttgttttattaaataataagaaataagatctcctttatga

SEQ ID NO: 50596 - DNA, 1431 bp, Homo sapiens
gtcagtgcccgcgcagcgttgagttgcacagcggtattctcaccaggccctgcaatcggtgggccacagtgccggccacagagatggtggaaggaccaggctgtactctgaatggagagaagattcgcgcgcgggtgctcccgggccaggcggtgaccggcgtgcggggaagcgctctgcggagtctgcagggccgcgccttgcggctcgcagcctccacggttgtggtctccccgcaggctgctgcactgaataatgattccagccagaatgtcttgagcctgtttaatggatatgtttacagtggcgtggaaactttggggaaggagctctttatgtactttggaccaaaagctttacggattcatttcggaatgaaaggcttcatcatgattaatccacttgagtataaatataaaaatggagcttctcctgttttggaagtgcagctcaccaaagatttgatttgtttctttgactcatcagtagaactcagaaactcaatggaaagccaacagagaataagaatgatgaaagaattagatgtatgttcacctgaatttagtttcttgagagcagaaagtgaagttaaaaaacagaaaggccggatgctaggtgatgtgctaatggatcagaacgtattgcctggagtagggaacatcatcaaaaatgaagctctctttgacagtggtctccacccagctgttaaagtttgtcaattaacagatgaacagatccatcacctcatgaaaatgatacgtgatttcagcattctcttttacaggtgccgtaaagcaggacttgctctctctaaacactataaggtttacaagcgtcctaattgtggtcagtgccactgcagaataactgtgtgccgctttggggacaataacagaatgacatatttctgtcctcactgtcaaaaagaaaatcctcaacatgttgacatatgcaagctaccgactagaaatactataatcagttggacatctagcagggtggatcatgttatggactccgtggctcggaagtcggaagagcactggacctgtgtggtgtgtactttaatcaataagccctcttctaaggcatgtgatgcttgcttgacctcaaggcctattggtaagactgaattttgattttgagtttgttacatttctaagagggttaattatacaaagtcaggaatatatcttgctccatcttgatattccataactaaataaaatttctttctcaaaggtttaaaggaattgccagttttcacatgtaaaccatgctaatattctgttgagtattttttttgaacagggagggaaagcatgtttgtgctataacagtatgtgcctttgtatctcaaaaaaatggagatgatcacatctgttctctactgtttctaatgaattattcaataaagctttgttttatgca

SEQ ID NO: 50597 - DNA, 599 bp, Homo sapiens
caagcaataataaagagatagcattggggtattaatggttctataatcatttctaaaatatccagacaagaacaaggcaataataacaatgattaattttaaaaattatcttatagcaagctaccgactagaaatactataatcagttggacatctagcagggtggatcatgttatggactccgtggctcggaagtcggaagagcactggacctgtgtggtgtgtactttaatcaataagccctcttctaaggcatgtgatgcttgcttgacctcaaggcctattggtaagactgaattttgattttgagtttgttacatttctaagagggttaattatacaaagtcaggaatatatcttgctccatcttgatattccataactaaataaaatttctttctcaaaggtttaaaggaattgccagttttcacatgtaaaccatgctaatattctgttgagtattttttttgaacagggagggaaagcatgtttgtgctataacagtatgtgcctttgtatctcaaaaaaatggagatgatcacatctgttctctactgtttctaatgaattattcaataaagctttgttttatgcagatt

SEQ ID NO: 50598 - DNA, 1400 bp, Homo sapiens
gtcagtgcccgcgcagcgttgagttgcacagcggtattctcaccaggccctgcaatcggaagtcggaagagcactggacctgtgtggtgtgtactttaatcaataagccctcttctaaggcatgtgatgcttgcttgacctcaaggcctattgattcagtgctcaagagtgaagaaaattctactgtctttagccacttaatgaagtacccgtgtaatacttttggaaaacctcatacagaagtcaagatcaacaggaaaactgcatttggaactacaactcttgtcttgactgattttagcaataaatccagtactttggaaagaaaaacaaagcaaaaccagatactagatgaggagtttcaaaactctcctcctgctagtgtgtgtttgaatgatatacagcacccctccaagaagacaacaaacgatataactcaactatccagcaaagtaaacatatcacctacaatcagttcagaatctaaattatttagtccagcacataaaaaaccgaaaacagcccactactcatcaccagagcttaaaagctgcaaccctggatattctaacagtgaacttcaaattaatatgacagatggccctcgtaccttaaatcctgacagccctcgctgcagtaaacacaaccgcctctgcattctccgagttgtgaggaaggatggggaaaacaagggcaggcagttttatgcctgtcctctacctagagaagcacaatgtggattttttgaatgggcagatttgtccttcccattctgcaaccatggcaagcgttccaccatgaaaacagtattgaagattggacctaacaatggaaagaatttttttgtgtgtcctcttgggaaggaaaaacaatgcaattttttccagtgggcagaaaatgggccaggaataaaaattattcctggatgctaatatctgtagattctctggcatttagtctcttcaaactgtgtataatgtttggtcctcctctgtttcatagaaaagtcatagaatatctatgatacattgaaaagttactgcaatatttgagaactgttctttttttttcttgtgtgtgccatctttccattgttggctacgtcttttcttttgccttgatgaacgttctatgtatttcatcggatatacagcatattccatttaggatgtgtatttaatgcatttagtaatgacgataaagtgtttttagtatgcttttagtctcttgtaactggggagaagcagtgttttttttttaggaaaggattatgcgacacaataaaataagatattctgtctgtagtgaatacatttctcatgtactaacactatttataatatatgattaaagatatttcttgttttattaaataataagaaataagatctcctttatga

SEQ ID NO: 50599 - DNA, 1793 bp, Homo sapiens
gctcacacctgtaatcccaccactttgggaggccgaggcgggcggatcacctgaagtcgggagttccagaccagcctgaccaaggagaaatcctgtctctactaaaaatacaaaattagctgggcgtggtggcgcgtgactgtaatcccagctactcgggaggctgaggcaggagaatcgcttgaaccccggaggcggaggttgcagtgagctgaatttcaccattgcactccagcctgggcgacagagtgagaatccgtctcaaaaaaaaaaaacgtttttttcacaaggaattctgaggacttgttggctcaattgcttggacataaagacacacatacatgaagctggagagataggaagaagcgctcaacacagaacaccctaagtatccctactccctttcaaggactaaatcccttcagagatttcctttgcttcagtccttcaggagcctcccgaagatgctaggagtcgtttaagaaggctggaagatggccgttgggaaggaactgttggtagctggcaatacttcatcccaaggaggcggtggcaatagctccctgggcagcagacatcatggattttcctccctctgggaaccagaggtccctccgtttctggtttgaatcccttagagacaaagaacttcattctctcccatacccgcgtgggactgctggggaggagagggggtggaggggttagacttctacgaaatccccatttggaagtacagaaagaaagactcctgttaaaaagctggctcctgaattttcaaaagtcaaaacaaaaactcctaagcactctcctattaaagaggaaccctgtggttccttatctgaaactgtttgtaaacgtgaattgaggagccaagaaaccccagaaaagccccggtcttcagtggacaccccaccaagactctccactccccaaaagggacccagcacccatcccaaggagaaagccttctcaagtgagatagaagatttgccgtacctttccaccacagaaatgtatttgtgtcgttggcaccagcctcccccatcaccgttaccattacgggaatcctctccaaagaaggaggagactgtagcaagtaaggcatagagaacacttgctcttataccctagtggtggcggtcaagctaacaagtgtgaaaatgcctttggcatttttaaaaaagtgcaatcaataaagcagagttctgtcaagaatgagtaagttaacagccagagacagacactgtgcaggcattgcaaatagatggaattacagcaaaatgtgctcaatgtatttgcctgcttacaacactgggagatgtgtttgccagtaagttgctcatcacaagagcaccagacttgggggtgtaatctccggcaacttgcatgccctctgaaagaagggttttctgtgctgtgaaatgcatagaactatactttgccatgcacgactgttcctgcaattgatattgtgtgaaatctgggagggtggtctttgggtgttctcaggggccaatggtaatttttgggttggggagccagcttggggtggggaattttcacctgggcctccgctctttaactatataaacatttatctgtatatctatgtccctgtctggggggcaggaggaatctgccaaagaccaacagtcttactttatcttactatacttcacaaaggttctaaaatgtgaagagtttacttggattgcagtagcccattggttgttcatatatttaaataaaatggtctacaaactatttttcaaacaaaaaaaaaacttggg

SEQ ID NO: 50600 - DNA, 990 bp, Homo sapiens
gctcacacctgtaatcccaccactttgggaggccgaggcgggcggatcacctgaagtcgggagttccagaccagcctgaccaaggagaaatcctgtctctactaaaaatacaaaattagctgggcgtggtggcgcgtgactgtaatcccagctactcgggaggctgaggcaggagaatcgcttgaaccccggaggcggaggttgcagtgagctgaatttcaccattgcactccagcctgggcgacagagtgagaatccgtctcaaaaaaaaaaaacgtttttttcacaaggaattctgaggacttgttggctcaattgcttggacataaagacacacatacatgaagctggagagataggaagaagcgctcaacacagaacaccctaagtatccctactccctttcaaggactaaatcccttcagagatttcctttgcttcagtccttcaggagcctcccgaagatgctaggagtcgtttaagaaggctggaagatggccgttgggaaggaactgttggtagctggcaatacttcatcccaaggaggcggtggcaatagctccctgggcagcagacatcatggattttcctccctctgggaaccagaggtccctccgtttctggtttgaatcccttagagacaaagaacttcattctctcccatacccgcgtgggactgctggggaggagagggggtggaggggttagacttctacccccatgaaacacccgcgggctcaaagaggagcctggatcctgactggtccaggaggcgtgcggggccgcggggcccctccggcttgggccaggcgcgttgccaagatgcccggggaaggggccgcccggcgcaggccggggacgtggagcgctcggggcgctcccacgtaggccacacattggccgcctgtatcctccttctttcctctcaactccattctctcgcgcttttttcccggggagcctccgctttccccttcttcccgcggccgc

SEQ ID NO: 50601 - DNA, 416 bp, Homo sapiens
tgtaccggctgttgcggacaagccttctcatgctgggcggattggacgggacataaaaggaaatccccatttggaagtacagaaagaaagactcctgttaaaaagctggctcctgaattttcaaaagtcaaaacaaaaactcctaagcactctcctattaaagaggaaccctgtggttccttatctgaaactgtttgtaaacgtgaattgaggagccaagaaaccccagaaaagccccggtcttcagtggacaccccaccaagactctccactccccaaaagggacccagcacccatcccaaggagaaagccttctcaagtgagatagaagatttgccgtacctttccaccacagaaatgtatttgtgtcgttggcaccagcctgtgcacgggggctcctcgagagtcgacgctgc

SEQ ID NO: 50602 - DNA, 2064 bp, Homo sapiens
catgagatccgcggtgttcaaggcggccgcggcccctgccggcggcaatcctgagcagcgactggactacgagcgggctgcggcgctgggcgggcccgaggacgagcctggggcggccgaagcccacttcctcccccggcaccgtaagctcaaggagccggggcccccgctggcctcctcccagggcgggagccccgcgccttccccggccggctgcggcggcaagggccggggcttgttactcccggccggggcggcccccgggcagcaggaagagagctggggcggttcggtgcccttgccctgtccgcccccggccaccaagcaagccggcattgggggggagcctgccgcagccggagccggctgcagcccccggcccaagtatcaggcggtgctgcccattcagacgggctctctcgtggcggcggccaaagagcctacgccctgggctggggacaagggtggggcggcctcccccgctgccaccgcctcggacccggcgggacccccaccactacctctgcccgggccgccacccctcgcgcccaccgccaccgccgggaccctggcggccagcgagggcagatggaagagtatgaggaagagccctctcgggggtggtggcggctcgggagcctccagtcaggccgcctgcctcaaacagatccttctgctgcaattggacctcatcgaacagcagcagcagcagctgcaggccaaggaaaaggagatcgaggagctgaagtcagagagagacacgctccttgctcggattgaacgtatggaaaggcggatgcagctggtaaagaaggataacgagaaagaaaggcacaagctgtttcagggctatgaaactgaagagagagaggaaacagagctatctgagaaaattaaactggagtgccagccggagctttccgagacatcccagactctgcctcccaagcccttctcatgtgggcggagtggaaagggacataaaaggaaatccccatttggaagtacagaaagaaagactcctgttaaaaagctggctcctgaattttcaaaagtcaaaacaaaaactcctaagcactctcctattaaagaggaaccctgtggttccttatctgaaactgtttgtaaacgtgaattgaggagccaagaaaccccagaaaagccccggtcttcagtggacaccccaccaagactctccactccccaaaagggacccagcacccatcccaaggagaaagccttctcaagtgagatagaagatttgccgtacctttccaccacagaaatgtatttgtgtcgttggcaccagcctcccccatcaccgttaccattacgggaatcctctccaaagaaggaggagactgtagcaagtaaggcatagagaacacttgctcttataccctagtggtggcggtcaagctaacaagtgtgaaaatgcctttggcatttttaaaaaagtgcaatcaataaagcagagttctgtcaagaatgagtaagttaacagccagagacagacactgtgcaggcattgcaaatagatggaattacagcaaaatgtgctcaatgtatttgcctgcttacaacactgggagatgtgtttgccagtaagttgctcatcacaagagcaccagacttgggggtgtaatctccggcaacttgcatgccctctgaaagaagggttttctgtgctgtgaaatgcatagaactatactttgccatgcacgactgttcctgcaattgatattgtgtgaaatctgggagggtggtctttgggtgttctcaggggccaatggtaatttttgggttggggagccagcttggggtggggaattttcacctgggcctccgctctttaactatataaacatttatctgtatatctatgtccctgtctggggggcaggaggaatctgccaaagaccaacagtcttactttatcttactatacttcacaaaggttctaaaatgtgaagagtttacttggattgcagtagcccattggttgttcatatatttaaataaaatggtctacaaactatttttcaaacaaaaaaaaaacttggg

SEQ ID NO: 50603 - DNA, 1540 bp, Homo sapiens
catgagatccgcggtgttcaaggcggccgcggcccctgccggcggcaatcctgagcagcgactggactacgagcgggctgcggcgctgggcgggcccgaggacgagcctggggcggccgaagcccacttcctcccccggcaccatccttctgctgcaattggacctcatcgaacagcagcagcagcagctgcaggccaaggaaaaggagatcgaggagctgaagtcagagagagacacgctccttgctcggattgaacgtatggaaaggcggatgcagctggtaaagaaggataacgagaaagaaaggcacaagctgtttcagggctatgaaactgaagagagagaggaaacagagctatctgagaaaattaaactggagtgccagccggagctttccgagacatcccagactctgcctcccaagcccttctcatgtgggcggagtggaaagggacataaaaggaaatccccatttggaagtacagaaagaaagactcctgttaaaaagctggctcctgaattttcaaaagtcaaaacaaaaactcctaagcactctcctattaaagaggaaccctgtggttccttatctgaaactgtttgtaaacgtgaattgaggagccaagaaaccccagaaaagccccggtcttcagtggacaccccaccaagactctccactccccaaaagggacccagcacccatcccaaggagaaagccttctcaagtgagatagaagatttgccgtacctttccaccacagaaatgtatttgtgtcgttggcaccagcctcccccatcaccgttaccattacgggaatcctctccaaagaaggaggagactgtagcaagtaaggcatagagaacacttgctcttataccctagtggtggcggtcaagctaacaagtgtgaaaatgcctttggcatttttaaaaaagtgcaatcaataaagcagagttctgtcaagaatgagtaagttaacagccagagacagacactgtgcaggcattgcaaatagatggaattacagcaaaatgtgctcaatgtatttgcctgcttacaacactgggagatgtgtttgccagtaagttgctcatcacaagagcaccagacttgggggtgtaatctccggcaacttgcatgccctctgaaagaagggttttctgtgctgtgaaatgcatagaactatactttgccatgcacgactgttcctgcaattgatattgtgtgaaatctgggagggtggtctttgggtgttctcaggggccaatggtaatttttgggttggggagccagcttggggtggggaattttcacctgggcctccgctctttaactatataaacatttatctgtatatctatgtccctgtctggggggcaggaggaatctgccaaagaccaacagtcttactttatcttactatacttcacaaaggttctaaaatgtgaagagtttacttggattgcagtagcccattggttgttcatatatttaaataaaatggtctacaaactatttttcaaacaaaaaaaaaacttggg

SEQ ID NO: 50604 - DNA, 1307 bp, Homo sapiens
aaaacaaaacaaaacaaaacaaaaaatttactatgggcctattttatatactgctaagcctgggctgttcctgctcatgactgctaaatgagcaccagacatttaggtacctgaatacttgtcattttggggcaaaagaaccagcttattcttttgctccagaatgtgttcaaattagattttattcaagtgtcaataaattttataatgttttcttccctatctaataggaaatccccatttggaagtacagaaagaaagactcctgttaaaaagctggctcctgaattttcaaaagtcaaaacaaaaactcctaagcactctcctattaaagaggaaccctgtggttccttatctgaaactgtttgtaaacgtgaattgaggagccaagaaaccccagaaaagccccggtcttcagtggacaccccaccaagactctccactccccaaaagggacccagcacccatcccaaggagaaagccttctcaagtgagatagaagatttgccgtacctttccaccacagaaatgtatttgtgtcgttggcaccagcctcccccatcaccgttaccattacgggaatcctctccaaagaaggaggagactgtagcaagtaaggcatagagaacacttgctcttataccctagtggtggcggtcaagctaacaagtgtgaaaatgcctttggcatttttaaaaaagtgcaatcaataaagcagagttctgtcaagaatgagtaagttaacagccagagacagacactgtgcaggcattgcaaatagatggaattacagcaaaatgtgctcaatgtatttgcctgcttacaacactgggagatgtgtttgccagtaagttgctcatcacaagagcaccagacttgggggtgtaatctccggcaacttgcatgccctctgaaagaagggttttctgtgctgtgaaatgcatagaactatactttgccatgcacgactgttcctgcaattgatattgtgtgaaatctgggagggtggtctttgggtgttctcaggggccaatggtaatttttgggttggggagccagcttggggtggggaattttcacctgggcctccgctctttaactatataaacatttatctgtatatctatgtccctgtctggggggcaggaggaatctgccaaagaccaacagtcttactttatcttactatacttcacaaaggttctaaaatgtgaagagtttacttggattgcagtagcccattggttgttcatatatttaaataaaatggtctacaaactatttttcaaacaaaaaaaaaacttggg

SEQ ID NO: 50605 - DNA, 879 bp, Homo sapiens
ccctgctgatacgattcgagctcgtacccctccagctggccccaaggagaaagccttctcaagtgagatagaagatttgccgtacctttccaccacagaaatgtatttgtgtcgttggcaccagcctcccccatcaccgttaccattacgggaatcctctccaaagaaggaggagactgtagcaagtaaggcatagagaacacttgctcttataccctagtggtggcggtcaagctaacaagtgtgaaaatgcctttggcatttttaaaaaagtgcaatcaataaagcagagttctgtcaagaatgagtaagttaacagccagagacagacactgtgcaggcattgcaaatagatggaattacagcaaaatgtgctcaatgtatttgcctgcttacaacactgggagatgtgtttgccagtaagttgctcatcacaagagcaccagacttgggggtgtaatctccggcaacttgcatgccctctgaaagaagggttttctgtgctgtgaaatgcatagaactatactttgccatgcacgactgttcctgcaattgatattgtgtgaaatctgggagggtggtctttgggtgttctcaggggccaatggtaatttttgggttggggagccagcttggggtggggaattttcacctgggcctccgctctttaactatataaacatttatctgtatatctatgtccctgtctggggggcaggaggaatctgccaaagaccaacagtcttactttatcttactatacttcacaaaggttctaaaatgtgaagagtttacttggattgcagtagcccattggttgttcatatatttaaataaaatggtctacaaactatttttcaaacaaaaaaaaaacttggg

SEQ ID NO: 50606 - DNA, 1168 bp, Homo sapiens
  misc_feature (1168)..(1168): n is a, c, g, or t
catgagatccgcggtgttcaaggcggccgcggcccctgccggcggcaatcctgagcagcgactggactacgagcgggctgcggcgctgggcgggcccgaggacgagcctggggcggccgaagcccacttcctcccccggcaccgtaagctcaaggagccggggcccccgctggcctcctcccagggcgggagccccgcgccttccccggccggctgcggcggcaagggccggggcttgttactcccggccggggcggcccccgggcagcaggaagagagctggggcggttcggtgcccttgccctgtccgcccccggccaccaagcaagccggcattgggggggagcctgccgcagccggagccggctgcagcccccggcccaagtatcaggcggtgctgcccattcagacgggctctctcgtggcggcggccaaagagcctacgccctgggctggggacaagggtggggcggcctcccccgctgccaccgcctcggacccggcgggacccccaccactacctctgcccgggccgccacccctcgcgcccaccgccaccgccgggaccctggcggccagcgagggcagatggaagagtatgaggaagagccctctcgggggtggtggcggctcgggagcctccagtcaggccgcctgcctcaaacagatccttctgctgcaattggacctcatcgaacagcagcagcagcagctgcaggccaaggaaaaggagatcgaggagctgaagtcagagagagacacgctccttgctcggattgaacgtatggaaaggcggatgcagctggtaaagaaggataacgagaaagaaaggcacaagctgtttcagggctatgaaactgaagagagagaggaaacagagctatctgagaaaattaaactggagtgccagccggagctttccgagacatcccagactctgcctcccaagcccttctcatgtgggcggagtggaaagggacataaaagtaagggaaatcccatttggaggcaagatggaagacttccgtttaaagcttggttccggattttaaaaagtaaaaacaaacttccaagactcttctattaaaaaggaaccttggggtcttatttgaatcggtggacggaatgggggccacgagccccttcccggcttttggtggcccccccn

SEQ ID NO: 50607 - DNA, 2045 bp, Homo sapiens
catgagatccgcggtgttcaaggcggccgcggcccctgccggcggcaatcctgagcagcgactggactacgagcgggctgcggcgctgggcgggcccgaggacgagcctggggcggccgaagcccacttcctcccccggcaccgtaagctcaaggagccggggcccccgctggcctcctcccagggcgggagccccgcgccttccccggccggctgcggcggcaagggccggggcttgttactcccggccggggcggcccccgggcagcaggaagagagctggggcggttcggtgcccttgccctgtccgcccccggccaccaagcaagccggcattgggggggagcctgccgcagccggagccggctgcagcccccggcccaagtatcaggcggtgctgcccattcagacgggctctctcgtggcggcggccaaagagcctacgccctgggctggggacaagggtggggcggcctcccccgctgccaccgcctcggacccggcgggacccccaccactacctctgcccgggccgccacccctcgcgcccaccgccaccgccgggaccctggcggccagcgagggcagatggaagagtatgaggaagagccctctcgggggtggtggcggctcgggagcctccagtcaggccgcctgcctcaaacagatccttctgctgcaattggacctcatcgaacagcagcagcagcagctgcaggccaaggaaaaggagatcgaggagctgaagtcagagagagacacgctccttgctcggattgaacgtatggaaaggcggatgcagctggtaaagaaggataacgagaaagaaaggcacaagctgtttcagggctatgaaactgaagagagagaggaaacagagctatctgagaaaattaaactggagtgccagccggagctttccgagacatcccagactctgcctcccaagcccttctcatgtgggcggagtggaaagggacataaaaggaaatccccatttggaagtacagaaagaaagatcctgaattttcaaaagtcaaaacaaaaactcctaagcactctcctattaaagaggaaccctgtggttccttatctgaaactgtttgtaaacgtgaattgaggagccaagaaaccccagaaaagccccggtcttcagtggacaccccaccaagactctccactccccaaaagggacccagcacccatcccaaggagaaagccttctcaagtgagatagaagatttgccgtacctttccaccacagaaatgtatttgtgtcgttggcaccagcctcccccatcaccgttaccattacgggaatcctctccaaagaaggaggagactgtagcaagtaaggcatagagaacacttgctcttataccctagtggtggcggtcaagctaacaagtgtgaaaatgcctttggcatttttaaaaaagtgcaatcaataaagcagagttctgtcaagaatgagtaagttaacagccagagacagacactgtgcaggcattgcaaatagatggaattacagcaaaatgtgctcaatgtatttgcctgcttacaacactgggagatgtgtttgccagtaagttgctcatcacaagagcaccagacttgggggtgtaatctccggcaacttgcatgccctctgaaagaagggttttctgtgctgtgaaatgcatagaactatactttgccatgcacgactgttcctgcaattgatattgtgtgaaatctgggagggtggtctttgggtgttctcaggggccaatggtaatttttgggttggggagccagcttggggtggggaattttcacctgggcctccgctctttaactatataaacatttatctgtatatctatgtccctgtctggggggcaggaggaatctgccaaagaccaacagtcttactttatcttactatacttcacaaaggttctaaaatgtgaagagtttacttggattgcagtagcccattggttgttcatatatttaaataaaatggtctacaaactatttttcaaacaaaaaaaaaacttggg

SEQ ID NO: 50608 - DNA, 2059 bp, Homo sapiens
catgagatccgcggtgttcaaggcggccgcggcccctgccggcggcaatcctgagcagcgactggactacgagcgggctgcggcgctgggcgggcccgaggacgagcctggggcggccgaagcccacttcctcccccggcaccgtaagctcaaggagccggggcccccgctggcctcctcccagggcgggagccccgcgccttccccggccggctgcggcggcaagggccggggcttgttactcccggccggggcggcccccgggcagcaggaagagagctggggcggttcggtgcccttgccctgtccgcccccggccaccaagcaagccggcattgggggggagcctgccgcagccggagccggctgcagcccccggcccaagtatcaggcggtgctgcccattcagacgggctctctcgtggcggcggccaaagagcctacgccctgggctggggacaagggtggggcggcctcccccgctgccaccgcctcggacccggcgggacccccaccactacctctgcccgggccgccacccctcgcgcccaccgccaccgccgggaccctggcggccagcgagggcagatggaagagtatgaggaagagccctctcgggggtggtggcggctcgggagcctccagtcaggccgcctgcctcaaacagatccttctgctgcaattggacctcatcgaacagcagcagcagcagctgcaggccaaggaaaaggagatcgaggagctgaagtcagagagagacacgctccttgctcggattgaacgtatggaaaggcggatgcagctggtaaagaaggataacgagaaagaaaggcacaagctgtttcagggctatgaaactgaagagagagaggaaacagagctatctgagaaaattaaactggagtgccagccggagctttccgagacatcccagactctgcctcccaagcccttctcatgtgggcggagtggaaagggacataaaaggaaatccccatttggaagtacagaaagaaagactcctgttaaaaagctggctcctgaattttcaaaagtcaaaacaaaaactcctaagcactctcctattaaagaggaaccctgtggttccttatctgaaactgtttgtaaacgtgaattgaggagccaagaaaccccagaaaagccccggtcttcagtggacaccccaccaagactctccactccccaaaagggacccagcacccatcccaaggagaaagccttctcaagtgagatagaagatttgccgtacctttccaccacagaaatgtatttgtgtcgttggcaccagcctcccccatcaccgttaccattacgggaatcctctccaaagaaggaggagactgtagcaagtaaggcatagagaacacttgctcttataccctagtggtggcggtcaagctaacaagtgtgaaaatgcctttggcatttttaaaaaagtgcaatcaataaagcagagttctgtcaagaatgagtaagttaacagccagagacagacactgtgcaggcattgcaaatagatggaattacagcaaaatgtgctcaatgtatttgcctgcttacaacactgggagatgtgtttgccagtaagttgctcatcacaagagcaccagacttgggggtgtaatctccggcaacttgcatgccctctgaaagaagggttttctgtgctgtgaaatgcatagaactatactttgccatgcacgactgttcctgcaattgatattgtgtgaaatctgggagggtggtctttgggtgttctcaggggccaatggtaatttttgggttggggagccagcttggggtggggaattttcacctgggcctccgctctttaactatataaacatttatctgtatatctatgtccctgtctggggggcaggaggaatctgccaaagaccaacagtcttactttatcttactatacttcacaaaggttctaaaatgtgaagagtttgtttgaaaaatagtttgtagaccatttgatttaaatatatgaacaaccaatgggctactgcaatccaagtaaacgtcgacg

SEQ ID NO: 50609 - DNA, 1611 bp, Homo sapiens
catgagatccgcggtgttcaaggcggccgcggcccctgccggcggcaatcctgagcagcgactggactacgagcgggctgcggcgctgggcgggcccgaggacgagcctggggcggccgaagcccacttcctcccccggcaccgtaagctcaaggagccggggcccccgctggcctcctcccagggcgggagccccgcgccttccccggccggctgcggcggcaagggccggggcttgttactcccggccggggcggcccccgggcagcaggaagagagctggggcggttcggtgcccttgccctgtccgcccccggccaccaagcaagccggcattgggggggagcctgccgcagccggagccggctgcagcccccggcccaagtatcaggcggtgctgcccattcagacgggctctctcgtggcggcggccaaagagcctacgccctgggctggggacaagggtggggcggcctcccccgctgccaccgcctcggacccggcgggacccccaccactacctctgcccgggccgccacccctcgcgcccaccgccaccgccgggaccctggcggccagcgagggcagatggaagagtatgaggaagagccctctcgggggtggtggcggctcgggagcctccagtcaggccgcctgcctcaaacagatccttctgctgcaattggacctcatcgaacagcagcagcagcagctgcaggccaaggaaaaggagatcgaggagctgaagtcagagagagacacgctccttgctcggattgaacgtatggaaaggcggatgcagctggtaaagaaggataacgagaaagaaaggcacaagctgtttcagggctatgaaactgaagagagagaggaaacagagctatctgagaaaattaaactggagtgccagccggagctttccgagacatcccagactctgcctcccaagcccttctcatgtgggcggagtggaaagggacataaaaggaaatccccatttggaagtacagaaagaaagactcctgttaaaaagctggctcctgaattttcaaaagtcaaaacaaaaactcctaagcactctcctattaaagaggaaccctgtggttccttatctgaaactgtttgtaaacgtgaattgaggagccaagaaaccccagaaaagccccggtcttcagtggacaccccaccaagactctccactccccaaaagggacccagcacccatcccaaggagaaagccttctcaagtgagatagaagatttgccgtacctttccaccacagaaatgtatttgtgtcgttggcaccagcctcccccatcaccgttaccattacgggaatcctctctgcgtttgcaaacgcagagaggaagaaaagcaactaccacaacaaaatcccccagaaaaccctgaaaaggcaaaaccaggaggggaacgttaagagggaaaacactgtatcattggttcaccataactggcctagcaaacattagccacagtgaaagggaggggcttcctccttgggagttcttccactggcccagctccccacgggggctggagcagggctggaaaaaacaggagctcccctcctctctgcgtttggggaagct

SEQ ID NO: 50610 - DNA, 7205 bp, Homo sapiens
  misc_feature (4687)..(4687): n is a, c, g, or t
  misc_feature (5650)..(5650): n is a, c, g, or t
  misc_feature (7074)..(7074): n is a, c, g, or t
gagcgctccaagatggcgcccaccgcagtcccgcccgccgcatcctcggcgcctttgcagtccggccgcgcctcccgggccccgcgttagggccgccgctgcctccctcgccgccgccgctgccagctgacctgtcctggacgcagcataactaacgaagctgctgcaggatgagaagatggcagcgcggctgcttgcaccaccaggccctgatagtttcaagcctttcacccctgagtcactggcaaacattgagaggcgcattgctgagagcaagctcaagaaaccaccaaaggccgatggcagtcatcgggaggacgatgaggacagcaagcccaagccaaacagcgacctggaagcagggaagagtttgcctttcatctacggggacatcccccaaggcctggttgcagttcccctggaggactttgacccatactatttgacgcagaaaacctttgtagtattaaacagagggaaaactctcttcagatttagtgccacgcctgccttgtacattttaagtccttttaacctgataagaagaatagctattaaaattttgatacattcagtatttagcatgatcattatgtgcactattttgaccaactgtgtattcatgacttttagtaaccctcctgactggtcgaagaatgtggagtacacgttcacagggatttatacatttgaatcactagtgaaaatcattgcaagaggtttctgcatagatggctttacctttttacgggatccatggaactggttagatttcagtgtcatcatgatggcgtatataacagagtttgtaaacctaggcaatgtttcagctctacgcactttcagggtactgagggctttgaaaactatttcggtaatcccaggcctgaagacaattgtgggtgccctgattcagtctgtgaagaaactgtcagatgtgatgatcctgacagtgttctgcctgagtgtttttgccttgatcggactgcagctgttcatggggaaccttcgaaacaagtgtgttgtgtggcccataaacttcaacgagagctatcttgaaaatggcaccaaaggctttgattgggaagagtatatcaacaataaaacaaatttctacacagttcctggcatgctggaacctttactctgtgggaacagttctgatgctgggcaatgcccagagggataccagtgtatgaaagcaggaaggaaccccaactatggttacacaagttttgacacttttagctgggccttcttggcattatttcgccttatgacccaggactattgggaaaacttgtatcaattgactttacgagcagccgggaaaacatacatgatcttcttcgtcttggtcatctttgtgggttctttctatctggtgaacttgatcttggctgtggtggccatggcttatgaagaacagaatcaggcaacactggaggaggcagaacaaaaagaggctgaatttaaagcaatgttggagcaacttaagaagcaacaggaagaggcacaggctgctgcgatggccacttcagcaggaactgtctcagaagatgccatagaggaagaaggtgaagaaggagggggctcccctcggagctcttctgaaatctctaaactcagctcaaagagtgcaaaggaaagacgtaacaggagaaagaagaggaagcaaaaggaactctctgaaggagaggagaaaggggatcccgagaaggtgtttaagtcagagtcagaagatggcatgagaaggaaggcctttcggctgccagacaacagaatagggaggaaattttccatcatgaatcagtcactgctcagcatcccaggctcgcccttcctctcccgccacaacagcaagagcagcatcttcagtttcaggggacctgggcggttccgagacccgggctccgagaatgagttcgcggatgacgagcacagcacggtggaggagagcgagggccgccgggactccctcttcatccccatccgggcccgcgagcgccggagcagctacagcggctacagcggctacagccagggcagccgctcctcgcgcatcttccccagcctgcggcgcagcgtgaagcgcaacagcacggtggactgcaacggcgtggtgtccctcatcggcggccccggctcccacatcggcgggcgtctcctgccagaggctacaactgaggtggaaattaagaagaaaggccctggatctcttttagtttccatggaccaattagcctcctacgggcggaaggacagaatcaacagtataatgagtgttgttacaaatacactagtagaagaactggaagagtctcagagaaagtgcccgccatgctggtataaatttgccaacactttcctcatctgggagtgccacccctactggataaaactgaaagagattgtgaacttgatagttatggacccttttgtggatttagccatcaccatctgcatcgtcctgaatacactgtttatggcaatggagcaccatcctatgacaccacaatttgaacatgtcttggctgtaggaaatctggttttcactggaattttcacagcggaaatgttcctgaagctcatagccatggatccctactattatttccaagaaggttggaacatttttgacggatttattgtctccctcagtttaatggaactgagtctagcagacgtggaggggctttcagtgctgcgatctttccgattgctccgagtcttcaaattggccaaatcctggcccaccctgaacatgctaatcaagattattggaaattcagtgggtgccctgggcaacctgacactggtgctggccattattgtcttcatctttgccgtggtggggatgcaactctttggaaaaagctacaaagagtgtgtctgcaagatcaaccaggactgtgaactccctcgctggcatatgcatgactttttccattccttcctcattgtctttcgagtgttgtgcggggagtggattgagaccatgtgggactgcatggaagtggcaggccaggccatgtgcctcattgtctttatgatggtcatggtgattggcaacttggtggtgctgaacctgtttctggccttgctcctgagctccttcagtgcagacaacctggctgccacagatgacgatggggaaatgaacaacctccagatctcagtgatccgtatcaagaagggtgtggcctggaccaaactaaaggtgcacgccttcatgcaggcccactttaagcagcgtgaggctgatgaggtgaagcctctggatgagttgtatgaaaagaaggccaactgtatcgccaatcacaccggtgcagacatccaccggaatggtgacttccagaagaatggcaatggcacaaccagcggcattggcagcagcgtggagaagtacatcattgatgaggaccacatgtccttcatcaacaaccccaacttgactgtacgggtacccattgctgtgggcgagtctgactttgagaacctcaacacagaggatgttagcagcgagtcggatcctgaaggcagcaaagataaactagatgacaccagctcctctgaaggaagcaccattgatatcaaaccagaagtagaagaggtccctgtggaacagcctgaggaatacttggatccagatgcctgcttcacagaaggttgtgtccagcggttcaagtgctgccaggtcaacatcgaggaagggctaggcaagtcttggtggatcctgcggaaaacctgcttcctcatcgtggagcacaactggtttgagaccttcatcatcttcatgattctgctgagcagtggcgccctggccttcgaggacatctacattgagcagagaaagaccatccgcaccatcctggaatatgctgacaaagtcttcacctatatcttcatcctggagatgttgctcaagtggacagcctatggcttcgtcaagttcttcaccaatgcctggtgttggctggacttcctcattgtggctgtctctttagtcagccttatagctaatgccctgggctactcggaactaggtgccataaagtcccttaggaccctaagagctttgagacccttaagagccttatcacgatttgaagggatgagggtggtggtgaatgccttggtgggcgccatcccctccatcatgaatgtgctgctggtgtgtctcatcttctggctgattttcagcatcatgggagttaacttgtttgcgggaaagtaccactactgctttaatgagacttctgaaatccgatttgaaattgaagatgtcaacaataaaactgaatgtgaaaagcttatggaggggaacaatacagagatcagatggaagaacgtgaagatcaactttgacaatgttggggcaggatacctggcccttcttcaagtagcaaccttcaaaggctggatggacatcatgtatgcagctgtagattcccggaagcctgatgagcagcctaagtatgaggacaatatctacatgtacatctattttgtcatcttcatcatcttcggctccttcttcaccctgaacctgttcattggtgtcatcattgataacttcaatcaacaaaagaaaaagttcggaggtcaggacatcttcatgaccgaagaacagaagaagtactacaatgccatgaaaaagctgggctcaaagaagccacagaaaccnattccccgccccttgaacaaaatccaaggaatcgtctttgattttgtcactcagcaagcctttgacattgttatcatgatgctcatctgccttaacatggtgacaatgatggtggagacagacactcaaagcaagcagatggagaacatcctctactggattaacctggtgtttgttatcttcttcacctgtgagtgtgtgctcaaaatgtttgcgttgaggcactactacttcaccattggctggaacatcttcgacttcgtggtagtcatcctctccattgtgggaatgttcctggcagatataattgagaaatactttgtttccccaaccctattccgagtcatccgattggcccgtattgggcgcatcttgcgtctgatcaaaggcgccaaagggattcgtaccctgctctttgccttaatgatgtccttgcctgccctgttcaacatcggccttctgctcttcctggtcatgttcatcttctccatttttgggatgtccaattttgcatatgtgaagcacgaggctggtatcgatgacatgttcaactttgagacatttggcaacagcatgatctgcctgtttcaaatcacaacctcagctggttgggatggcctgctgctgcccatcctaaaccgcccccctgactgcagcctagataaggaacacccagggagtggctttaagggagattgtgggaacccctcagtgggcatcttcttctttgtaagctacatcatcatctctttcctaattgtcgtgaacatgtacattgccatcatcctggagaacttcagtgtagccacagaggaaagtgcagaccctctgagtgaggatgactttgagaccttctatgagatctgggagaagttcgaccccgatgccacccagttcattgagtactgtaagctggcagactttgcagatgccttggagcatcctctccgagtgcccaagccnaataccattgagctcatcgctatggatctgccaatggtgagcggggatcgcatccactgcttggacatcctttttgccttcaccaagcgggtcctgggagatagcggggagttggacatcctgcggcagcagatggaagagcggttcgtggcatccaatccttccaaagtgtcttacgagccaatcacaaccacactgcgtcgcaagcaggaggaggtatctgcagtggtcctgcagcgtgcctaccggggacatttggcaaggcggggcttcatctgcaaaaagacaacttctaataagctggagaatggaggcacacaccgggagaaaaaagagagcaccccatctacagcctccctcccgtcctatgacagtgtaactaaacctgaaaaggagaaacagcagcgggcagaggaaggaagaagggaaagagccaaaagacaaaaagaggtcagagaatccaagtgttagaggagaacaaaaattcagtattatacagatctaaaactcgcaagtgaaagattgtttacaaacttcctgaatattatcaatgcagaacagctgtggagactctaacctgaagatctataccaaacgtcgtctgcttaccacgtaacacagctgcatcttgagcagtgacctgccaagggcaaaggaccccgctccctagacttacagattttctaatgcttgggcaggtggttactgcatgttccacatcagtcaatgcaacttaggacaaaactaaccagatacagaaacagaagagaggctgccgggaccagcatatttccgttgcagccaaatggattttattttttcattttattgattctcagaagcagaaagcatcactttaaaagttcgtttgttcatgcaaactatatttgcattcttacattagttaagctaagcagcaaaaagaaaacacacacacacactcacatttagcccatgtcatttaattgtcagtttctttgacataaagcgcatcttctccacatgggcttcacgtggtttggagatgggtgggggaaaacaatcaggtttcttcaggctgaggaggacttgctcaggccgattccaaacattgtgctcgttcaatgcgtagaaatgatttgcatgatggcatgccgtgatcagaagtcatgcatgagatccatacaccacaggacactactaatctagtcccttgcactgggtcagcctttggacaggacccagccctgcaccgttcactgtatttggagaaaatggtaagagttccataccggctacaattctttgagttcttaaaagtccttcatacaccttctgggtagggaaacaaccaactaattgactaacaccaccaacaacaaaaaacaaacccaatccaacaagcagatggatccgttgcgtgtatatgtttaacagacatctcnaacatacagccattgttgcacattttgcaagatgaactatttaatgctgctctgtgtccagtacatgggggagactttgatcccaaatggcttgtactatttatgtcactgtaaaaccaaatcctagggct

SEQ ID NO: 50611 - DNA, 6777 bp, Homo sapiens
  misc_feature (4687)..(4687): n is a, c, g, or t
  misc_feature (5650)..(5650): n is a, c, g, or t
gagcgctccaagatggcgcccaccgcagtcccgcccgccgcatcctcggcgcctttgcagtccggccgcgcctcccgggccccgcgttagggccgccgctgcctccctcgccgccgccgctgccagctgacctgtcctggacgcagcataactaacgaagctgctgcaggatgagaagatggcagcgcggctgcttgcaccaccaggccctgatagtttcaagcctttcacccctgagtcactggcaaacattgagaggcgcattgctgagagcaagctcaagaaaccaccaaaggccgatggcagtcatcgggaggacgatgaggacagcaagcccaagccaaacagcgacctggaagcagggaagagtttgcctttcatctacggggacatcccccaaggcctggttgcagttcccctggaggactttgacccatactatttgacgcagaaaacctttgtagtattaaacagagggaaaactctcttcagatttagtgccacgcctgccttgtacattttaagtccttttaacctgataagaagaatagctattaaaattttgatacattcagtatttagcatgatcattatgtgcactattttgaccaactgtgtattcatgacttttagtaaccctcctgactggtcgaagaatgtggagtacacgttcacagggatttatacatttgaatcactagtgaaaatcattgcaagaggtttctgcatagatggctttacctttttacgggatccatggaactggttagatttcagtgtcatcatgatggcgtatataacagagtttgtaaacctaggcaatgtttcagctctacgcactttcagggtactgagggctttgaaaactatttcggtaatcccaggcctgaagacaattgtgggtgccctgattcagtctgtgaagaaactgtcagatgtgatgatcctgacagtgttctgcctgagtgtttttgccttgatcggactgcagctgttcatggggaaccttcgaaacaagtgtgttgtgtggcccataaacttcaacgagagctatcttgaaaatggcaccaaaggctttgattgggaagagtatatcaacaataaaacaaatttctacacagttcctggcatgctggaacctttactctgtgggaacagttctgatgctgggcaatgcccagagggataccagtgtatgaaagcaggaaggaaccccaactatggttacacaagttttgacacttttagctgggccttcttggcattatttcgccttatgacccaggactattgggaaaacttgtatcaattgactttacgagcagccgggaaaacatacatgatcttcttcgtcttggtcatctttgtgggttctttctatctggtgaacttgatcttggctgtggtggccatggcttatgaagaacagaatcaggcaacactggaggaggcagaacaaaaagaggctgaatttaaagcaatgttggagcaacttaagaagcaacaggaagaggcacaggctgctgcgatggccacttcagcaggaactgtctcagaagatgccatagaggaagaaggtgaagaaggagggggctcccctcggagctcttctgaaatctctaaactcagctcaaagagtgcaaaggaaagacgtaacaggagaaagaagaggaagcaaaaggaactctctgaaggagaggagaaaggggatcccgagaaggtgtttaagtcagagtcagaagatggcatgagaaggaaggcctttcggctgccagacaacagaatagggaggaaattttccatcatgaatcagtcactgctcagcatcccaggctcgcccttcctctcccgccacaacagcaagagcagcatcttcagtttcaggggacctgggcggttccgagacccgggctccgagaatgagttcgcggatgacgagcacagcacggtggaggagagcgagggccgccgggactccctcttcatccccatccgggcccgcgagcgccggagcagctacagcggctacagcggctacagccagggcagccgctcctcgcgcatcttccccagcctgcggcgcagcgtgaagcgcaacagcacggtggactgcaacggcgtggtgtccctcatcggcggccccggctcccacatcggcgggcgtctcctgccagaggctacaactgaggtggaaattaagaagaaaggccctggatctcttttagtttccatggaccaattagcctcctacgggcggaaggacagaatcaacagtataatgagtgttgttacaaatacactagtagaagaactggaagagtctcagagaaagtgcccgccatgctggtataaatttgccaacactttcctcatctgggagtgccacccctactggataaaactgaaagagattgtgaacttgatagttatggacccttttgtggatttagccatcaccatctgcatcgtcctgaatacactgtttatggcaatggagcaccatcctatgacaccacaatttgaacatgtcttggctgtaggaaatctggttttcactggaattttcacagcggaaatgttcctgaagctcatagccatggatccctactattatttccaagaaggttggaacatttttgacggatttattgtctccctcagtttaatggaactgagtctagcagacgtggaggggctttcagtgctgcgatctttccgattgctccgagtcttcaaattggccaaatcctggcccaccctgaacatgctaatcaagattattggaaattcagtgggtgccctgggcaacctgacactggtgctggccattattgtcttcatctttgccgtggtggggatgcaactctttggaaaaagctacaaagagtgtgtctgcaagatcaaccaggactgtgaactccctcgctggcatatgcatgactttttccattccttcctcattgtctttcgagtgttgtgcggggagtggattgagaccatgtgggactgcatggaagtggcaggccaggccatgtgcctcattgtctttatgatggtcatggtgattggcaacttggtggtgctgaacctgtttctggccttgctcctgagctccttcagtgcagacaacctggctgccacagatgacgatggggaaatgaacaacctccagatctcagtgatccgtatcaagaagggtgtggcctggaccaaactaaaggtgcacgccttcatgcaggcccactttaagcagcgtgaggctgatgaggtgaagcctctggatgagttgtatgaaaagaaggccaactgtatcgccaatcacaccggtgcagacatccaccggaatggtgacttccagaagaatggcaatggcacaaccagcggcattggcagcagcgtggagaagtacatcattgatgaggaccacatgtccttcatcaacaaccccaacttgactgtacgggtacccattgctgtgggcgagtctgactttgagaacctcaacacagaggatgttagcagcgagtcggatcctgaaggcagcaaagataaactagatgacaccagctcctctgaaggaagcaccattgatatcaaaccagaagtagaagaggtccctgtggaacagcctgaggaatacttggatccagatgcctgcttcacagaaggttgtgtccagcggttcaagtgctgccaggtcaacatcgaggaagggctaggcaagtcttggtggatcctgcggaaaacctgcttcctcatcgtggagcacaactggtttgagaccttcatcatcttcatgattctgctgagcagtggcgccctggccttcgaggacatctacattgagcagagaaagaccatccgcaccatcctggaatatgctgacaaagtcttcacctatatcttcatcctggagatgttgctcaagtggacagcctatggcttcgtcaagttcttcaccaatgcctggtgttggctggacttcctcattgtggctgtctctttagtcagccttatagctaatgccctgggctactcggaactaggtgccataaagtcccttaggaccctaagagctttgagacccttaagagccttatcacgatttgaagggatgagggtggtggtgaatgccttggtgggcgccatcccctccatcatgaatgtgctgctggtgtgtctcatcttctggctgattttcagcatcatgggagttaacttgtttgcgggaaagtaccactactgctttaatgagacttctgaaatccgatttgaaattgaagatgtcaacaataaaactgaatgtgaaaagcttatggaggggaacaatacagagatcagatggaagaacgtgaagatcaactttgacaatgttggggcaggatacctggcccttcttcaagtagcaaccttcaaaggctggatggacatcatgtatgcagctgtagattcccggaagcctgatgagcagcctaagtatgaggacaatatctacatgtacatctattttgtcatcttcatcatcttcggctccttcttcaccctgaacctgttcattggtgtcatcattgataacttcaatcaacaaaagaaaaagttcggaggtcaggacatcttcatgaccgaagaacagaagaagtactacaatgccatgaaaaagctgggctcaaagaagccacagaaaccnattccccgccccttgaacaaaatccaaggaatcgtctttgattttgtcactcagcaagcctttgacattgttatcatgatgctcatctgccttaacatggtgacaatgatggtggagacagacactcaaagcaagcagatggagaacatcctctactggattaacctggtgtttgttatcttcttcacctgtgagtgtgtgctcaaaatgtttgcgttgaggcactactacttcaccattggctggaacatcttcgacttcgtggtagtcatcctctccattgtgggaatgttcctggcagatataattgagaaatactttgtttccccaaccctattccgagtcatccgattggcccgtattgggcgcatcttgcgtctgatcaaaggcgccaaagggattcgtaccctgctctttgccttaatgatgtccttgcctgccctgttcaacatcggccttctgctcttcctggtcatgttcatcttctccatttttgggatgtccaattttgcatatgtgaagcacgaggctggtatcgatgacatgttcaactttgagacatttggcaacagcatgatctgcctgtttcaaatcacaacctcagctggttgggatggcctgctgctgcccatcctaaaccgcccccctgactgcagcctagataaggaacacccagggagtggctttaagggagattgtgggaacccctcagtgggcatcttcttctttgtaagctacatcatcatctctttcctaattgtcgtgaacatgtacattgccatcatcctggagaacttcagtgtagccacagaggaaagtgcagaccctctgagtgaggatgactttgagaccttctatgagatctgggagaagttcgaccccgatgccacccagttcattgagtactgtaagctggcagactttgcagatgccttggagcatcctctccgagtgcccaagccnaataccattgagctcatcgctatggatctgccaatggtgagcggggatcgcatccactgcttggacatcctttttgccttcaccaagcgggtcctgggagatagcggggagttggacatcctgcggcagcagatggaagagcggttcgtggcatccaatccttccaaagtgtcttacgagccaatcacaaccacactgcgtcgcaagcaggaggaggtatctgcagtggtcctgcagcgtgcctaccggggacatttggcaaggcggggcttcatctgcaaaaagacaacttctaataagctggagaatggaggcacacaccgggagaaaaaagagagcaccccatctacagcctccctcccgtcctatgacagtgtaactaaacctgaaaaggagaaacagcagcgggcagaggaaggaagaagggaaagagccaaaagacaaaaagaggtcagagaatccaagtgttagaggagaacaaaaattcagtattatacagatctaaaactcgcaagtgaaagattgtttacaaacttcctgaatattatcaatgcagaacagctgtggagactctaacctgaagatctataccaaacgtcgtctgcttaccacgtaacacagctgcatcttgagcagtgacctgccaagggcaaaggaccccgctccctagacttacagattttctaatgcttgggcaggtggttactgcatgttccacatcagtcaatgcaacttaggacaaaactaaccagatacagaaacagaagagaggctgccgggaccagcatatttccgttgcagccaaatggattttattttttcattttattgattctcagaagcagaaagcatcactttaaaagttcgtttgttcatgcaaactatatttgcattcttacattagttaagctaagcagcaaaaagaaaacacacacacacactcacatttagcccatgtcatttaattgtcagtttctttgacataaagcgcatcttctccacatgggcttcacgtggtttggagatgggtgggggaaaacaatcaggtttcttcaggctgaggaggacttgctcaggccgattccaaacattgtccgagtccgctgcattggatcctctagacgcga

SEQ ID NO: 50612 - DNA, 496 bp, Homo sapiens
ttctatctggtgaacttgatcttggctgtggtggccatggcttatgaagaacagaatcaggcaacactggaggaggcagaacaaaaagaggctgaatttaaagcaatgttggagcaacttaagaagcaacaggaagaggcacaggttggtgatgaattctttgcaatagaccttcctgccagatcatggtgactaagaccccatctgattttcactgcagttgatcttttctaggcatattttcaaatagaggccattggtctgatgaaaataacccaagtaacaactgcagatggttgctccaattattccatttgtcttaacagccaaattgtttgttcatatcatcttttgttgaattgctcaactgttcagtgtgcaaccgccatgatgactgggaagaaaaaagtgaccagggcagtttatatagtgtttcacataagcatattctttttcttgggagaaatgttaagattcctgtggtcataaaaagtat

SEQ ID NO: 50613 - DNA, 6185 bp, Homo sapiens
  misc_feature (4095)..(4095): n is a, c, g, or t
  misc_feature (5058)..(5058): n is a, c, g, or t
ccgttggattcatataatctacctgacaaaactcagcactcaggtaaattgttatttgcaaggcctgccttttcacagtctgttcaaagacattcatcctagggggagtcacacttgtaagtaaaactgatgtgttcagtagctgtgactccaatgagagacgcattaaactctctgtaatgtccattaaaattccataatacttatatcaatattctttgctgcacaaagcaaagacagagcctagatgacctccatgaaaaagacatgcttaaagttccgttgaagccgtcgacggcttcaacggaactttgggatagcacttttaatttgtaaatatatataagaaaatcattaataggaaagaattcttatcagctgtcacagctgttggaaaagatttatgagctaaagtcaataactttctgctggggctagttaggaacagtgtaaccttattctctcattcacttaaatctgcctgttcatttcctgcctcttcaaacttttctagcaaatttctacacagttcctggcatgctggaacctttactctgtgggaacagttctgatgctgggcaatgcccagagggataccagtgtatgaaagcaggaaggaaccccaactatggttacacaagttttgacacttttagctgggccttcttggcattatttcgccttatgacccaggactattgggaaaacttgtatcaattgactttacgagcagccgggaaaacatacatgatcttcttcgtcttggtcatctttgtgggttctttctatctggtgaacttgatcttggctgtggtggccatggcttatgaagaacagaatcaggcaacactggaggaggcagaacaaaaagaggctgaatttaaagcaatgttggagcaacttaagaagcaacaggaagaggcacaggctgctgcgatggccacttcagcaggaactgtctcagaagatgccatagaggaagaaggtgaagaaggagggggctcccctcggagctcttctgaaatctctaaactcagctcaaagagtgcaaaggaaagacgtaacaggagaaagaagaggaagcaaaaggaactctctgaaggagaggagaaaggggatcccgagaaggtgtttaagtcagagtcagaagatggcatgagaaggaaggcctttcggctgccagacaacagaatagggaggaaattttccatcatgaatcagtcactgctcagcatcccaggctcgcccttcctctcccgccacaacagcaagagcagcatcttcagtttcaggggacctgggcggttccgagacccgggctccgagaatgagttcgcggatgacgagcacagcacggtggaggagagcgagggccgccgggactccctcttcatccccatccgggcccgcgagcgccggagcagctacagcggctacagcggctacagccagggcagccgctcctcgcgcatcttccccagcctgcggcgcagcgtgaagcgcaacagcacggtggactgcaacggcgtggtgtccctcatcggcggccccggctcccacatcggcgggcgtctcctgccagaggctacaactgaggtggaaattaagaagaaaggccctggatctcttttagtttccatggaccaattagcctcctacgggcggaaggacagaatcaacagtataatgagtgttgttacaaatacactagtagaagaactggaagagtctcagagaaagtgcccgccatgctggtataaatttgccaacactttcctcatctgggagtgccacccctactggataaaactgaaagagattgtgaacttgatagttatggacccttttgtggatttagccatcaccatctgcatcgtcctgaatacactgtttatggcaatggagcaccatcctatgacaccacaatttgaacatgtcttggctgtaggaaatctggttttcactggaattttcacagcggaaatgttcctgaagctcatagccatggatccctactattatttccaagaaggttggaacatttttgacggatttattgtctccctcagtttaatggaactgagtctagcagacgtggaggggctttcagtgctgcgatctttccgattgctccgagtcttcaaattggccaaatcctggcccaccctgaacatgctaatcaagattattggaaattcagtgggtgccctgggcaacctgacactggtgctggccattattgtcttcatctttgccgtggtggggatgcaactctttggaaaaagctacaaagagtgtgtctgcaagatcaaccaggactgtgaactccctcgctggcatatgcatgactttttccattccttcctcattgtctttcgagtgttgtgcggggagtggattgagaccatgtgggactgcatggaagtggcaggccaggccatgtgcctcattgtctttatgatggtcatggtgattggcaacttggtggtgctgaacctgtttctggccttgctcctgagctccttcagtgcagacaacctggctgccacagatgacgatggggaaatgaacaacctccagatctcagtgatccgtatcaagaagggtgtggcctggaccaaactaaaggtgcacgccttcatgcaggcccactttaagcagcgtgaggctgatgaggtgaagcctctggatgagttgtatgaaaagaaggccaactgtatcgccaatcacaccggtgcagacatccaccggaatggtgacttccagaagaatggcaatggcacaaccagcggcattggcagcagcgtggagaagtacatcattgatgaggaccacatgtccttcatcaacaaccccaacttgactgtacgggtacccattgctgtgggcgagtctgactttgagaacctcaacacagaggatgttagcagcgagtcggatcctgaaggcagcaaagataaactagatgacaccagctcctctgaaggaagcaccattgatatcaaaccagaagtagaagaggtccctgtggaacagcctgaggaatacttggatccagatgcctgcttcacagaaggttgtgtccagcggttcaagtgctgccaggtcaacatcgaggaagggctaggcaagtcttggtggatcctgcggaaaacctgcttcctcatcgtggagcacaactggtttgagaccttcatcatcttcatgattctgctgagcagtggcgccctggccttcgaggacatctacattgagcagagaaagaccatccgcaccatcctggaatatgctgacaaagtcttcacctatatcttcatcctggagatgttgctcaagtggacagcctatggcttcgtcaagttcttcaccaatgcctggtgttggctggacttcctcattgtggctgtctctttagtcagccttatagctaatgccctgggctactcggaactaggtgccataaagtcccttaggaccctaagagctttgagacccttaagagccttatcacgatttgaagggatgagggtggtggtgaatgccttggtgggcgccatcccctccatcatgaatgtgctgctggtgtgtctcatcttctggctgattttcagcatcatgggagttaacttgtttgcgggaaagtaccactactgctttaatgagacttctgaaatccgatttgaaattgaagatgtcaacaataaaactgaatgtgaaaagcttatggaggggaacaatacagagatcagatggaagaacgtgaagatcaactttgacaatgttggggcaggatacctggcccttcttcaagtagcaaccttcaaaggctggatggacatcatgtatgcagctgtagattcccggaagcctgatgagcagcctaagtatgaggacaatatctacatgtacatctattttgtcatcttcatcatcttcggctccttcttcaccctgaacctgttcattggtgtcatcattgataacttcaatcaacaaaagaaaaagttcggaggtcaggacatcttcatgaccgaagaacagaagaagtactacaatgccatgaaaaagctgggctcaaagaagccacagaaaccnattccccgccccttgaacaaaatccaaggaatcgtctttgattttgtcactcagcaagcctttgacattgttatcatgatgctcatctgccttaacatggtgacaatgatggtggagacagacactcaaagcaagcagatggagaacatcctctactggattaacctggtgtttgttatcttcttcacctgtgagtgtgtgctcaaaatgtttgcgttgaggcactactacttcaccattggctggaacatcttcgacttcgtggtagtcatcctctccattgtgggaatgttcctggcagatataattgagaaatactttgtttccccaaccctattccgagtcatccgattggcccgtattgggcgcatcttgcgtctgatcaaaggcgccaaagggattcgtaccctgctctttgccttaatgatgtccttgcctgccctgttcaacatcggccttctgctcttcctggtcatgttcatcttctccatttttgggatgtccaattttgcatatgtgaagcacgaggctggtatcgatgacatgttcaactttgagacatttggcaacagcatgatctgcctgtttcaaatcacaacctcagctggttgggatggcctgctgctgcccatcctaaaccgcccccctgactgcagcctagataaggaacacccagggagtggctttaagggagattgtgggaacccctcagtgggcatcttcttctttgtaagctacatcatcatctctttcctaattgtcgtgaacatgtacattgccatcatcctggagaacttcagtgtagccacagaggaaagtgcagaccctctgagtgaggatgactttgagaccttctatgagatctgggagaagttcgaccccgatgccacccagttcattgagtactgtaagctggcagactttgcagatgccttggagcatcctctccgagtgcccaagccnaataccattgagctcatcgctatggatctgccaatggtgagcggggatcgcatccactgcttggacatcctttttgccttcaccaagcgggtcctgggagatagcggggagttggacatcctgcggcagcagatggaagagcggttcgtggcatccaatccttccaaagtgtcttacgagccaatcacaaccacactgcgtcgcaagcaggaggaggtatctgcagtggtcctgcagcgtgcctaccggggacatttggcaaggcggggcttcatctgcaaaaagacaacttctaataagctggagaatggaggcacacaccgggagaaaaaagagagcaccccatctacagcctccctcccgtcctatgacagtgtaactaaacctgaaaaggagaaacagcagcgggcagaggaaggaagaagggaaagagccaaaagacaaaaagaggtcagagaatccaagtgttagaggagaacaaaaattcagtattatacagatctaaaactcgcaagtgaaagattgtttacaaacttcctgaatattatcaatgcagaacagctgtggagactctaacctgaagatctataccaaacgtcgtctgcttaccacgtaacacagctgcatcttgagcagtgacctgccaagggcaaaggaccccgctccctagacttacagattttctaatgcttgggcaggtggttactgcatgttccacatcagtcaatgcaacttaggacaaaactaaccagatacagaaacagaagagaggctgccgggaccagcatatttccgttgcagccaaatggattttattttttcattttattgattctcagaagcagaaagcatcactttaaaagttcgtttgttcatgcaaactatatttgcattcttacattagttaagctaagcagcaaaaagaaaacacacacacacactcacatttagcccatgtcatttaattgtcagtttctttgacataaagcgcatcttctccacatgggcttcacgtggtttggagatgggtgggggaaaacaatcaggtttcttcaggctgaggaggacttgctcaggccgattccaaacattgtccgagtccgctgcattggatcctctagacgcga

SEQ ID NO: 50614 - DNA, 775 bp, Homo sapiens
gagctcctgtgtatggtatgtgaggccagaaggcagatttcatgattgctgttttactgatggaaatacacaagagatcgaagtgacttgctcagggtcatagagggaggcagtgccatgccgaggctgaggtctttcgatttctagctcagtccagtcccaccactgcagtatctccaagccacagcattgggatttggttgtctcacagtgaaagtaaacctgtctgcactcagatccttttctccctgttgtcgggaggtgctgggacagtgggaattgtgagactggaggtccagaggctggctgtctgctaagccatccaccaggaggctgagaagtaagcctgttgtgcctgccctgccacattccagggctgttctgttctccccgagggaatgggggcctgctttatttttagctagttcagtgtgacagccttgttctctttctgggcaaggacttggccacttttaccagtcaggaagctccctttagaacctccaggccctactcaggttctcctaggaagagggggccaagggaaggggagctgaagttggagtgccgctctgcttgctgggggcctggggcatttggcttaactgcacagccctaggttccacctgcctcatgtggggttcataacagctaccttacacattgtgcagatttggatggaggagcttagagcagccagcgtgggccctgtccacattcacgttgctgggattataggcacgagccaccgcgcctggcctattattgcatcttt

SEQ ID NO: 50615 - DNA, 332 bp, Homo sapiens
ctccagagaacatacataaatgatcactcagcacaacaaaaggttgcttggcatgactgggcatcagagaaacacaaatcaaaacacaaaaccacttcacatccactaggatggctaaaataaaaaaagacaataataaatgttgccttgtacattgctggtggaatgtaaaatggtgcagtcactttggaaaacattctgacaattcctccaaaggttaaacatagttatcacgtgacccagcaattccattcctgtgtatgcacccaagaaaatggaaactgtgtatccatacaaaaacttgagcataacttcttagcaggctgctaagc

SEQ ID NO: 50616 - DNA, 344 bp, Homo sapiens
tcgaggctgcagtgagccaagatggtgctactgcagtccagcctgggtgacaaaataagaccctgtctcaaaaacaaacaaaaaaagcggaaacaaccatactaagtttacagtattgtttgtgtgcctacttggtggaagaaataaattcttagaagttacactttctttaaaaaattaaaaattaaaaactgtgcagtgttgagattagtattaccgcttatcttgctgacttgtgaaattgaattacatcacttataataatgtgaagttttagaaattgttttgatgataaagagtagcagcctttaagagaaataatataaaccatgtttcctcaaatc

SEQ ID NO: 50617 - DNA, 461 bp, Homo sapiens
attagtatccaacaagacaagaatattggctattgtgaagaatgctgctgtgaacaggggagtactactataatcttgtcttattatgattcacaatagtcaagatatggaaacaccctaactgtccattgacagataaatggataaagaaattgttgtttctctctctctctctgtgtgtgtgtgtgtgtgtgtgtgtgtgtgtgtggaaaatatatatatatagggtgatggtatatacatatatatatatatatatatggtgatggtatcaaaaagataaaatgactgctctacaattattctcattttgaatttcattttaatttacagttttcaaaactaaatgccacctgtcttttgacactgttttcattattgaaggttttatagctttaattttatattaataaaattaattatgtaaacatttgcttgcttttaggagcaaagcataggct

SEQ ID NO: 50618 - DNA, 1493 bp, Homo sapiens
acccagagagactcaggggaaattagagcatgatggcggccgaggtcgcttggcgcaaccatcgtcttttttctttatttttagctcattagtgccttgcctcggcgctgtttccctaagctcctctctccaaccagtactgccctataacggaatccatacgtgccggctccttgatttatcccctccgaagtgctgagtgtgggctggttgtgcgtcattggactgtcaggatgtcactccccagtcaaatcttcaagctattggtggaacagcaagaaagcccgtccatcaacaagggctaataccattggtttgactccactgtgttatttcctggcaccttattgggcaaataggtgcgtcagatccggattcgctctgctacggttaattgtttactggggatttggggtcaactctggttgtttggccagtagttgacgataatagtgactcccttgcctattttgtgccaagtattgggctgctttcttcacaaacattatctggttaaacctgggagtaatgcagtatccagtttttatagatgggaaattaaggctggcgagagcttagaaaacttgcccaaggtcatccagatacagagtcgttggtgggcctggcatctggtcctgggtcaaactgcagagacttcactctttttattatgctttagtgcctccaccttagacgatgtacttgtcagccaacctagcatcttaaaaacgtttcatttggaactcaaagtcttcagtcagtttctagaagtgactttgttggggacttactatggaaaggttgtcattgcctccaccacatcttcctccccaggacccattcctctcccctttaaggtagacatttctgcctccttttatgcgaagcctaggcaccactcgcaacccctgaccaaccatctacaactcattctttggagagagtcctcaagagctggaaaactaggagaaatcaagtctaaagagagagacagaataaatcgtcttagaaatgaataatttattgcatgcaaagagaacagcccttcagctcctggaaatcttccaggatagttgatgctgagcaagacgtgtgctcctggctggtggccactgggttctttccctatagcagcattcatcgaagtgaatccaacatttcagccagaggagggcaggacgcttaggacccattgccagtgagcttttgcgaccgaaatgatctccaggagcacaacgctggactctagcccacattccatcttgggtaattaacattttaccgtcccaaatccccatcccctgtagcttcagtgggatcaccgcccttgtttcacttcctgatccaagctgttgtgtaacctccttggcactgctttaataataaaacaaccattgtaacatagtaacaatgctcaacacttagagcctttcagcaaatgaagccaaggtatttcataaacgtcaattaagagtaagtggcatgtattccta

SEQ ID NO: 50619 - DNA, 283 bp, Homo sapiens
ggtgtgaaatgcagtcggcttctcctgggaaggtgactcagacagaagctttcttcacaagcatgctccccacggcctcctccctttcacctgcaccatgtctgtctcccattcaagactggcaaccccagccaggcacagtggctcatgcctgtgatcctatcattttgggaggccaaggcaggaggatcccttgaggccaggagtttgagaacaggagacaacacaacgaggctctatctgtacaaaatataacaaaacttagccaggcaaggccatgtgt

SEQ ID NO: 50620 - DNA, 4042 bp, Homo sapiens
cgaagcgggtcctgccccgctgtcagctgcggcccccggcgccgggcgggggtggccgcgaccattggcggagaggcgaaaggggcggggccgccgccagccgctgcgggcaaggctgaacaggcggaggtgggcagccggccagggaagcacggtccaggcggctacattcggcccggccatggcagcggcgcccctgaaagtgtgcatcgtgggctcggggaactggggttcagctgttgcaaaaataattggtaataatgtcaagaaacttcagaaatttgcctccacagtcaagatgtgggtctttgaagaaacagtgaatggcagaaaactgacagacatcataaataatgaccatgaaaatgtaaaatatcttcctggacacaagctgccagaaaatgtggttgccatgtcaaatcttagcgaggctgtgcaggatgcagacctgctggtgtttgtcattccccaccagttcattcacagaatctgtgatgagatcactgggagagtgcccaagaaagcgctgggaatcaccctcatcaagggcatagacgagggccccgaggggctgaagctcatttctgacatcatccgtgagaagatgggtattgacatcagtgtgctgatgggagccaacattgccaatgaggtggctgcagagaagttctgtgagaccaccatcggcagcaaagtaatggagaacggccttctcttcaaagaacttctgcagactccaaattttcgaattaccgtggttgatgatgcagacactgttgaactctgtggtgcgcttaagaacatcgtagctgtgggagctgggttctgcgacggcctccgctgtggagacaacaccaaagcggccgtcatccgcctgggactcatggaaatgattgcttttgccaggatcttctgcaaaggccaagtgtctacagccaccttcctagagagctgcggggtggccgacctgatcaccacctgttacggagggcggaaccgcagggtggccgaggccttcgccagaactgggaagaccattgaagagttggagaaggagatgctgaatgggcaaaagctccaaggaccgcagacttctgctgaagtgtaccgcatcctcaaacagaagggactactggacaagtttccattgtttactgcagtgtatcagatctgctacgaaagcagaccagttcaagagatgttgtcttgtcttcagagccatccagagcatacataaagtgaatcatgcaacgtgttgggggaagttctgcctttctgatcaatcttttgggttcacgtggaaaccaggacttggcaacatgatgtttgactgtaatctcatcacggatatgtatgaatttttacaggttcgtttttgaattgtgagaggcagttcattagcaaagatgtactgggcagtaactaaacacacatgcaaacatgtgaatggtggtttattcctcattctgtggatgtttctatgagccaaaatttgatgtctttttttcaaaattgcttatgaaatttccacacaatcgtagcttataagattggaacgatctcagccaaatattttaggtgtaattcatatgtatttgagtggaggattttttttctcatttttctagtgttaaattttaaccagcattaacatggtagagtggaggagtgagtgtgttcaaagatcaacatatttaacttttaaacactatctcaaagccagcataattaactactttgattgtgggctgacctttgtttttttaacaatcaggcatttttaattagataatccactcatgtatttccccctcactgcagttgtctgcatttttagcctcttttctcttcgttagttgtcagaatatgccttcgtcaaggctcagaggtaacaagacagaaaattcatctgggattttcctgctgtggctggcacattcttctgattaacagacacttgtatgatgctttaggctagttagtgcattttttagcaaacatttatcttaaacatcacagatccactggggggtgcaaggggctactgttagtcctcttgttagatgcagtcactcctcctggtcacctagtgagcagggacagagccaggagtcaagtgcagtgccaaggtgcatgaccctctgagaagtcactgggctgatttgacctccgactcattggttgtgcaaatgccatgtgcagcctttcctgaggccataggagggcttcctgcagctgagatctatgcaggccatcctctcaacaggtgccactccaagggcggtcctcggtgcagcagcagcagcttcacttgtgggggggtgggggaaggggcggtctcagaaatgcaggttcccaggtcccaccctggacttctgaaggggtgtggcatctgtgtttctgatgcttactacaatatgtgaaccactactttagaaaatctgctttaacttggtattcctctaattgtgttccctaggaaatgactgtcccaagagccagtgattattccaggtgttccctggaaaggtcaagtgagtctgggaaacactatgtctgtacacctcttgaaggtgtcgaatgtatgtttatacatcagtggaacccatttttctagcctagcaagtcccaaacacattacactgaagagattttggtgaggaaacttgctggagttttcagggaacactgttctaggcttaggtgaccttaggatcactcaagtagacccttcactccctgcgagaaattaggatgaataactacctgtggcattgttggttctgaacttttacagttcaggcctgctgtgaatctttgatgaagctttaaggtgacactgttgtacaagatgtcagctttgctgaaacgcacattacctggaataagtgctttaattgtagaattagaatgggatttactgtactgttttaaatgagattggcttcagaatccattacagttaccttacatagcacttgatacgtgttaaatgaacatatgaatgtaatttatatattcctagaatttaagttactttgtgagatttgggcctgtccctcaatgccagtttaggatttctttttttctataccttgaaatgattataaaatagattttcatgggaattttaaaaactctatccaaaacatttttggagcattttaaagccccatacacagaagtatacgaaagcacacaaaacactccaagtttcagcagttttagcgccaccattaacccactttgcttgtctcatgaaaaatctttgttaaagtttgtacacaggtaacaaaaagttactttaaaagatatataaagggctgtaagctaattgtggtgtctagtaagtagcataatgagatgtgaggagttggaactttgcgtgttttgcgtattttcatctgcattcagcttcttactctgggtttgtactcgagtgttatttctttacaaatgcccttgtaattaccactctgaagtctgctgactgtgtctcttgaacatacttaggatattctgcacattatggaaaaaggtaaattttagaagtttctgctctactaactgtagatatttatgactctgcgagttatctatttttataaccacctgtggtccattgttcattttaattcacatttcttatgaagtatggtaacagggagggagacacctagattagcagctcaatttgtactacttcagccaatctgtgaatgtaaaaactacactgttgccttgctaggatccaccctcctataatatggaacaaatatctgaatgaaatccaccctaggagacggagtcaaactaaacttgtggtttttcatttaacttttgactacagcatggccccatggcatccacaccaagagggtgttgtgatgaggtgccggtgtgcaaagggaactttagtttttccactggttcttatctgctagccttttacatacatgtgtactatatttgtttatagactgtaggtggatatataatttaaaagcttgatttaataaacatttaaccccctaaacttgca

SEQ ID NO: 50621 - DNA, 343 bp, Homo sapiens
gcggccgcctactactactaaattcgcggccgcgtcgacgccttgctaggatccaccctcctataatatggaacaaatatctgaatgaaatccaccctaggagacggagtcaaactaaacttgtggtttttcatttaacttttgactacagcatggccccatggcatccacaccaagagggtgttgtgatgaggtgccggtgtgcaaagggaactttagtttttccactggttcttatctgctagccttttacatacatgtgtactatatttgtttatagactgtaggtggatatataatttaaaagcttgatttaataaacatttaaccccctaaacttgca

SEQ ID NO: 50622 - DNA, 2814 bp, Homo sapiens
gagagagagagagagagagagagagagagagaggaagttctgcctttctgatcaatcttttgggttcacgtggaaaccaggacttggcaacatgatgtttgactgtaatctcatcacggatatgtatgaatttttacaggttcgtttttgaattgtgagaggcagttcattagcaaagatgtactgggcagtaactaaacacacatgcaaacatgtgaatggtggtttattcctcattctgtggatgtttctatgagccaaaatttgatgtctttttttcaaaattgcttatgaaatttccacacaatcgtagcttataagattggaacgatctcagccaaatattttaggtgtaattcatatgtatttgagtggaggattttttttctcatttttctagtgttaaattttaaccagcattaacatggtagagtggaggagtgagtgtgttcaaagatcaacatatttaacttttaaacactatctcaaagccagcataattaactactttgattgtgggctgacctttgtttttttaacaatcaggcatttttaattagataatccactcatgtatttccccctcactgcagttgtctgcatttttagcctcttttctcttcgttagttgtcagaatatgccttcgtcaaggctcagaggtaacaagacagaaaattcatctgggattttcctgctgtggctggcacattcttctgattaacagacacttgtatgatgctttaggctagttagtgcattttttagcaaacatttatcttaaacatcacagatccactggggggtgcaaggggctactgttagtcctcttgttagatgcagtcactcctcctggtcacctagtgagcagggacagagccaggagtcaagtgcagtgccaaggtgcatgaccctctgagaagtcactgggctgatttgacctccgactcattggttgtgcaaatgccatgtgcagcctttcctgaggccataggagggcttcctgcagctgagatctatgcaggccatcctctcaacaggtgccactccaagggcggtcctcggtgcagcagcagcagcttcacttgtgggggggtgggggaaggggcggtctcagaaatgcaggttcccaggtcccaccctggacttctgaaggggtgtggcatctgtgtttctgatgcttactacaatatgtgaaccactactttagaaaatctgctttaacttggtattcctctaattgtgttccctaggaaatgactgtcccaagagccagtgattattccaggtgttccctggaaaggtcaagtgagtctgggaaacactatgtctgtacacctcttgaaggtgtcgaatgtatgtttatacatcagtggaacccatttttctagcctagcaagtcccaaacacattacactgaagagattttggtgaggaaacttgctggagttttcagggaacactgttctaggcttaggtgaccttaggatcactcaagtagacccttcactccctgcgagaaattaggatgaataactacctgtggcattgttggttctgaacttttacagttcaggcctgctgtgaatctttgatgaagctttaaggtgacactgttgtacaagatgtcagctttgctgaaacgcacattacctggaataagtgctttaattgtagaattagaatgggatttactgtactgttttaaatgagattggcttcagaatccattacagttaccttacatagcacttgatacgtgttaaatgaacatatgaatgtaatttatatattcctagaatttaagttactttgtgagatttgggcctgtccctcaatgccagtttaggatttctttttttctataccttgaaatgattataaaatagattttcatgggaattttaaaaactctatccaaaacatttttggagcattttaaagccccatacacagaagtatacgaaagcacacaaaacactccaagtttcagcagttttagcgccaccattaacccactttgcttgtctcatgaaaaatctttgttaaagtttgtacacaggtaacaaaaagttactttaaaagatatataaagggctgtaagctaattgtggtgtctagtaagtagcataatgagatgtgaggagttggaactttgcgtgttttgcgtattttcatctgcattcagcttcttactctgggtttgtactcgagtgttatttctttacaaatgcccttgtaattaccactctgaagtctgctgactgtgtctcttgaacatacttaggatattctgcacattatggaaaaaggtaaattttagaagtttctgctctactaactgtagatatttatgactctgcgagttatctatttttataaccacctgtggtccattgttcattttaattcacatttcttatgaagtatggtaacagggagggagacacctagattagcagctcaatttgtactacttcagccaatctgtgaatgtaaaaactacactgttgccttgctaggatccaccctcctataatatggaacaaatatctgaatgaaatccaccctaggagacggagtcaaactaaacttgtggtttttcatttaacttttgactacagcatggccccatggcatccacaccaagagggtgttgtgatgaggtgccggtgtgcaaagggaactttagtttttccactggttcttatctgctagccttttacatacatgtgtactatatttgtttatagactgtaggtggatatataatttaaaagcttgatttaataaacatttaaccccctaaacttgca

SEQ ID NO: 50623 - DNA, 792 bp, Homo sapiens
gaggtgttctagaggatccctgcataggttcgcaggaggtaacaaaaagttactttaaaagatatataaagggctgtaagctaattgtggtgtctagtaagtagcataatgagatgtgaggagttggaactttgcgtgttttgcgtattttcatctgcattcagcttcttactctgggtttgtactcgagtgttatttctttacaaatgcccttgtaattaccactctgaagtctgctgactgtgtctcttgaacatacttaggatattctgcacattatggaaaaaggtaaattttagaagtttctgctctactaactgtagatatttatgactctgcgagttatctatttttataaccacctgtggtccattgttcattttaattcacatttcttatgaagtatggtaacagggagggagacacctagattagcagctcaatttgtactacttcagccaatctgtgaatgtaaaaactacactgttgccttgctaggatccaccctcctataatatggaacaaatatctgaatgaaatccaccctaggagacggagtcaaactaaacttgtggtttttcatttaacttttgactacagcatggccccatggcatccacaccaagagggtgttgtgatgaggtgccggtgtgcaaagggaactttagtttttccactggttcttatctgctagccttttacatacatgtgtactatatttgtttatagactgtaggtggatatataatttaaaagcttgatttaataaacatttaaccccctaaacttgca

SEQ ID NO: 50624 - DNA, 4195 bp, Homo sapiens
cgaagcgggtcctgccccgctgtcagctgcggcccccggcgccgggcgggggtggccgcgaccattggcggagaggcgaaaggggcggggccgccgccagccgctgcgggcaaggctgaacaggcggaggtgggcagccggccagggaagcacggtccaggcggctacattcggcccggccatggcagcggcgcccctgaaagtgtgcatcgtgggctcggggaactggttgccatgtcaaatcttagcgaggctgtgcaggatgcagacctgctggtgtttgtcattccccaccagttcattcacagaatctgtgatgagatcactgggagagtgcccaagaaagcgctgggaatcaccctcatcaagggcatagacgagggccccgaggggctgaagctcatttctgacatcatccgtgagaagatgggtattgacatcagtgtgctgatgggagccaacattgccaatgaggtggctgcagagaagttctgtgagaccaccatcggcagcaaagtaatggagaacggccttctcttcaaagaacttctgcagactccaaattttcgaattaccgtggttgatgatgcagacactgttgaactctgtggtgcgcttaagaacatcgtagctgtgggagctgggttctgcgacggcctccgctgtggagacaacaccaaagcggccgtcatccgcctgggactcatggaaatgattgcttttgccaggatcttctgcaaaggccaagtgtctacagccaccttcctagagagctgcggggtggccgacctgatcaccacctgttacggagggcggaaccgcagggtggccgaggccttcgccagaactgggaagaccattgaagagttggagaaggagatgctgaatgggcaaaagctccaaggaccgcagacttctgctgaagtgtaccgcatcctcaaacagaagggactactggacaagtttccattgtttactgcagtgtatcagatctgctacgaaagcagaccagttcaagagatgttgtcttgtcttcagagccatccagagcatacataaagtgaatcatgcaacgtgttgggggaagttctgcctttctgatcaatcttttgggttcacgtggaaaccaggacttggcaacatgatgtttgactgtaatctcatcacggatatgtatgaatttttacaggttcgtttttgaattgtgagaggcagttcattagcaaagatgtactgggcagtaactaaacacacatgcaaacatgtgaatggtggtttattcctcattctgtggatgtttctatgagccaaaatttgatgtctttttttcaaaattgcttatgaaatttccacacaatcgtagcttataagattggaacgatctcagccaaatattttaggtgtaattcatatgtatttgagtggaggattttttttctcatttttctagtgttaaattttaaccagcattaacatggtagagtggaggagtgagtgtgttcaaagatcaacatatttaacttttaaacactatctcaaagccagcataattaactactttgattgtgggctgacctttgtttttttaacaatcaggcatttttaattagataatccactcatgtatttccccctcactgcagttgtctgcatttttagcctcttttctcttcgttagttgtcagaatatgccttcgtcaaggctcagaggtaacaagacagaaaattcatctgggattttcctgctgtggctggcacattcttctgattaacagacacttgtatgatgctttaggctagttagtgcattttttagcaaacatttatcttaaacatcacagatccactggggggtgcaaggggctactgttagtcctcttgttagatgcagtcactcctcctggtcacctagtgagcagggacagagccaggagtcaagtgcagtgccaaggtgcatgaccctctgagaagtcactgggctgatttgacctccgactcattggttgtgcaaatgccatgtgcagcctttcctgaggccataggagggcttcctgcagctgagatctatgcaggccatcctctcaacaggtgccactccaagggcggtcctcggtgcagcagcagcagcttcacttgtgggggggtgggggaaggggcggtctcagaaatgcaggttcccaggtcccaccctggacttctgaaggggtgtggcatctgtgtttctgatgcttactacaatatgtgaaccactactttagaaaatctgctttaacttggtattcctctaattgtgttccctaggaaatgactgtcccaagagccagtgattattccaggtgttccctggaaaggtcaagtgagtctgggaaacactatgtctgtacacctcttgaaggtgtcgaatgtatgtttatacatcagtggaacccatttttctagcctagcaagtcccaaacacattacactgaagagattttggtgaggaaacttgctggagttttcagggaacactgttctaggcttaggtgaccttaggatcactcaagtagacccttcactccctgcgagaaattaggatgaataactacctgtggcattgttggttctgaacttttacagttcaggcctgctgtgaatctttgatgaagctttaaggtgacactgttgtacaagatgtcagctttgctgaaacgcacattacctggaataagtgctttaattgtagaattagaatgggatttactgtactgttttaaatgagattggcttcagaatccattacagttaccttacatagcacttgatacgtgttaaatgaacatatgaatgtaatttatatattcctagaatttaagttactttgtgagatttgggcctgtccctcaatgccagtttaggatttctttttttctataccttgaaatgattataaaatagattttcatgggaattttaaaaactctatccaaaacatttttggagcattttaaagccccatacacagaagtatacgaaagcacacaaaacactccaagtttcagcagttttagcgccaccattaacccactttgcttgtctcatgaaaaatctttgttaaagtttgtacacaggtaacaaaaagttactttaaaagatatataaagggctgtaagctaattgtggtgtctagtaagtagcataatgagatgtgaggagttggaactttgcgtgttttgcgtattttcatctgcattcagcttcttactctgggtttgtactcgagtgttatttctttacaaatgcccttgtaattaccactctgaagtctgctgactgtgtctcttgaacatacttaggatattctgcacattatggaaaaaggtaaattttagaagtttctgctctactaactgtagatatttatgactctgcgagttatctatttttataaccacctgtggtccattgttcattttaattcacatttcttatgaagtatggtaacagggagggagacacctagattagcagctcaatttgtactacttcagccaatctgtgaatgtaaaaactacactgttgccttgctaggatccaccctcctataatatggaacaaatatctgaatgaaatccaccctaggagacggagtcaaactaaacttgtggtttttcatttaacttttgactacagcatggccccatggcatccacaccaagagggtgttgtgatgaggtgccggtgtgcaaagggaactttagtttttccactggttcttatctgctagccttttacatacatgtgtactatatttgtttatagactgtaggtggatatataatttaaaagcttgatttaataaacatttaaccccctaaacttgcaaaaaaaaaaaaaaaaaaaaaaaaaaaaaaaaaaaaaaaaaagagggggggggggcgcccaaaaattcccccgggggggccccatttacggtcccccggtttgttgtgtgtcaccagagggggcccccctaaatggggaggcacagctgatataaagcagccgaggcacgcagcggcgcgtgttaacacaacacgtggtcgaggtcggggaacaagcgcgtcacgcgtgcgcacacctggtgggagagagaaccccatcactcgcgggcggggggacccatcggcggcgcgaacatcacctcgcgagaaattaaagacctcaagggacaaca

SEQ ID NO: 50625 - DNA, 3626 bp, Homo sapiens
cgaagcgggtcctgccccgctgtcagctgcggcccccggcgccgggcgggggtggccgcgaccattggcggagaggcgaaaggggcggggccgccgccagccgctgcgggcaaggctgaacaggcggaggtgggcagccggccagggaagcacggtccaggcggctacattcggcccggccatggcagcggcgcccctgaaagtgtgcatcgtgggctcggggaactggttgccatgtcaaatcttagcgaggctgtgcaggatgcagacctgctggtgtttgtcattccccaccagttcattcacagaatctgtgatgagatcactgggagagtgcccaagaaagcgctgggaatcaccctcatcaagggcatagacgagggccccgaggggctgaagctcatttctgacatcatccgtgagaagatgggtattgacatcagtgtgctgatgggagccaacattgccaatgaggtggctgcagagaagttctgtgagaccaccatcggcagcaaagtaatggagaacggccttctcttcaaagaacttctgcagactccaaattttcgaattaccgtggttgatgatgcagacactgttgaactctgtggtgcgcttaagaacatcgtagctgtgggagctgggttctgcgacggcctccgctgtggagacaacaccaaagcggccgtcatccgcctgggactcatggaaatgattgcttttgccaggatcttctgcaaaggccaagtgtctacagccaccttcctagagagctgcggggtggccgacctgatcaccacctgttacggagggcggaaccgcagggtggccgaggccttcgccagaactgggaagaccattgaagagttggagaaggagatgctgaatgggcaaaagctccaaggaccgcagacttctgctgaagtgtaccgcatcctcaaacagaagggactactggacaagtttccattgtttactgcagtgtatcagatctgctacgaaagcagaccagttcaagagatgttgtcttgtcttcagagccatccagagcatacataaagtgaatcatgcaacgtgttgggggaagttctgcctttctgatcaatcttttgggttcacgtggaaaccaggacttggcaacatgatgtttgactgtaatctcatcacggatatgtatgaatttttacaggttcgtttttgaattgtgagaggcagttcattagcaaagatgtactgggcagtaactaaacacacatgcaaacatgtgaatggtggtttattcctcattctgtggatgtttctatgagccaaaatttgatgtctttttttcaaaattgcttatgaaatttccacacaatcgtagcttataagattggaacgatctcagccaaatattttaggtgtaattcatatgtatttgagtggaggattttttttctcatttttctagtgttaaattttaaccagcattaacatggtagagtggaggagtgagtgtgttcaaagatcaacatatttaacttttaaacactatctcaaagccagcataattaactactttgattgtgggctgacctttgtttttttaacaatcaggcatttttaattagataatccactcatgtatttccccctcactgcagttgtctgcatttttagcctcttttctcttcgttagttgtcagaatatgccttcgtcaaggctcagaggtaacaagacagaaaattcatctgggattttcctgctgtggctggcacattcttctgattaacagacacttgtatgatgctttaggctagttagtgcattttttagcaaacatttatcttaaacatcacagatccactggggggtgcaaggggctactgttagtcctcttgttagatgcagtcactcctcctggtcacctagtgagcagggacagagccaggagtcaagtgcagtgccaaggtgcatgaccctctgagaagtcactgggctgatttgacctccgactcattggttgtgcaaatgccatgtgcagcctttcctgaggccataggagggcttcctgcagctgagatctatgcaggccatcctctcaacaggtgccactccaagggcggtcctcggtgcagcagcagcagcttcacttgtgggggggtgggggaaggggcggtctcagaaatgcaggttcccaggtcccaccctggacttctgaaggggtgtggcatctgtgtttctgatgcttactacaatatgtgaaccactactttagaaaatctgctttaacttggtattcctctaattgtgttccctaggaaatgactgtcccaagagccagtgattattccaggtgttccctggaaaggtcaagtgagtctgggaaacactatgtctgtacacctcttgaaggtgtcgaatgtatgtttatacatcagtggaacccatttttctagcctagcaagtcccaaacacattacactgaagagattttggtgaggaaacttgctggagttttcagggaacactgttctaggcttaggtgaccttaggatcactcaagtagacccttcactccctgcgagaaattaggatgaataactacctgtggcattgttggttctgaacttttacagttcaggcctgctgtgaatctttgatgaagctttaaggtgacactgttgtacaagatgtcagctttgctgaaacgcacattacctggaataagtgctttaattgtagaattagaatgggatttactgtactgttttaaatgagattggcttcagaatccattacagttaccttacatagcacttgatacgtgttaaatgaacatatgaatgtaatttatatattcctagaatttaagttactttgtgagatttgggcctgtccctcaatgccagtttaggatttctttttttctataccttgaaatgattataaaatagattttcatgggaattttaaaaactctatccaaaacatttttggagcattttaaagccccatacacagaagtatacgaaagcacacaaaacactccaagtttcagcagttttagcgccaccattaacccactttgcttgtctcatgaaaaatctttgttaaagtttgtacacaggtaacaaaaagttactttaaaagatatataaagggctgtaagctaattgtggtgtctagtaagtagcataatgagatgtgaggagttggaactttgcgtgttttgcgtattttcatctgcattcagcttcttactctgggtttgtactcgagtgttatttctttacaaatgcccttgtaattaccactctgaagtctgctgactgtgtctcttgaacatacttaggatattctgcacattatggaaaaaatatctgaatgaaatccaccctaggagacggagtcaaactaaacttgtggtttttcatttaacttttgactacagcatggccccatggcatccacaccaagagggtgttgtgatgaggtgccggtgtgcaaagggaactttagtttttccactggttcttatctgctagccttttacatacatgtgtactatatttgtttatagactgtaggtggatatataatttaaaagcttgatttaataaacatttaaccccctaaacttgca

SEQ ID NO: 50626 - DNA, 2579 bp, Homo sapiens
  misc_feature (2153)..(2153): n is a, c, g, or t
  misc_feature (2156)..(2156): n is a, c, g, or t
  misc_feature (2166)..(2166): n is a, c, g, or t
  misc_feature (2168)..(2168): n is a, c, g, or t
  misc_feature (2176)..(2176): n is a, c, g, or t
  misc_feature (2178)..(2178): n is a, c, g, or t
  misc_feature (2190)..(2190): n is a, c, g, or t
  misc_feature (2400)..(2400): n is a, c, g, or t
  misc_feature (2456)..(2456): n is a, c, g, or t
  misc_feature (2579)..(2579): n is a, c, g, or t
cgaagcgggtcctgccccgctgtcagctgcggcccccggcgccgggcgggggtggccgcgaccattggcggagaggcgaaaggggcggggccgccgccagccgctgcgggcaaggctgaacaggcggaggtgggcagccggccagggaagcacggtccaggcggctacattcggcccggccatggcagcggcgcccctgaaagtgtgcatcgtgggctcggggaactggttgccatgtcaaatcttagcgaggctgtgcaggatgcagacctgctggtgtttgtcattccccaccagttcattcacagaatctgtgatgagatcactgggagagtgcccaagaaagcgctgggaatcaccctcatcaagggcatagacgagggccccgaggggctgaagctcatttctgacatcatccgtgagaagatgggtattgacatcagtgtgctgatgggagccaacattgccaatgaggtggctgcagagaagttctgtgagaccaccatcggcagcaaagtaatggagaacggccttctcttcaaagaacttctgcagactccaaattttcgaattaccgtggttgatgatgcagacactgttgaactctgtggtgcgcttaagaacatcgtagctgtgggagctgggttctgcgacggcctccgctgtggagacaacaccaaagcggccgtcatccgcctgggactcatggaaatgattgcttttgccaggatcttctgcaaaggccaagtgtctacagccaccttcctagagagctgcggggtggccgacctgatcaccacctgttacggagggcggaaccgcagggtggccgaggccttcgccagaactgggaagaccattgaagagttggagaaggagatgctgaatgggcaaaagctccaaggaccgcagacttctgctgaagtgtaccgcatcctcaaacagaagggactactggacaagtttccattgtttactgcagtgtatcagatctgctacgaaagcagaccagttcaagagatgttgtcttgtcttcagagccatccagagcatacataaagtgaatcatgcaacgtgttgggggaagttctgcctttctgatcaatcttttgggttcacgtggaaaccaggacttggcaacatgatgtttgactgtaatctcatcacggatatgtatgaatttttacaggttcgtttttgaattgtgagaggcagttcattagcaaagatgtactgggcagtaactaaacacacatgcaaacatgtgaatggtggtttattcctcattctgtggatgtttctatgagccaaaatttgatgtctttttttcaaaattgcttatgaaatttccacacaatcgtagcttataagattggaacgatctcagccaaatattttaggtgtaattcatatgtatttgagtggaggattttttttctcatttttctagtgttaaattttaaccagcattaacatggtagagtggaggagtgagtgtgttcaaagatcaacatatttaacttttaaacactatctcaaagccagcataattaactactttgattgtgggctgacctttgtttttttaacaatcaggcatttttaattagataatccactcatgtatttccccctcactgcagttgtctgcatttttagcctcttttctcttcgttagttgtcagaatatgccttcgtcaaggctcagaggtaacaagacagaaaattcatctgggattttcctgctgtggctggcacattcttctgattaacagacacttgtatgatgctttaggctagttagtgcattttttagcaaacatttatcttaaacatcacagatccactggggggtgcaaggggctactgttagtcctcttgttagatgcagtcactcctcctggtcacctagtgagcagggacagagccaggagtcaagtgcagtgccaaggtgcatgaccctctgagaagtcactgggctgatttgacctccgactcattggttgtgcaaatgccatgtgcagcctttcctgaggccataggagggcttcctgcagctgagatctatgcaggccatcctctcaacaggtgccactccaagggcggtcctcggtgcagcagcagcagcttcacttgtgggggggtggtacttnttnattttacttnantaataatnantttttataattnccaatttacctccttttattacaacattcacttttctaaatttaactctttacactcccaaaatcatattttataaaaaaaacttcattacccattattacctctttctttcccaaacctccttccatacatcaatattttaattttaataacttctcaacaagaaaaaaaaacattaaacttcactcatccaaaaaatacccctacaantcacaccccttttttttacaccttttattccaacattttttcaatcctaacaactnaatcccttaattaaaaaaaataataacattcttttacaccttttttaaaaaacttttttatattccccctttttccccctcttttccccaccccccctttttcttcctctcccccttccaccn

SEQ ID NO: 50627 - DNA, 154 bp, Homo sapiens
ttgatataagaggagaaacggtcttctctgccttttggttgcaggttgccatgtcaaatcttagcgaggctgtgcaggatgcagacctgctggtgtttgtcattccccaccagttcattcacagaatctgtgatgagatcactgggagagtgcc

SEQ ID NO: 50628 - DNA, 3864 bp, Homo sapiens
cgaagcgggtcctgccccgctgtcagctgcggcccccggcgccgggcgggggtggccgcgaccattggcggagaggcgaaaggggcggggccgccgccagccgctgcgggcaaggctgaacaggcggaggtgggcagccggccagggaagcacggtccaggcggctacattcggcccggccatggcagcggcgcccctgaaagtgtgcatcgtgggctcggggaactggttgccatgtcaaatcttagcgaggctgtgcaggatgcagacctgctggtgtttgtcattccccaccagttcattcacagaatctgtgatgagatcactgggagagtgcccaagaaagcgctgggaatcaccctcatcaagggcatagacgagggccccgaggggctgaagctcatttctgacatcatccgtgagaagatgggtattgacatcagtgtgctgatgggagccaacattgccaatgaggtggctgcagagaagttctgtgagaccaccatcggcagcaaagtaatggagaacggccttctcttcaaagaacttctgcagactccaaattttcgaattaccgtggttgatgatgcagacactgttgaactctgtggtgcgcttaagaacatcgtagctgtgggagctgggttctgcgacggcctccgctgtggagacaacaccaaagcggccgtcatccgcctgggactcatggaaatgattgcttttgccaggatcttctgcaaaggccaagtgtctacagccaccttcctagagagctgcggggtggccgacctgatcaccacctgttacggagggcggaaccgcagggtggccgaggccttcgccagaactgggaagaccattgaagagttggagaaggagatgctgaatgggcaaaagctccaaggaccgcagacttctgctgaagtgtaccgcatcctcaaacagaagggactactggacaagtttccattgtttactgcagtgtatcagatctgctacgaaagcagaccagttcaagagatgttgtcttgtcttcagagccatccagagcatacataaagtgaatcatgcaacgtgttgggggaagttctgcctttctgatcaatcttttgggttcacgtggaaaccaggacttggcaacatgatgtttgactgtaatctcatcacggatatgtatgaatttttacaggttcgtttttgaattgtgagaggcagttcattagcaaagatgtactgggcagtaactaaacacacatgcaaacatgtgaatggtggtttattcctcattctgtggatgtttctatgagccaaaatttgatgtctttttttcaaaattgcttatgaaatttccacacaatcgtagcttataagattggaacgatctcagccaaatattttaggtgtaattcatatgtatttgagtggaggattttttttctcatttttctagtgttaaattttaaccagcattaacatggtagagtggaggagtgagtgtgttcaaagatcaacatatttaacttttaaacactatctcaaagccagcataattaactactttgattgtgggctgacctttgtttttttaacaatcaggcatttttaattagataatccactcatgtatttccccctcactgcagttgtctgcatttttagcctcttttctcttcgttagttgtcagaatatgccttcgtcaaggctcagaggtaacaagacagaaaattcatctgggattttcctgctgtggctggcacattcttctgattaacagacacttgtatgatgctttaggctagttagtgcattttttagcaaacatttatcttaaacatcacagatccactggggggtgcaaggggctactgttagtcctcttgttagatgcagtcactcctcctggtcacctagtgagcagggacagagccaggagtcaagtgcagtgccaaggtgcatgaccctctgagaagtcactgggctgatttgacctccgactcattggttgtgcaaatgccatgtgcagcctttcctgaggccataggagggcttcctgcagctgagatctatgcaggccatcctctcaacaggtgccactccaagggcggtcctcggtgcagcagcagcagcttcacttgtgggggggtgggggaaggggcggtctcagaaatgcaggttcccaggtcccaccctggacttctgaaggggtgtggcatctgtgtttctgatgcttactacaatatgtgaaccactactttagaaaatctgctttaacttggtattcctctaattgtgttccctaggaaatgactgtcccaagagccagtgattattccaggtgttccctggaaaggtcaagtgagtctgggaaacactatgtctgtacacctcttgaaggtgtcgaatgtatgtttatacatcagtggaacccatttttctagcctagcaagtcccaaacacattacactgaagagattttggtgaggaaacttgctggagttttcagggaacactgttctaggcttaggtgaccttaggatcactcaagtagacccttcactccctgcgagaaattaggatgaataactacctgtggcattgttggttctgaacttttacagttcaggcctgctgtgaatctttgatgaagctttaaggtgacactgttgtacaagatgtcagctttgctgaaacgcacattacctggaataagtgctttaattgtagaattagaatgggatttactgtactgttttaaatgagattggcttcagaatccattacagttaccttacatagcacttgatacgtgttaaatgaacatatgaatgtaatttatatattcctagaatttaagttactttgtgagatttgggcctgtccctcaatgccagtttaggatttctttttttctataccttgaaatgattataaaatagattttcatgggaattttaaaaactctatccaaaacatttttggagcattttaaagccccatacacagaagtatacgaaagcacacaaaacactccaagtttcagcagttttagcgccaccattaacccactttgcttgtctcatgaaaaatctttgttaaagtttgtacacaggtaacaaaaagttactttaaaagatatataaagggctgtaagctaattgtggtgtctagtaagtagcataatgagatgtgaggagttggaactttgcgtgttttgcgtattttcatctgcattcagcttcttactctgggtttgtactcgagtgttatttctttacaaatgcccttgtaattaccactctgaagtctgctgactgtgtctcttgaacatacttaggatattctgcacattatggaaaaaggtaaattttagaagtttctgctctactaactgtagatatttatgactctgcgagttatctatttttataaccacctgtggtccattgttcattttaattcacatttcttatgaagtatggtaacagggagggagacacctagattagcagctcaatttgtactacttcagccaatctgtgaatgtaaaaactacactgttgccttgctaggatccaccctcctataatatggaacaaatatctgaatgaaatccaccctaggagacggagtcaaactaaacttgtggtttttcatttaacttttgactacagcatggccccatggcatccacaccaagagggtgttgtgatgaggtgccggtgtgcaaagggaactttagtttttccactggttcttatctgctagccttttacatacatgtgtactatatttgtttatagactgtaggtggatatataatttaaaagcttgatttaataaacatttaaccccctaaacttgca

SEQ ID NO: 50629 - DNA, 2732 bp, Homo sapiens
cgaagcgggtcctgccccgctgtcagctgcggcccccggcgccgggcgggggtggccgcgaccattggcggagaggcgaaaggggcggggccgccgccagccgctgcgggcaaggctgaacaggcggaggtgggcagccggccagggaagcacggtccaggcggctacattcggcccggccatggcagcggcgcccctgaaagtgtgcatcgtgggctcggggaactggttgccatgtcaaatcttagcgaggctgtgcaggatgcagacctgctggtgtttgtcattccccaccagttcattcacagaatctgtgatgagatcactgggagagtgcccaagaaagcgctgggaatcaccctcatcaagggcatagacgagggccccgaggggctgaagctcatttctgacatcatccgtgagaagatgggtattgacatcagtgtgctgatgggagccaacattgccaatgaggtggctgcagagaagttctgtgagaccaccatcggcagcaaagtaatggagaacggccttctcttcaaagaacttctgcagactccaaattttcgaattaccgtggttgatgatgcagacactgttgaactctgtggtgcgcttaagaacatcgtagctgtgggagctgggttctgcgacggcctccgctgtggagacaacaccaaagcggccgtcatccgcctgggactcatggaaatgattgcttttgccaggatcttctgcaaaggccaagtgtctacagccaccttcctagagagctgcggggtggccgacctgatcaccacctgttacggagggcggaaccgcagggtggccgaggccttcgccagaactgggaagaccattgaagagttggagaaggagatgctgaatgggcaaaagctccaaggaccgcagacttctgctgaagtgtaccgcatcctcaaacagaagggactactggacaagtttccattgtttactgcagtgtatcagatctgctacgaaagcagaccagttcaagagatgttgtcttgtcttcagagccatccagagcatacataaagtgaatcatgcaacgtgttgggggaagttctgcctttctgatcaatcttttgggttcacgtggaaaccaggacttggcaacatgatgtttgactgtaatctcatcacggatatgtatgaatttttacaggttcgtttttgaattgtgagaggcagttcattagcaaagatgtactgggcagtaactaaacacacatgcaaacatgtgaatggtggtttattcctcattctgtggatgtttctatgagccaaaatttgatgtctttttttcaaaattgcttatgaaatttccacacaatcgtagcttataagattggaacgatctcagccaaatattttaggtgtaattcatatgtatttgagtggaggattttttttctcatttttctagtgttaaattttaaccagcattaacatggtagagtggaggagtgagtgtgttcaaagatcaacatatttaacttttaaacactatctcaaagccagcataattaactactttgattgtgggctgacctttgtttttttaacaatcaggcatttttaattagataatccactcatgtatttccccctcactgcagttgtctgcatttttagcctcttttctcttcgttagttgtcagaatatgccttcgtcaaggctcagaggtaacaagacagaaaattcatctgggattttcctgctgtggctggcacattcttctgattaacagacacttgtatgatgctttaggctagttagtgcattttttagcaaacatttatcttaaacatcacagatccactggggggtgcaaggggctactgttagtcctcttgttagatgcagtcactcctcctggtcacctagtgagcagggacagagccaggagtcaagtgcagtgccaaggtgcatgaccctctgagaagtcactgggctgatttgacctccgactcattggttgtgcaaatgccatgtgcagcctttcctgaggccataggagggcttcctgcagctgagatctatgcaggccatcctctcaacaggtgccactccaagggcggtcctcggtgcagcagcagcagcttcacttgtgggggggtgggggaaggggcggtctcagaaatgcaggttcccaggtcccaccctggacttctgaaggggtgtggcatctgtgtttctgatgcttactacaatatgtgaaccactactttagaaaatctgctttaacttggtattcctctaattgtgttccctaggaaatgactgtcccaagagccagtgattattccaggtgttccctggaaaggtcaagtgagtctgggaaacactatgtctgtacacctcttgaaggtgtcgaatgtatgtttatacatcagtggaacccatttttctagcctagcaagtcccaaacacattacactgaagagattttggtgaggaaacttgctggagttttcagggaacactgttctaggcttaggtgaccttaggatcactcaagtagacccttcactccctgcgagaaattaggatgaataactacctgtggcattgttggttctgaacttttacagttcaggcctgctgtgaatctttgatgaagctttaaggtgacactgttgtacaagatgtcagctttgctgaaacgcacaactccggcacaactcttctcagtagtctcgagtcc

SEQ ID NO: 50630 - DNA, 216 bp, Homo sapiens
  misc_feature (3)..(8): n is a, c, g, or t
  misc_feature (11)..(11): n is a, c, g, or t
  misc_feature (95)..(95): n is a, c, g, or t
cannnnnncgncttcagctgtaaaggacctggccagaatgtggctgtgaccagggcacaccctgactcccaagggaggcggcggcggcctgagcngggggcccgaggaggccaggtgttttacaacagcgagtatggggagctgtcggagccaagcgaggaggaccactgctccccgtctgcccgcgtgactttcttcacagacaacagctactaa

SEQ ID NO: 50631 - DNA, 280 bp, Homo sapiens
attttcacattgagtaggctgaggaggaagaacagcaatgattagtcttgctgtctcaggcgtgctagagatggaagaaaatctgcatataagcagatccttgcagtttaaatctgcatttgcatataaaatacaaaagagaatgtaaacattttaagcaataaaataaaaacctttaaaatatatttggttgaaatttcagaaatagacaagagaatgattgaggtagagaaatatttaaaaatatattgactgaaaattttctcatctgatgataaag

SEQ ID NO: 50632 - DNA, 423 bp, Homo sapiens
tccaccctacctcttaggaactggggagcaactcttcccactgaagaaagagcatggctcctggctctttaccaaatctctcattttttagttctcagatgtgatttttctctctgacactccttaatccaacaccttttatccttacaggtaggccctatggacttatgccctaaagactgtaagggctaggcagcccatatgttcgtatgttttctgttggtataactgaataccacagactgggtaatttataaagaacagaggtttatttagctcacagttctggaggctgtgaagtccaaggtttacaggcaggtatctgttgagggtcttcttgctgcatcatcatatggtggaaaggcggaagggcaagcaagcacatacaaaagagggaggcaccagaggccagcccactttata

SEQ ID NO: 50633 - DNA, 252 bp, Homo sapiens
tgctggtctgcagggatggtgtcctgggcagaaagaatagcaagtgccagggctgtgctggggccgggctttgcatgtgtgagaacaagacagagaatgagggaggtgggcccacgaggagtgtgggcacagacagcagcctctgcctgtggtgccacgctgaagactcagtattgtatgtgacagatgaaggctctaagaagacagctctgacaaaagctagagtgcaaaatcagactcagacacaaccac

SEQ ID NO: 50634 - DNA, 425 bp, Homo sapiens
accccaaacgtctgactctctgtgggagaaaccagggctcaaagcaggagcaaaaaatctagtgctggatgcgctcgggcatcgagaggcatctcgtagagctggctccgagtttgaggccacacctttgcagaatgaggcagcatgtgagcgatttagttcaatgtaattgcagtggagatggacagggagaggacagattagaatgatgtttaagggatagaaataacaagtcttgcagatatattacatatattagttgaaccatggggaagccaaatgtgaattgtgaaattatggcagtggctggacacagtggctcacacctgtaatcccagcactttgggaggctgaggcaggcagatcacctgaggtcaggagttcgagaccagcctggccaacatagagaaaaccccatctctact

SEQ ID NO: 50635 - DNA, 407 bp, Homo sapiens
ttcattctcacaacttcaccacaattactcttcaggtccacattgcaaatccaacggtcagttgagagtcctcatcttagatgacctgtcagcagacttccacacagttgagcctattcactcaagtgctaaggctatgcacattcttctctactgacactcacttcctcgtgatcctgcctggcctcacgtttacaactccgaatatattctttccagcctgaactctcctctgaacttcagacccatacatccccaactgctgactcaatatctgcacgtggatgcctaatgcgttcaaacgtagcatgtccaaaagcaaattcctaatcctcccccttcaaaccttttgctcccatttgctcccacagccttttccatctcaataaatcaaaactctaatcttc

SEQ ID NO: 50636 - DNA, 323 bp, Homo sapiens
ctctgtttttgtgactttctaccatgaagttttataacagaagcacaataaatgttattttaaaataaaatatcactaaaatatagcttaggacttttttatgcacttagcccatctgaataaaaaaagccatataaacaaataccattcccaatgtaaagatagttttttcttagtaataattctaccgttgaaagaatacctggccagatgtggtggctcacacctggaatcccagccctttgggaggccaaagcaggcagattacttgagcccaggagttcgagagcagcctgggcaacatggcaaaaccccatttctac

SEQ ID NO: 50637 - DNA, 371 bp, Homo sapiens
ctgtctctaaaaaaacataataacaatagtaattcagtaacctgaacatatgtttaatatgcttttatgtatttgtgttctactgagcaataaaagttttcagcttgaattaatggcctcataggaagcatatgtcacaaaacttaaaccatcgccaattatataaaacttggcatcttcccctgatccttaacaaggcagatataaacatttttgtggatgttccctagtgtgtatcgataatttcatgaaaagttacttaacattattttcaataagcctttccatgcagcagtctagtttaacatttttaatgactaccatgtgaaaactgcctgtgtgtgcttcaccaacggtttttctgtgacttg

SEQ ID NO: 50638 - DNA, 382 bp, Homo sapiens
gagctaacaactgtctttggaaatttacatgtctataatgtcaagctgttatgtacagagaattgctttatgctgagatcataaaaatttttgttttcctccattctaatgtaaagcttgttacctaattgatcttcatttgcccgggttcccaacatacacatgctactttcctcttaagattgtcaagttataaataggagaacttttatttagaagaatgctaatatgaatcttttggaaatactagtaattagctttcttctgctgtctccaccaattttatctgatttagaaaattatatttcctttattgagatgcttaaatcggagggcttagtttgcttcagaaagtttataaactatattattagactaattt

SEQ ID NO: 50639 - DNA, 422 bp, Homo sapiens
gactttactgattgagaaaacagttttagtttagctgaggttgggaaagactacacaaatcataatgatgaagaactgtagcatgcatccagtgtgccagttttgaaaaagggacaggtgggaggtcattgaatgatgggggcaagtcttttctgtactgttcttgtgatagtgaataagtctcatgagatctgatggttttaaaaagaggagtttccctgctcaagctctctctctttgcctgctgccatccatgtaagatgtgacttgctcctccttgccatctgccatgatgtgaggcttccccagccacgtggaactgtaagtccaattaaacctcttttctttgtaaattattccagttctttggggtacgtcttttattcagcagcgtggaaaaccagacttaatggcaatttgcc

SEQ ID NO: 50640 - DNA, 421 bp, Homo sapiens
ttacaagtgacctttgcgatggaaagcatttggactttatagcatctagcaaatcgcaattttgtaccagagaaaatgccactctccttgaaattttcattgtaactaattatgttatattccatatgtttccatagccttgataataaaagaatggaactcagaggtcacatattccaagaaaaaaacggatacagatttagaaggaaaatgagaatgaaaatcacagccaattctcactctttagggaatagactcacccaataaccatgaattttgctgggtatgaaagcaaggagcaacaaaataataaattatgctctcttagaatgaaggtaaaataaactgttagaaatattttaaaagaatggcaaagatcaataaagcataaagaataaagggaaaaataaatattttgatg

SEQ ID NO: 50641 - DNA, 345 bp, Homo sapiens
gggacagtgggcacgtcccctccctgacggtgtcctcctgcccctttgtaacccttcctgtcactcttccctttccccagcccccatgagccactgctgacctgctttctaccgcatttctgagtttcactgtatatatggaaatatacagtgagtcttctttttcctctggcttccttcattcaggaaattctcttgaggttcacccttgtttgttgttctgtatgagtaactcaccccttcctgttgctaactataccctcctggctggctagaccagagcttgtttttaatctgttcatccgttgatgacaccctggggcatatccagggtttgggcaatac

SEQ ID NO: 50642 - DNA, 227 bp, Homo sapiens
gctccatcttccctttactttgtccccacatgtacagtaaaggaacaggcagcatggcactggtcaggtagagaactcatctgcataatagaagatcaggataggggtagccagcttttttgcaccctatgaaaatggcacacctggtccaaccaatcttctgtgccttatgtaaatcagataccgccacctcaagttcatctataaaatctcctgcacttcaccac

SEQ ID NO: 50643 - DNA, 456 bp, Homo sapiens
ctctgtgggtttctttcccaggcaggctgcctccaagtgggagcaaagtacctcagtagctgtaggcctaaaatctgccaggttagcaacattaacaacaaaaagatcttatttcccatcaattaaaatctcctgtctgctctatgaagcatctactgaaactctcactggctgtttttgggtcaccttcctaccctagagccacatgtggggtcagctgagctaatgtgtcagcagagagtgaagaaggtgggcctagaggataaatatagggcagtgacaaaaagaaaaaagcaaagcccctgagaaatgaggatgtatactttataataataaaagatacaatccataatgcatatctaattgttcagtatgtgtcaaatagcaacaatatatgtgtttagatacaacatcatggaaatacaaatttaaaaataaaaataaaaacataatagg

SEQ ID NO: 50644 - DNA, 441 bp, Homo sapiens
gcacacttatactttttccttggggtgcccatcttttcgcttgatgtgcctaacagggagaactctgcacacaggagattttcagttagtatttgtttggtgaacgaatcgtgtctctatggtaggtagtccggcaggggtcagaagcacagccctggagacaaacttaacagtttgagttctaatagctggctgcctccctgggtctctgttttctcacgtgaatcctgaggataataattacatctacatccctctgtcatgtaatgaatgaaaaagatgatgtgttaaaaaaaaaattaggatgctggtagctagtggtcagtaattgttagatcttatgacttctgctcttactgccatcatggtgagtgtgtttctatgtaaaaaagctaacaaccaacaaagggtgaaaattaaagttcaacttttgattattga

SEQ ID NO: 50645 - DNA, 618 bp, Homo sapiens
aggagggagtggaggaaaaggctggttacattcattcttgggcatgtacgtgcataccgtttatttgcaaattgaggtacttaagaaaattgtgcatgcaatagtcaggaactagtataaacattcagaagtcttttattgcacaatcaaaccttttaagaataagccttgtgtaatagggagctttatagtttttcctcatagtgaagcatgttgtgaagattttaataattgataattttttctatggtctttaattgtcaatcctattttcattcagttgttgttgctttttttaaaaaaaaaaacaaaaaacaaaaaacaaaaaacctttcaaactaggatgagcaaataaaactaggatgagacacagcttccctctctgtgaccaacgatgtcaaaaacccttgcaaagaatcaatcaacagctgccaggggaagaaaacgtggtgatctgagacttctcccttctctacaaagggacggttgcccgtctgggtgccaggtgttctgatagcttcagccatggagaattctgctcaagaacagcagctgctaagccaatcaggttctcattagccagtcgggagatggtataggtatctacggtcccaagaa

SEQ ID NO: 50646 - DNA, 262 bp, Homo sapiens
agtgaattcttgctttattgatacattctagtattcagttgtgattttaatatgctattttggtactttctgctttcagttttcattgctgtggctattgccttaaacagaaacaaaaaactaaaacaattttacaaccatccaaaagaggcttggaaacttttttttggctggatatccatagcacaatttaattcagtaaacataaacagttaaaattattccagtacacaaccatgttttaaaaaagagattacaccca

SEQ ID NO: 50647 - DNA, 1202 bp, Homo sapiens
tccagagaccacatctgcagctcccaaaacaaggtctgttctgcagctggacaattcactgctaaaatcccaaacctaagagcagagccaaagccagaggagaggaaagtgacaatagggccaaagcctcattccagattccaaatgtcattctgtagccctcgtgctatcaactgctgcctgctggctgcagccaggtccctgggtccatacacagcctgcatcaagagcctgcagagactcgggggctggagatgggaaacagatggtggcctgcgctttgtctttcccaagtttacagcctcacctgggggtggaggctgttctgaggggcccccaagaggcacgagcccaccatgaagggtttcacagccactctcttcctctggactctgatttttcccagctgcagtggaggcggcggtgggaaagcctggcccacacacgtggtctgtagcgacagcggcttggaagtgctctaccagagttgcgatccattacaagattttggcttttctgttgaaaagtgttccaagcaattaaaatcaaatatcaacattagatttggaattattctgagagaggacatcaaagagctttttcttgacctagctctcatgtctcaaggctcatctgttttgaatttctcctatcccatctgtgaggcggctctgcccaagttttctttctgtggaagaaggaaaggagagcagatttactatgctgggcctgtcaataatcctgaatttactattcctcagggagaataccaggttttgctggaactgtacactgaaaaacggtccaccgtggcctgtgccaatgctactatcatgtgctcctgactgtggcctgtagcaaaaatcacagccagctgcatctcgtgggacctccaagctcctctgactgaacctactgtgggaggagaagcagctgatgacagagagaggctctacaaagaagcgcccccaaagagtgcagctgctaattttagtcccaggaccagacatccccagactccacagatgtaatgaagtccccgaatgtatctgtttctaaggagcctcttggcagtccttaagcagtcttgagggtccatcctttttctctaattggtcgcctcccaccagactcacctgcttttcaactttttaggagtgcttcctcacagttaccaagaataaagaaagctggccaccatt

SEQ ID NO: 50648 - DNA, 1148 bp, Homo sapiens
tccagagaccacatctgcagctcccaaaacaaggtctgttctgcagctggacaattcactgctaaaatcccaaacctaagagcagagccaaagccagaggagaggaaagtgacaatagggccaaagcctcattccagattccaaatgtcattctgtagccctcgtgctatcaactgctgcctgctggctgcagccaggtccctgggtccatacacagcctgcatcaagagcctgcagagactcgggggctggagatgggaaacagatggtggcctgcgctttgtctttcccaagtttacagcctcacctgggggtggaggctgttctgaggggcccccaagaggcacgagcccaccatgaagggtttcacagccactctcttcctctggactctgatttttcccagctgcagtggaggcggcggtgggaaagcctggcccacacacgtggtctgtagcgacagcggcttggaagtgctctaccagagttgcgatccattacaagattttggcttttctgttgaaaagtgttccaagcaattaaaatcaaatatcaacattagatttggaattattctgagagaggacatcaaagagctttttcttgacctagctctcatgtctcaaggctcatctgttttgaatttctcctatcccatctgtgaggcggctctgcccaagttttctttctgtggaagaaggaaaggagagcagatttactatgctgggcctgtcaataatcctgaatttactattcctcagggagaataccaggttttgctggaactgtacactgaaaaacggtccaccgtggcctgtgccaatgctactatcatgtgctcctgactgtggcctgtagctactgtgggaggagaagcagctgatgacagagagaggctctacaaagaagcgcccccaaagagtgcagctgctaattttagtcccaggaccagacatccccagactccacagatgtaatgaagtccccgaatgtatctgtttctaaggagcctcttggcagtccttaagcagtcttgagggtccatcctttttctctaattggtcgcctcccaccagactcacctgcttttcaactttttaggagtgcttcctcacagttaccaagaataaagaaagctggccaccatt

SEQ ID NO: 50649 - DNA, 346 bp, Homo sapiens
ccggtaccagttcgacggagactctctctgtcatcagctgcttctcctctgactgactactgtgggaggagaagcagctgatgacagagagaggctctacaaagaagcgcccccaaagagtgcagctgctaattttagtcccaggaccagacatccccagactccacagatgtaatgaagtccccgaatgtatctgtttctaaggagcctcttggcagtccttaagcagtcttgagggtccatcctttttctctaattggtcgcctcccaccagactcacctgcttttcaactttttaggagtgcttcctcacagttaccaagaataaagaaagctggccaccatt

SEQ ID NO: 50650 - DNA, 409 bp, Homo sapiens
gaaatgaaaacatttctagcaatagctgctcttattttggtgccaataattgtcacacatctgtgtaaccacaaatcatgtgaatgaatcatttttttaaatgattgaataacatcatctatgctttatatattttttcagagcagatttactatgctgggcctgtcaataatcctgaatttactattcctcaggtaagatattacttacttcttgtattaaatagtttgtttcttgaagaagaagaagaaggctagaaggaggagggaaaggaggagaaaccaagaaagaagagaaggaaagaattaaacagtttaaaacttatccataggccatccctgcaaaaaccctttcttaataaaactgctgcttcagagtgggcacttgaaatttcttgacacactggctt

SEQ ID NO: 50651 - DNA, 417 bp, Homo sapiens
tggtaggtgtagatcaggaaatgaaaacatttctagcaatagctgctcttattttggtgccaataattgtcacacatctgtgtaaccacaaatcatgtgaatgaatcatttttttaaatgattgaataacatcatctatgctttatatattttttcagagcagatttactatgctgggcctgtcaataatcctgaatttactattcctcaggtaagatattacttacttcttgtattaaatagtttgtttcttgaagaagaagaagaaggctagaaggaggagggaaaggaggagaaaccaagaaagaagagaaggaaagaattaaacagtttaaaacttatccataggccatccctgcaaaaaccctttcttaataaaactgctgcttcagagtgggcacttgaaatttcttgaca

SEQ ID NO: 50652 - DNA, 1566 bp, Homo sapiens
tccagagaccacatctgcagctcccaaaacaaggtctgttctgcagctggacaattcactgctaaaatcccaaacctaagagcagagccaaagccagaggagaggaaagtgacaatagggccaaagcctcattccagattccaaatgtcattctgtagccctcgtgctatcaactgctgcctgctggctgcagccaggtccctgggtccatacacagcctgcatcaagagcctgcagagactcgggggctggagatgggaaacagatggtggcctgcgctttgtctttcccaagtttacagcctcacctgggggtggaggctgttctgaggggcccccaagaggcacgagcccaccatgaagggtttcacagccactctcttcctctggactctgatttttcccagctgcagtggaggcggcggtgggaaagcctggcccacacacgtggtctgtagcgacagcggcttggaagtgctctaccagagttgcgatccattacaagattttggcttttctgttgaaaagtgttccaagcaattaaaatcaaatatcaacattagatttggaattattctgagagaggacatcaaagagctttttcttgacctagctctcatgtctcaaggctcatctgttttgaatttctcctatcccatctgtgaggcggctctgcccaagttttctttctgtggaagaaggaaaggagagcagatttactatgctgggcctgtcaataatcctgaatttactattcctcagggagaataccaggttttgctggaactgtacactgaaaaacggtccaccgtggcctgtgccaatgctactatcatgtgctcctgactgtggcctgtagcaaaaatcacagccagctgcatctcgtgggacctccaagctcctctgactgaacctactgtgggaggagaagcagctgatgacagagagaggctctacaaagaagcgcccccaaagagtgcagctgctaattttagtcccaggaccagacatccccagactccacagatgtaatgaagtccccgaatgtatctgtttctaaggagcctcttggcagtccttaagcagtcttgagggtccatcctttttctctaattggtcgcctcccaccagactcacctgcttttcaactttttaggagtgcttcctcacagttaccaagaataaagaaagctggccaccattaaaaaaaagaaaaacagaaacaaatacaacaagacgagacaaaacgaagacacatgtacaaaagcaacacaacacacacaccaacgacagacgaatcaattaatcctcagaaacagaaccaaccgcacaccacaacagcggcaagaccaagatcagacgaacatcactgagaggcatgcatgataacatagaatccacaagcgacgaaacactgaaaaacacgcgtgaataaaacacccgaccgctgcccaaacataggaagcggcaatcagcccgcgcgtggaaccgagacaagtaaacaagacgccagatctctgagatcaccgacatcatgacacagacacacatacgaatcacatctgaa

SEQ ID NO: 50653 - DNA, 519 bp, Homo sapiens
ggaaagacattaaatagggacaccataatgtttaactggtataggtgctgaaggtctagttatcaacatctatcagcttgtctctgtaggtgggcaaactttaaataactagtttttgtaccctgattttcttttcctcttaaagtagatactcattcttgaagacaatctgtttctttcaatgctaatgtaagtgcttataaccacttgtgacatgttctctacccaccgatccactaaaaatgatgagagtttcgaagattcgggtcatgtcttagttgcttcttcagagcctagcctggtcccatgatgggtgcctgttggttgctgaattgaaagcttctaggctgggcatggtggcccatgtgtgtattctcagctactcagcctacttaggaggctatggcaggaggcgcttttgagcccaggtgtttgggattttagtgtgcaatgattgctcctgtgaataaccactgcatctagcctgggtgacatagcaagacccatctctatgtaaaa

SEQ ID NO: 50654 - DNA, 347 bp, Homo sapiens
tgggataattatttctcttcaaaatatttcataacataataaagataagctctgaaggatgacaatatttcatcaaaaatagctctatgacagatcatcaaagaaagactcatgacccaattctttatacatgatgccagagaatcagttcctttctgtcctggtttagactctggactgcaagataactcaggtcttttagatctttcaaaatatttataaaccaaaaaactattcccttgcgtaaaatatttccagccctgttagagttggagagctgacattgataaaacactgggcaagttaatgagtattatggttaggtgtctaccggtgtgcagacctgt

SEQ ID NO: 50655 - DNA, 608 bp, Homo sapiens
ctgggtcatgtcacagttacagtaaatattatgtaaaagcattcaaaatctctgccataatgaaacataattagaaatcaacagcaaaaagatccctggaaaaattcctaaataattgggagccaaataacacactccaaagtaacttataggtcaaaggggaaattaagagacattagtattttgaacttcatgaatatgaaaacaataacatttcaaaattcatgtaatgctgctgaagcaatacttacatggaaatatacaggacaataaaatgcttttcttttaaaatgcgtagattttaaaagtctcaaatcaatgccctcagcttttatgtcaagaaactagaaaaagccaggcatgggtggctcatgcctgtaatcccagcaatctgggaggccgaggcaggtggattgcttgagtccaggagtttgagaccagcctgggcaacgtggtaaaaccctatctctactaaaaaattacaaaaaaatcagccagccatggtgcctcacgtctgtaatcccagcactttgggaggaggccaaggcaggtggatcacctgtccaagacaggtcaggagttcaagaccagcctggccaacatggtga

SEQ ID NO: 50656 - DNA, 253 bp, Homo sapiens
ctatctgaaaattatcagtgagagattctaatgtgccttaacaaacaggaacaaaagatgagtgtttaatacaattcaatttaacaaatatttattaagagcctacagttattcccatggatcatctgagtcagtttccgaggaaacattatcgttgccttaagggagctggggggttgtcaacgggccagaggtgggatgaaaaatgacaacagatttacctctgggaccgggacatggttaaccacagcgg

SEQ ID NO: 50657 - DNA, 449 bp, Homo sapiens
ttgttttgtatatatatatttttgaccatgcctggtctggagataacattttcaatatagaaatatcaaacacaacaaaagtgaaatctagcaatttcacaaagtttaggatacgacaaatttctgatttgtgattataaattgtctccagacaatccatgacagctgacagggaagcaaaaggaagcaaaaggtccctcagagatttctggggacctgccaagtctcacaaggagttctgaaagagactcaggctcaggctgcagacctgtggggcaccctccaggatggtggccgccacccccaggccatcctgggacacagattcatcaacacacaggcaaacagaacagctgtccatcttcacctatcttctctctactaatccaagagacagcgggctgcctacattaactatgccctcgttggccaggcacagtggctcacac

SEQ ID NO: 50658 - DNA, 485 bp, Homo sapiens
aattgcaattagggaaagctataaagtcaggacaaacagaagaaacttagcagtgagcatgaagtgagcgcctcctaggtgtgaggctggtacctgttaccatctccattttccagcgggggtccccatgtgtaggaatgttgagtcacttgctcagggccgtacagctgagccaggtagagctggggttccatcccatgtttaaccacagaacctgccccaaaccattgtgcaatactgccgcattctgaagcatgtgtaaaagctttccagttgggcaggtctgtatataagactcagttaaagttaaaagataaaataaggtcattgttaaaaaaaaaaagccactatttagtggtatttagtcaactatctttgccaaaagctggtgggggtgagggaacgtgtgagagcaggtcctggaaacatccttgatcattgtcagaatagttttgtatgaattcatacaataaaaaatagaacta

SEQ ID NO: 50659 - DNA, 366 bp, Homo sapiens
ttagttatgagagcagtaagcataaggaatttaatcctaatttcatttctgcatttatttaagcaacattaaaatagaaagtgattaaattagtttttaaaaattctgttatgatagaaccagaatttgcaagcttgagccagcttacttaatattattgctggaaacctagcatttggcattaggtgactggaactgggactgcagttttgtatttactaggttatttctctatttatgaaatgggaaatatatttctaactaaaagggtcgttcatttgttcattctttcactcaacagataattagttgtgtagcaccacataattttatctcattactagtttaattttccctactgtcaaa

SEQ ID NO: 50660 - DNA, 393 bp, Homo sapiens
aaattattaattatatgaaaatgctcataatattacaagtaaagaaaaaagtagaattgctagaatgattctggaagaatgaacatgcaggtacaaccaaactaatgtagaaaccaaccaaacaaccaaacaaacaaaaaaccagaaaagaaataatgaggactttccataataccagaaacgatatatatcataattccaataattaacataatgctggcaaaagaatatacatcaattaaaacagaagaggaaagcccacaaacagactcagtgcagtataaaattgaaagtctctgctgggcgtggtggctcatgcctttaatcttagcaccttgggaagccaaggcaggaggattgcttgagctcttgagtttgagaccagcttgggta

SEQ ID NO: 50661 - DNA, 396 bp, Homo sapiens
gaggaataggtgtccctgggaacccaaacatcctggagaatagctgagaacctaccaagggaaacagtcccatcacacacacatagtaggtaaagagacagaaaattagcttagagatgggaggtggcacggatctctaaagctgtcccgctgccattcaggagtgcctcatgcataagtcctaataaactcatctactagccaagctgaacttgtcccagacatgcttggtctctttgctccctcccagtttggggtaaggttttttttaaatacaattccaggtttttctcattacaattgctgtcatgagcaggatctgagaaaccaatggatgaattaggaaggcgcatctgcggggagaatcctagggtggttggcaacatgcatgtggcg

SEQ ID NO: 50662 - DNA, 636 bp, Homo sapiens
gtttacgttgaagatgcattggtttttgcttattcttaaagaaaagattcaggattgtgaatttgtgactgcagctttaggcgtatcccaaggttttcagtactagtttagtttttgttgtttttgtttctaattatccttttggcatttccttatcaatataagactttttaaaattcaagtgttttgattcattttatccaatttttggttactaatttcttggtttctttgtgttgtggtcacatcatgtggcttttacacacattttctctgttttggggatttgcttacttttttttgtagtcgtgcaagattttttgtgaaaagaaaaactgtatcaagttcatcacctttatcaatttgacctgtgccgtgaacttctttagattcatttgattcaaatggatctaagtattttaaacatttagaatactaatttaagcaaggcttgaaaattaaatggagtaaaagcaataaaaaaatcaatattagcctgggcattggtggctcatgccagtaatgccagtactttgggatgccaaagcaggaagatctcttgagcttaggagattgagatcaggttgggcaaaaacatgaaaagactaaatcacatctctagcaggaaaaaaaaaa

SEQ ID NO: 50663 - DNA, 986 bp, Homo sapiens
gcactttgtttccagggtgggcccctcactgagaaagcctggtcccctggagtacttgctactgggcctgcatcctcccccgtttgcctacagaaataaagttttagatgtcactcactgatcagattaaccttggaaggcatcagattcttcccatggggtctccgcgcttaggcctggaagccccatgttcctcatggacataatttgttttgtttgcacagatttgaattagttatcaccatgtaaaagccagccatttaaaaataaaaattcagatttctttaaaaccagaagttctggtgcccctccattgcctgcccctttccccaacaccaagggaggaaagcgggggttttctgtttagcattgccattgctgccgttgggtttcttgttcagtaaaaaggcagagaagtgtgttaaatcaagtttagcctagagctacctccttagatattttaagttcagcctaaaggtttttctgtatatcatgaactataacaagtggaggtataaaaacactgtagactgcacttgtgccaatcaaatgtagccaactgttcgaatcttgttcaaataaggcaaaggagctgtaaccaatccagctgtttctgtacctcacttctattttctgaaagtaggtagaaattaatttacttcgaaaaaaataatttcccctgaaaggtagctgctgtatcccaaggctttgccaggttaacaagtggacagcatggaatatttggaggaggtttggaatcgtgcgcacgtgggtttcaattctgctcagccacttgttaagctgtgaagtctctgagcctcagtaagatggacttaactccatctacttgcggagttgattaaagataaaataatgtatacaaagccctaggcatattgttctggcaaatagtttgtaataataaatgtagttactttgagaacttgaaacttggtatgggtgaggaggagatgaataaaaagaaa

SEQ ID NO: 50664 - DNA, 340 bp, Homo sapiens
tcataaaacatgctttgtttttaacaaatggtgaaagattaaaaatatttgttttctcaagttgtatatgttttttaaaacttattttattacagtagtaacttttaataggtagtaaataagggcaaataggcgatctattgagtttctccttgaccttgaagtaatacttcaagacgtcataagagacattgattcctcttgggttacaaagattgctagtagcataggctaccataatctactatgcttattttctctctgtaatagcacatggatttcaccaacagctttcacagagattctacacctttttggtcacctgtcagtgcctgatagc

SEQ ID NO: 50665 - DNA, 384 bp, Homo sapiens
aggctgcgggagctgtcccgggagctgtcctgtccggtggccggctttccaaagtggggaacgagagatgagggagggagcacttccaggcgctgcgtggtggccaggcgcccaggaagccgaggggcccgagactctgcagcggggccagaaagagaagagtgggggaggaggccgggagtggtgcatggaccagggggtagagggaggtgggtgtggacctggggtcgggcgccagtcagcttgcagcctatgaaggacggaaaggagggctacagagataggggaagagtggggctgaggatagccagagcggcttggcacacagttttagggtaaaagcatcaactcttatctttccaaaagaaataaaaaagccaaaaa

SEQ ID NO: 50666 - DNA, 200 bp, Homo sapiens
cttgcctaaggttgtgcagctattaagtgacagagatatggcatatgaaaccaggcagtcttactccagtgcctgcactcttgaccactctcctgtatacctcacacattccatgtttttcattacacttttagtgcactgcctagattgattgattcttgccttcattctctcagcaaatatgttagctatgtcccagg

SEQ ID NO: 50667 - DNA, 1144 bp, Homo sapiens
aactagacaactggggaatacaaaaccaaattcaactgattaacagttcaaagctaaatggtaaacaggccaagccaacattcgtctaactactgaacaccagcactatattctgccctttagaaaacaaaaaataacatttaaaccctcacctccatttatctaacaatctactgaggtagagcgggagagtgatatacatatcattataaaatagtgggttctcagccttctgagatttttgacaattcaataatgatcttgaagatctctaaaatgtaatcacaggttattctgcagagacactaatttcaaaatatatgtattaaacttaactattggtgacggagcatctttgttattctctcctcacactcccatatgcatttaacagagaaataatactgtacacaaaagtggtatttaggacctcaaacttttcctcattaacacaagatctaatgacataatttagtgtcaaaataaaaatactgggggagggatgtataagtgaaataaacatccagttagaaaccacaagcataaagtttaataagaaaatgtaagtgaaatagactgggaaaagagcattccagttacagctatgattccgcttccaggctatttacatttataacatactcatcaataactctctctttacagtgatttacaaaaagctaagaggtggctatttcccaatggaaatgcattagaatctcaaaagaactctgtgctttcctactacaaaatcactgagttcctaaaccaacaagacacacaaatgggaataatgggaatatatagtgcacagctttgcatacagtaaatcttcccgtttcacagcatctttatatgcgatgtatataataagcatattcctatttacagtcttataaaataatcttatgtaaagtctcaaatccatagctcaggaacctgtacagctgaaggcaaggggaaactgaaaggtttttagaaatacaaaatgattcaagcaatatcactattaaaactaatagtaataaaaattaatctaataatctgggtcaggcatcccagcactttgggaggccgaggcgggagggtcacttgaggtcaggagttcgagaccagactggacatgacaaaaccccatctctac

SEQ ID NO: 50668 - DNA, 366 bp, Homo sapiens
taaattatttatttatttttgagacagagtctcattcaattgctcaggctggggtgcacagctcactgcagcctcgaactccagggctcaggtgatcctcccacctcaaccacccaagtagctgggactacaggtgtgtgccaccacgcccagctagtttttttgtagagatggggtctcaccatgctgcccacgctggtctcaaactcctgaccacaagcgatctgcccatcttggcctccccaaagtgctgggattacaggcatgagccaccacacctggcctatacccatttctgtaaaggacaaagcatggtattataaatagtatgtcctggttcacgctggagtgtcttgggttcagaca

SEQ ID NO: 50669 - DNA, 2790 bp, Homo sapiens
tgaaaatgtaggagccacacgtcttaaagcaggcccacaggaacccagcaacatcaatgaagagcaggccggtgagggctggggcagatgccactcatcttccagtgataaaacagattgtctagttgttcatgaggagccagaaatctaaatttttatgagaaatctcatatttgcatggtcaaagatttaaaaaaatttaaataccagtaggcaatcaaaatgtatctgtgggctttccttagcccaggtgctggtaacccctgacttctgctacaaagagggattattctgtctatatacgaggctgagaagtgagttagggcaacatagtaggtaactggggtggattcatggttaagagcaggaagagcaggaagccaccactgttctccccagagtcaggctgtggactgaaggagatttcaaggttggattctggttcagacaggaaagctgcctggagaagactttgcctttatgggtcactgagtggggaccctgtgtgggagccctgcccaggtgaggtaaaaccttgaaagatccttctgtgaggttagctcccttttctcttgagggagctagtagcttgagagagctagtttgtctggcttctgtggaaggctgtgcattaaacagcaacaacaacaagaaaaaacatttacagttcttcctgagtttaagaaaagccagtatgcccataacagaagggctgggaacatgtaaggaataagagtcatctgaacaccagcacagttattcagtatagtgccttctagtcataactagatggtattaataccattttaattcttgcctttttctcacttgatatttgattgatggtgtttcttgtgtgtgctgatttgtttgtgactactgcctgctggagagagcctttgttgggtgttcccctgtgggctggaagtcactggtatgcacacccttgccttttctttcccctggccattcatctagctactctccttttctcttgtcccactgtcaaagtgcttcttttttttggccaagtaatcagtctcgatggaagccaaccaagctccccttttattttgctcatttcttggggtttcctcctgccatgccagggtaggaaggtcaaggtcatctagatctccaaagagcagctgggctgaggaggggtactgaggccagcagcctggcctgcgtgtgaggtattaagacacggcagacacacagagtggctgcggttatccttgcttccccttttccctgttgagaggtctccatgtaataatgcctcctttcttctcttgcagggcgatggctgggtatacttcaatcccctctggaaagcacactgatggggtggaggtgcagagctttccagtatagccctgtttttgtaggaatattaaagtagtagagtatcagggttttgttggcattcactgagaccttgtattagcatccaagaaatgatgagagagagagaaattatatactatgaaaagtgcacccccacactctgctagaggaatgaatttattcaagagccattcggggcacgtgtgtgtacacaccgtatacgttcacacacatgcactatgtaaacatctgagtatgattacacatttaaatactgcactcaccaaggttaaagtgggtaatcataagctcctttttatcaatgaagtttgaagtttttctatttttcactttgccaaaaatgttttacactcacaaagatattctcacttagtcaactcctgtcaaaatgaaggtgaactggcatggcccgatcactgtccataagggagaaagtggctcattcctggtagaagtatgggtggttatcatttcaaaattattgtgattctcacctccctccccacctcagtgttttgtctgtccgcgcccaagaaagataagcaagtatttcctgctggatgggggttggcaggaagctgttaaagatttatgccagagccttgcaggatggagcacctctgggacaactaagagccaaggcccaccaaggagttttccacccgtctctcatggtcacagcgctagtcattcatttttgagaagttgcttcttttacatcagaaaaccagtcaatcatatggagacttcttttgtgatgaaaaagggctttagaagttaaatacatgcatgcacatgaaaacatgcacaaccacagcctcaatcttgtatttagtttggggaaagagaagagaatttcctgtggattattttttcctcaagtgcacctctctggttaacccaaactctgcaagaaagcactgtgactaaaacatacataacgcctgcataaatattccatggtttcagttaaatttcagtttttagcctttacacatgaggtcaaaggagtgacgaaaatacaaagcaaggaaaaaatgaaatatctggtttttgctgaatgcttaatttattttttactgtgccactccaatatttatcaaatccaaatagcatgaatgcttctctgtagtaatactaattttgtgccttttgtctgctttcttaagaccagttgttcacactttgtagatattagacaaatatatttcgattgaatacaaaaaaaaacaaatgaaaaataagagagaggaaaaaacaaagagcgaaagagaggaaaaacagaagggggggcgattttggggaagaacgccaattataggcgaagggagataagagagggaaacagggaagtgatgtggacttgaggaacagaacgaattattagtggtacattataataagagaaagataaaggat

SEQ ID NO: 50670 - DNA, 3617 bp, Homo sapiens
ctgtagcagcagcagcagccgccgtgccggggccgccaccgcggcgggcacccgcgtcccgggcgcccacggaccatggagagggcagtccagggcacagacggcggcgggggtagcaacagcagcagccgcagcagcagccgtgctacctcggcgggctcctcgccctcctgctctctggcgggccggggggtctccagccggtcggcggcggccgggctcggcggcgggggaagccgcagcagcccgggctctgtggccgctagcccgtccgggggaggcggccgcaggagggagccggcgctcgagggcgtgctcagcaaatacaccaacctcctccagggctggcagaacaggtacttcgtactggatttcgaggctggcatcctgcagtattttgtgaatgagcaaagcaaacaccagaagcctcgaggagtcctgtctttatctggagccatagtgtccctgagcgatgaagctccccacatgctggtggtgtactctgctaatggagagatgtttaaactgagagctgctgatgcaaaagagaaacaattctgggtgactcagcttcgagcttgtgccaaataccacatggaaatgaattctaagagtgctccaagctcccgaagccgaagtctcactttgctcccacatggaacacccaattctgcgtctccctgtagccagagacacctcagtgtgggggcccccggtgttgtcacaatcacgcatcacaagtcgcctgcagccgcccgaagagccaagagtcagtattccggccagcttcacgaagtcagagagatgatgaaccaggtggaagggcagcagaaggaccttgtgcacgccattgagtccctgccagggtccggccccctcactgccttggaccaggacctgctgctcctgaaagctacctctgctgccaccctcagctgccttggggagtgcctcaacttgttacagcagagtgtgcaccaggcgggccagcccagccagaagccaggagcctcggaaaacatcctgggatggcacgggtccaagtcacattccacagagcagctgaaaaatgggacacttggctctttgccatcagccagtgccaacataacctgggcaattttaccaaactctgctgaagacgaacaaacctcacagccagagccagagccaaactcaggctctgaattggttttgtctgaagatgaaaaaagtgacaatgaagataaggaagagacggaattgggcgtcatggaggatcagcgtagtataattcttcatctcatttcacaactcaaacttggaatggatttgaccaaggtggtgcttcccacctttatcctggagaagcgatctttgctggagatgtatgcagatttcatggcgcacccagacctactgctggccatcaccgctggggccacaccagaggagagagtcatttgcttcgttgagtattatctcacagcctttcacgagggccgcaagggcgctttagccaagaagccctacaaccccatcataggcgagacatttcactgctcctgggaagttcccaaggacagggtcaagcctaagaggactgcttcccgctctcctgccagctgtcacgaacacccaatggccgatgacccttccaaaagctacaaactaaggtttgtggctgagcaagtgtcccatcacccacccatctcctgcttctactgtgagtgcgaggagaagagactgtgcgtcaacactcatgtatggaccaaaagcaagttcatgggcatgtccgtgggggtctctatgataggggaaggtgtgttgaggctcctggaacacggggaggagtacgtattcaccctgcctagtgcctacgcccggtccattctcaccatcccgtgggtggagctcggaggaaaagtcagcatcaactgtgccaagactgggtactcagcgacagtgatattccacacgaagcctttctatggagggaaagtccacagggttaccgcagaagtgaagcacaacccaaccaacaccattgtttgtaaagcccatggggaatggaatggtactttagagttcacctacaacaatggagaaaccaaagtcatcgacacaaccacactgccagtgtatcccaagaagatcagacctcttgagaagcagggacccatggagtccaggaacctctggcgggaggtgacccgatacctgcggctgggggacattgacgcagccaccgagcagaagcggcacctggaggagaagcaacgggtggaggaacggaagcgcgagaacctccgcacaccatggaagcccaaatattttatccaggagggcgatggctgggtatacttcaatcccctctggaaagcacactgatggggtggaggtgcagagctttccagtatagccctgtttttgtaggaatattaaagtagtagagtatcagggttttgttggcattcactgagaccttgtattagcatccaagaaatgatgagagagagagaaattatatactatgaaaagtgcacccccacactctgctagaggaatgaatttattcaagagccattcggggcacgtgtgtgtacacaccgtatacgttcacacacatgcactatgtaaacatctgagtatgattacacatttaaatactgcactcaccaaggttaaagtgggtaatcataagctcctttttatcaatgaagtttgaagtttttctatttttcactttgccaaaaatgttttacactcacaaagatattctcacttagtcaactcctgtcaaaatgaaggtgaactggcatggcccgatcactgtccataagggagaaagtggctcattcctggtagaagtatgggtggttatcatttcaaaattattgtgattctcacctccctccccacctcagtgttttgtctgtccgcgcccaagaaagataagcaagtatttcctgctggatgggggttggcaggaagctgttaaagatttatgccagagccttgcaggatggagcacctctgggacaactaagagccaaggcccaccaaggagttttccacccgtctctcatggtcacagcgctagtcattcatttttgagaagttgcttcttttacatcagaaaaccagtcaatcatatggagacttcttttgtgatgaaaaagggctttagaagttaaatacatgcatgcacatgaaaacatgcacaaccacagcctcaatcttgtatttagtttggggaaagagaagagaatttcctgtggattattttttcctcaagtgcacctctctggttaacccaaactctgcaagaaagcactgtgactaaaacatacataacgcctgcataaatattccatggtttcagttaaatttcagtttttagcctttacacatgaggtcaaaggagtgacgaaaatacaaagcaaggaaaaaatgaaatatctggtttttgctgaatgcttaatttattttttactgtgccactccaatatttatcaaatccaaatagcatgaatgcttctctgtagtaatactaattttgtgccttttgtctgctttcttaagaccagttgttcacactttgtagatattagacaaatatatttcgattgaataca

SEQ ID NO: 50671 - DNA, 2593 bp, Homo sapiens
tgaaaatgtaggagccacacgtcttaaagcaggcccacaggaacccagcaacatcaatgaagagcaggccggtgagggctggggcagatgccactcatcttccagtgataaaacagattgtctagttgttcatgaggagccagaaatctaaatttttatgagaaatctcatatttgcatggtcaaagatttaaaaaaatttaaataccagtaggcaatcaaaatgtatctgtgggctttccttagcccaggtgctggtaacccctgacttctgctacaaagagggattattctgtctatatacgaggctgagaagtgagttagggcaacatagtaggtaactggggtggattcatggttaagagcaggaagagcaggaagccaccactgttctccccagagtcaggctgtggactgaaggagatttcaaggttggattctggttcagacaggaaagctgcctggagaagactttgcctttatgggtcactgagtggggaccctgtgtgggagccctgcccaggtgaggtaaaaccttgaaagatccttctgtgaggttagctcccttttctcttgagggagctagtagcttgagagagctagtttgtctggcttctgtggaaggctgtgcattaaacagcaacaacaacaagaaaaaacatttacagttcttcctgagtttaagaaaagccagtatgcccataacagaagggctgggaacatgtaaggaataagagtcatctgaacaccagcacagttattcagtatagtgccttctagtcataactagatggtattaataccattttaattcttgcctttttctcacttgatatttgattgatggtgtttcttgtgtgtgctgatttgtttgtgactactgcctgctggagagagcctttgttgggtgttcccctgtgggctggaagtcactggtatgcacacccttgccttttctttcccctggccattcatctagctactctccttttctcttgtcccactgtcaaagtgcttcttttttttggccaagtaatcagtctcgatggaagccaaccaagctccccttttattttgctcatttcttggggtttcctcctgccatgccagggtaggaaggtcaaggtcatctagatctccaaagagcagctgggctgaggaggggtactgaggccagcagcctggcctgcgtgtgaggtattaagacacggcagacacacagagtggctgcggttatccttgcttccccttttccctgttgagaggtctccatgtaataatgcctcctttcttctcttgcagggcgatggctgggtatacttcaatcccctctggaaagcacactgatggggtggaggtgcagagctttccagtatagccctgtttttgtaggaatattaaagtagtagagtatcagggttttgttggcattcactgagaccttgtattagcatccaagaaatgatgagagagagagaaattatatactatgaaaagtgcacccccacactctgctagaggaatgaatttattcaagagccattcggggcacgtgtgtgtacacaccgtatacgttcacacacatgcactatgtaaacatctgagtatgattacacatttaaatactgcactcaccaaggttaaagtgggtaatcataagctcctttttatcaatgaagtttgaagtttttctatttttcactttgccaaaaatgttttacactcacaaagatattctcacttagtcaactcctgtcaaaatgaaggtgaactggcatggcccgatcactgtccataagggagaaagtggctcattcctggtagaagtatgggtggttatcatttcaaaattattgtgattctcacctccctccccacctcagtgttttgtctgtccgcgcccaagaaagataagcaagtatttcctgctggatgggggttggcaggaagctgttaaagatttatgccagagccttgcaggatggagcacctctgggacaactaagagccaaggcccaccaaggagttttccacccgtctctcatggtcacagcgctagtcattcatttttgagaagttgcttcttttacatcagaaaaccagtcaatcatatggagacttcttttgtgatgaaaaagggctttagaagttaaatacatgcatgcacatgaaaacatgcacaaccacagcctcaatcttgtatttagtttggggaaagagaagagaatttcctgtggattattttttcctcaagtgcacctctctggttaacccaaactctgcaagaaagcactgtgactaaaacatacataacgcctgcataaatattccatggtttcagttaaatttcagtttttagcctttacacatgaggtcaaaggagtgacgaaaatacaaagcaaggaaaaaatgaaatatctggtttttgctgaatgcttaatttattttttactgtgccactccaatatttatcaaatccaaatagcatgaatgcttctctgtagtaatactaattttgtgccttttgtctgctttcttaagaccagttgttcacactttgtagatattagacaaatatatttcgattgaataca

SEQ ID NO: 50672 - DNA, 3622 bp, Homo sapiens
ctgtagcagcagcagcagccgccgtgccggggccgccaccgcggcgggcacccgcgtcccgggcgcccacggaccatggagagggcagtccagggcacagacggcggcgggggtagcaacagcagcagccgcagcagcagccgtgctacctcggcgggctcctcgccctcctgctctctggcgggccggggggtctccagccggtcggcggcggccgggctcggcggcgggggaagccgcagcagcccgggctctgtggccgctagcccgtccgggggaggcggccgcaggagggagccggcgctcgagggcgtgctcagcaaatacaccaacctcctccagggctggcagaacaggtacttcgtactggatttcgaggctggcatcctgcagtattttgtgaatgagcaaagcaaacaccagaagcctcgaggagtcctgtctttatctggagccatagtgtccctgagcgatgaagctccccacatgctggtggtgtactctgctaatggagagatgtttaaactgagagctgctgatgcaaaagagaaacaattctgggtgactcagcttcgagcttgtgccaaataccacatggaaatgaattctaagatgatgaaccaggtggaagggcagcagaaggaccttgtgcacgccattgagtccctgccagggtccggccccctcactgccttggaccaggacctgctgctcctgaaagctacctctgctgccaccctcagctgccttggggagtgcctcaacttgttacagcagagtgtgcaccaggcgggccagcccagccagaagccaggagcctcggaaaacatcctgggatggcacgggtccaagtcacattccacagagcagctgaaaaatgggacacttggctctttgccatcagccagtgccaacataacctgggcaattttaccaaactctgctgaagacgaacaaacctcacagccagagccagagccaaactcaggctctgaattggttttgtctgaagatgaaaaaagtgacaatgaagataaggaagagacggaattgggcgtcatggaggatcagcgtagtataattcttcatctcatttcacaactcaaacttggaatggatttgaccaaggtggtgcttcccacctttatcctggagaagcgatctttgctggagatgtatgcagatttcatggcgcacccagacctactgctggccatcaccgctggggccacaccagaggagagagtcatttgcttcgttgagtattatctcacagcctttcacgagggccgcaagggcgctttagccaagaagccctacaaccccatcataggcgagacatttcactgctcctgggaagttcccaaggacagggtcaagcctaagaggactgcttcccgctctcctgccagctgtcacgaacacccaatggccgatgacccttccaaaagctacaaactaaggtttgtggctgagcaagtgtcccatcacccacccatctcctgcttctactgtgagtgcgaggagaagagactgtgcgtcaacactcatgtatggaccaaaagcaagttcatgggcatgtccgtgggggtctctatgataggggaaggtgtgttgaggctcctggaacacggggaggagtacgtattcaccctgcctagtgcctacgcccggtccattctcaccatcccgtgggtggagctcggaggaaaagtcagcatcaactgtgccaagactgggtactcagcgacagtgatattccacacgaagcctttctatggagggaaagtccacagggttaccgcagaagtgaagcacaacccaaccaacaccattgtttgtaaagcccatggggaatggaatggtactttagagttcacctacaacaatggagaaaccaaagtcatcgacacaaccacactgccagtgtatcccaagaagatcagacctcttgagaagcagggacccatggagtccaggaacctctggcgggaggtgacccgatacctgcggctgggggacattgacgcagccaccgagcagaagcggcacctggaggagaagcaacgggtggaggaacggaagcgcgagaacctccgcacaccatggaagcccaaatattttatccaggagggcgatggctgggtatacttcaatcccctctggaaagcacactgatggggtggaggtgcagagctttccagtatagccctgtttttgtaggaatattaaagtagtagagtatcagggttttgttggcattcactgagaccttgtattagcatccaagaaatgatgagagagagagaaattatatactatgaaaagtgcacccccacactctgctagaggaatgaatttattcaagagccattcggggcacgtgtgtgtacacaccgtatacgttcacacacatgcactatgtaaacatctgagtatgattacacatttaaatactgcactcaccaaggttaaagtgggtaatcataagctcctttttatcaatgaagtttgaagtttttctatttttcactttgccaaaaatgttttacactcacaaagatattctcacttagtcaactcctgtcaaaatgaaggtgaactggcatggcccgatcactgtccataagggagaaagtggctcattcctggtagaagtatgggtggttatcatttcaaaattattgtgattctcacctccctccccacctcagtgttttgtctgtccgcgcccaagaaagataagcaagtatttcctgctggatgggggttggcaggaagctgttaaagatttatgccagagccttgcaggatggagcacctctgggacaactaagagccaaggcccaccaaggagttttccacccgtctctcatggtcacagcgctagtcattcatttttgagaagttgcttcttttacatcagaaaaccagtcaatcatatggagacttcttttgtgatgaaaaagggctttagaagttaaatacatgcatgcacatgaaaacatgcacaaccacagcctcaatcttgtatttagtttggggaaagagaagagaatttcctgtggattattttttcctcaagtgcacctctctggttaacccaaactctgcaagaaagcactgtgactaaaacatacataacgcctgcataaatattccatggtttcagttaaatttcagtttttagcctttacacatgaggtcaaaggagtgacgaaaatacaaagcaaggaaaaaatgaaatatctggtttttgctgaatgcttaatttattttttactgtgccactccaatatttatcaaatccaaatagcatgaatgcttctctgtagtaatactaattttgtgccttttgtctgctttcttaagaccagttgttcacactttgtagatattagacaaatatatttcgattgaatacaaaaaaaaacaaatgaaaaataagagagaggaaaaaacaaagagcgaaagagaggaaaaacagaagggggggcgattttggggaagaacgccaattataggcgaagggagataagagagggaaacagggaagtgatgtggacttgaggaacagaacgaattattagtggtacattataataagagaaagataaaggat

SEQ ID NO: 50673 - DNA, 2243 bp, Homo sapiens
caccggccctgaggtgcatgtatctcaccaggccggcaaagaatggacggtccttcaggtcaacgtagtgttccttgagaagatcttcggaagcatcgcatgaatttcagaccgacaaggtcggaatcacatttctgcgtcagaaacgcattgataatcatctccgcacaagagccccgcatggaccaccatctgggtattcgatcagcaaagtgaaagtgacgctcaacaagttcggccaatggcttccatgtccaagctgcgattatggtcttgaacatccgcgcatgcagtcccgccagcaacgcacagaaacgcagccacagggaccctacagtggttcagcagcctgcgtgcacagaattcaggcacagagggcaagttcactgggcatgtgccgctgggggtctctagtgataggggaagcgtgtgttgaggctcctggaacacggggaggagtacgtattcaccctgcctagtgcctacgcccggtccattctcaccatcccgtgggtggagctcggaggaaaagtcagcatcaactgtgccaagactgggtactcagcgacagtgatattccacacgaagcctttctatggagggaaagtccacagggttaccgcagaagtgaagcacaacccaaccaacaccattgtttgtaaagcccatggggaatggaatggtactttagagttcacctacaacaatggagaaaccaaagtcatcgacacaaccacactgccagtgtatcccaagaagatcagacctcttgagaagcagggacccatggagtccaggaacctctggcgggaggtgacccgatacctgcggctgggggacattgacgcagccaccgagcagaagcggcacctggaggagaagcaacgggtggaggaacggaagcgcgagaacctccgcacaccatggaagcccaaatattttatccaggagggcgatggctgggtatacttcaatcccctctggaaagcacactgatggggtggaggtgcagagctttccagtatagccctgtttttgtaggaatattaaagtagtagagtatcagggttttgttggcattcactgagaccttgtattagcatccaagaaatgatgagagagagagaaattatatactatgaaaagtgcacccccacactctgctagaggaatgaatttattcaagagccattcggggcacgtgtgtgtacacaccgtatacgttcacacacatgcactatgtaaacatctgagtatgattacacatttaaatactgcactcaccaaggttaaagtgggtaatcataagctcctttttatcaatgaagtttgaagtttttctatttttcactttgccaaaaatgttttacactcacaaagatattctcacttagtcaactcctgtcaaaatgaaggtgaactggcatggcccgatcactgtccataagggagaaagtggctcattcctggtagaagtatgggtggttatcatttcaaaattattgtgattctcacctccctccccacctcagtgttttgtctgtccgcgcccaagaaagataagcaagtatttcctgctggatgggggttggcaggaagctgttaaagatttatgccagagccttgcaggatggagcacctctgggacaactaagagccaaggcccaccaaggagttttccacccgtctctcatggtcacagcgctagtcattcatttttgagaagttgcttcttttacatcagaaaaccagtcaatcatatggagacttcttttgtgatgaaaaagggctttagaagttaaatacatgcatgcacatgaaaacatgcacaaccacagcctcaatcttgtatttagtttggggaaagagaagagaatttcctgtggattattttttcctcaagtgcacctctctggttaacccaaactctgcaagaaagcactgtgactaaaacatacataacgcctgcataaatattccatggtttcagttaaatttcagtttttagcctttacacatgaggtcaaaggagtgacgaaaatacaaagcaaggaaaaaatgaaatatctggtttttgctgaatgcttaatttattttttactgtgccactccaatatttatcaaatccaaatagcatgaatgcttctctgtagtaatactaattttgtgccttttgtctgctttcttaagaccagttgttcacactttgtagatattagacaaatatatttcgattgaataca

SEQ ID NO: 50674 - DNA, 3425 bp, Homo sapiens
ctgtagcagcagcagcagccgccgtgccggggccgccaccgcggcgggcacccgcgtcccgggcgcccacggaccatggagagggcagtccagggcacagacggcggcgggggtagcaacagcagcagccgcagcagcagccgtgctacctcggcgggctcctcgccctcctgctctctggcgggccggggggtctccagccggtcggcggcggccgggctcggcggcgggggaagccgcagcagcccgggctctgtggccgctagcccgtccgggggaggcggccgcaggagggagccggcgctcgagggcgtgctcagcaaatacaccaacctcctccagggctggcagaacaggtacttcgtactggatttcgaggctggcatcctgcagtattttgtgaatgagcaaagcaaacaccagaagcctcgaggagtcctgtctttatctggagccatagtgtccctgagcgatgaagctccccacatgctggtggtgtactctgctaatggagagatgtttaaactgagagctgctgatgcaaaagagaaacaattctgggtgactcagcttcgagcttgtgccaaataccacatggaaatgaattctaagatgatgaaccaggtggaagggcagcagaaggaccttgtgcacgccattgagtccctgccagggtccggccccctcactgccttggaccaggacctgctgctcctgaaagctacctctgctgccaccctcagctgccttggggagtgcctcaacttgttacagcagagtgtgcaccaggcgggccagcccagccagaagccaggagcctcggaaaacatcctgggatggcacgggtccaagtcacattccacagagcagctgaaaaatgggacacttggctctttgccatcagccagtgccaacataacctgggcaattttaccaaactctgctgaagacgaacaaacctcacagccagagccagagccaaactcaggctctgaattggttttgtctgaagatgaaaaaagtgacaatgaagataaggaagagacggaattgggcgtcatggaggatcagcgtagtataattcttcatctcatttcacaactcaaacttggaatggatttgaccaaggtggtgcttcccacctttatcctggagaagcgatctttgctggagatgtatgcagatttcatggcgcacccagacctactgctggccatcaccgctggggccacaccagaggagagagtcatttgcttcgttgagtattatctcacagcctttcacgagggccgcaagggcgctttagccaagaagccctacaaccccatcataggcgagacatttcactgctcctgggaagttcccaaggacagggtcaagcctaagaggactgcttcccgctctcctgccagctgtcacgaacacccaatggccgatgacccttccaaaagctacaaactaaggtttgtggctgagcaagtgtcccatcacccacccatctcctgcttctactgtgagtgcgaggagaagagactgtgcgtcaacactcatgtatggaccaaaagcaagttcatgggcatgtccgtgggggtctctatgataggggaaggtgtgttgaggctcctggaacacggggaggagtacgtattcaccctgcctagtgcctacgcccggtccattctcaccatcccgtgggtggagctcggaggaaaagtcagcatcaactgtgccaagactgggtactcagcgacagtgatattccacacgaagcctttctatggagggaaagtccacagggttaccgcagaagtgaagcacaacccaaccaacaccattgtttgtaaagcccatggggaatggaatggtactttagagttcacctacaacaatggagaaaccaaagtcatcgacacaaccacactgccagtgtatcccaagaagatcagacctcttgagaagcagggacccatggagtccaggaacctctggcgggaggtgacccgatacctgcggctgggggacattgacgcagccaccgagcagaagcggcacctggaggagaagcaacgggtggaggaacggaagcgcgagaacctccgcacaccatggaagcccaaatattttatccaggagggcgatggctgggtatacttcaatcccctctggaaagcacactgatggggtggaggtgcagagctttccagtatagccctgtttttgtaggaatattaaagtagtagagtatcagggttttgttggcattcactgagaccttgtattagcatccaagaaatgatgagagagagagaaattatatactatgaaaagtgcacccccacactctgctagaggaatgaatttattcaagagccattcggggcacgtgtgtgtacacaccgtatacgttcacacacatgcactatgtaaacatctgagtatgattacacatttaaatactgcactcaccaaggttaaagtgggtaatcataagctcctttttatcaatgaagtttgaagtttttctatttttcactttgccaaaaatgttttacactcacaaagatattctcacttagtcaactcctgtcaaaatgaaggtgaactggcatggcccgatcactgtccataagggagaaagtggctcattcctggtagaagtatgggtggttatcatttcaaaattattgtgattctcacctccctccccacctcagtgttttgtctgtccgcgcccaagaaagataagcaagtatttcctgctggatgggggttggcaggaagctgttaaagatttatgccagagccttgcaggatggagcacctctgggacaactaagagccaaggcccaccaaggagttttccacccgtctctcatggtcacagcgctagtcattcatttttgagaagttgcttcttttacatcagaaaaccagtcaatcatatggagacttcttttgtgatgaaaaagggctttagaagttaaatacatgcatgcacatgaaaacatgcacaaccacagcctcaatcttgtatttagtttggggaaagagaagagaatttcctgtggattattttttcctcaagtgcacctctctggttaacccaaactctgcaagaaagcactgtgactaaaacatacataacgcctgcataaatattccatggtttcagttaaatttcagtttttagcctttacacatgaggtcaaaggagtgacgaaaatacaaagcaaggaaaaaatgaaatatctggtttttgctgaatgcttaatttattttttactgtgccactccaatatttatcaaatccaaatagcatgaatgcttctctgtagtaatactaattttgtgccttttgtctgctttcttaagaccagttgttcacactttgtagatattagacaaatatatttcgattgaataca

SEQ ID NO: 50675 - DNA, 2642 bp, Homo sapiens
tcctgtgggcttcactgagatcttcccaaccatctctttagaattggggttatttagagctgattgagaacaccttaggagtatgtctgtggaaaacgtctatttacgttgaagttttaaaaatgcctaccccaggagggaaggaacaccgttattacctctctttggaatgttggaaaggaatggtccgtgtggccaaactcaggctctgaattggttttgtctgaagatgaaaaaagtgacaatgaagataaggaagagacggaattgggcgtcatggaggatcagcgtagtataattcttcatctcatttcacaactcaaacttggaatggatttgaccaaggtggtgcttcccacctttatcctggagaagcgatctttgctggagatgtatgcagatttcatggcgcacccagacctactgctggccatcaccgctggggccacaccagaggagagagtcatttgcttcgttgagtattatctcacagcctttcacgagggccgcaagggcgctttagccaagaagccctacaaccccatcataggcgagacatttcactgctcctgggaagttcccaaggacagggtcaagcctaagaggactgcttcccgctctcctgccagctgtcacgaacacccaatggccgatgacccttccaaaagctacaaactaaggtttgtggctgagcaagtgtcccatcacccacccatctcctgcttctactgtgagtgcgaggagaagagactgtgcgtcaacactcatgtatggaccaaaagcaagttcatgggcatgtccgtgggggtctctatgataggggaaggtgtgttgaggctcctggaacacggggaggagtacgtattcaccctgcctagtgcctacgcccggtccattctcaccatcccgtgggtggagctcggaggaaaagtcagcatcaactgtgccaagactgggtactcagcgacagtgatattccacacgaagcctttctatggagggaaagtccacagggttaccgcagaagtgaagcacaacccaaccaacaccattgtttgtaaagcccatggggaatggaatggtactttagagttcacctacaacaatggagaaaccaaagtcatcgacacaaccacactgccagtgtatcccaagaagatcagacctcttgagaagcagggacccatggagtccaggaacctctggcgggaggtgacccgatacctgcggctgggggacattgacgcagccaccgagcagaagcggcacctggaggagaagcaacgggtggaggaacggaagcgcgagaacctccgcacaccatggaagcccaaatattttatccaggagggcgatggctgggtatacttcaatcccctctggaaagcacactgatggggtggaggtgcagagctttccagtatagccctgtttttgtaggaatattaaagtagtagagtatcagggttttgttggcattcactgagaccttgtattagcatccaagaaatgatgagagagagagaaattatatactatgaaaagtgcacccccacactctgctagaggaatgaatttattcaagagccattcggggcacgtgtgtgtacacaccgtatacgttcacacacatgcactatgtaaacatctgagtatgattacacatttaaatactgcactcaccaaggttaaagtgggtaatcataagctcctttttatcaatgaagtttgaagtttttctatttttcactttgccaaaaatgttttacactcacaaagatattctcacttagtcaactcctgtcaaaatgaaggtgaactggcatggcccgatcactgtccataagggagaaagtggctcattcctggtagaagtatgggtggttatcatttcaaaattattgtgattctcacctccctccccacctcagtgttttgtctgtccgcgcccaagaaagataagcaagtatttcctgctggatgggggttggcaggaagctgttaaagatttatgccagagccttgcaggatggagcacctctgggacaactaagagccaaggcccaccaaggagttttccacccgtctctcatggtcacagcgctagtcattcatttttgagaagttgcttcttttacatcagaaaaccagtcaatcatatggagacttcttttgtgatgaaaaagggctttagaagttaaatacatgcatgcacatgaaaacatgcacaaccacagcctcaatcttgtatttagtttggggaaagagaagagaatttcctgtggattattttttcctcaagtgcacctctctggttaacccaaactctgcaagaaagcactgtgactaaaacatacataacgcctgcataaatattccatggtttcagttaaatttcagtttttagcctttacacatgaggtcaaaggagtgacgaaaatacaaagcaaggaaaaaatgaaatatctggtttttgctgaatgcttaatttattttttactgtgccactccaatatttatcaaatccaaatagcatgaatgcttctctgtagtaatactaattttgtgccttttgtctgctttcttaagaccagttgttcacactttgtagatattagacaaatatatttcgattgaataca

SEQ ID NO: 50676 - DNA, 1267 bp, Homo sapiens
  misc_feature (989)..(989): n is a, c, g, or t
ctgtagcagcagcagcagccgccgtgccggggccgccaccgcggcgggcacccgcgtcccgggcgcccacggaccatggagagggcagtccagggcacagacggcggcgggggtagcaacagcagcagccgcagcagcagccgtgctacctcggcgggctcctcgccctcctgctctctggcgggccggggggtctccagccggtcggcggcggccgggctcggcggcgggggaagccgcagcagcccgggctctgtggccgctagcccgtccgggggaggcggccgcaggagggagccggcgctcgagggcgtgctcagcaaatacaccaacctcctccagggctggcagaacaggtacttcgtactggatttcgaggctggcatcctgcagtattttgtgaatgagcaaagcaaacaccagaagcctcgaggagtcctgtctttatctggagccatagtgtccctgagcgatgaagctccccacatgctggtggtgtactctgctaatggagagatgtttaaactgagagctgctgatgcaaaagagaaacaattctgggtgactcagcttcgagcttgtgccaaataccacatggaaatgaattctaagatgatgaaccaggtggaagggcagcagaaggaccttgtgcacgccattgagtccctgccagggtccggccccctcactgccttggaccaggacctgctgctcctgaaagctacctctgctgccaccctcagctgccttggggagtgcctcaacttgttacagcagagtgtgcaccaggcgggccagcccagccagaagccaggagcctcggaaaacatcctgggatggcacgggtccaagtcacattccacagagcagctgaaaaatgggacacttggctctttgccatcagccagtgccaacataacctgggcaattttaccaaactctgctgaagacgaacaaacctcacagccagagccagagccagaactcanggctcctgaattcggtcttcgtcctgaacgatgacaaacaagctgacaatcgacagatcaaggcaagagaccggaacttgcggcgtcatcggacggatccagcgtacgtatacattcgttcatcgtcatcttcacgaacgtcaaaacttcggcaatggcacttcgacgcacaggtgcgtgctttccacaccgttctatccctgcgacgaacgcgaatcgtttgcctggcagcatggctatgccagattaacagtcggcgacaccccagcaccgtcacg

SEQ ID NO: 50677 - DNA, 586 bp, Homo sapiens
ggccgaataggaacagctccggtctacagctcccagcgtgagcgacgcaaagacgggtgatttctgcatttccatctgaggtgaagacaccatgttcctctactgttgtggatgcagccctcaccagacgaccgaacctgccagtgccttgttcttggacttcctagccttcagaactactgtttgacctctggtaactaaaactgcagaaggcaaaactggataaggagactactgtaatgattatgctattacaagacgctcgattgctaacatcagacatttttataaaaggccagaatcctgctaggacatctctgcctgtggaaggagggctggatggcatactgggaatggctttctaggatgacttcctgttgctacagactacaagaagcatttctggccttgatgttgtctgaatgaagaagacataggagtttcaccaaaggtaggatcctgattgttacacgaactgtccacctccatccagagccgtgtggcttgtagtgccttctcgtggcagatgcagaaaagggcaacctgtatcccaaaggtgaaatcaataaatgcatgaaaaaaatgc

SEQ ID NO: 50678 - DNA, 478 bp, Homo sapiens
gtgggagctgactgtcccctgggagtaattctgtgaccataattagccacacagctcctctggaggcccctctaaaggacccccaagcttgggcacatgacccaaggtcagccagcaagatgccctgtcccggaaatttacatctgtgtatgagccacatgagaacagggaagcttgcagtgagagcacagcggttttcctggaactgccccacaaggctgtctctgagccccttttgctgggtccccagagctgctgtggctcccattcttcctgaggtctgagattccatcttccttcagttctgtaggatcctgattgttacacgaactgtccacctccatccagagccgtgtggcttgtagtgccttctcgtggcaggtatattttcctgcctgttcacgtgacttgtgttggccagtggaatatagtttgatctgcagtagtttgaatctgaggatgctgaacctgtggataa

SEQ ID NO: 50679 - DNA, 431 bp, Homo sapiens
agaaacaatttcctaagcgttcactggagatgtttcgatgctggcagcacagggtcttaacagcgaagacgtcggtttctgcttaatttcttcccagcctttttgaatttcaacagactgagcagatctgtcccttaattttagggtttttggtctttgcttgcggttgcaagaaaagctgagttttgactaacttggaggcatttctaaattcttaacatacaacgattgcattaggtttattctgaaactataaattgaagttgttctttttaaatgtaaagctcatgtgtagtaaaacagtgcttgagaaaaacatcagaacacaacactgaagggttgcttcttttctcaagtgcaaatggtaattaaaatttaaatggtaaagattgtccttttcataccatctattgcagtcatttacaatttta

SEQ ID NO: 50680 - DNA, 716 bp, Homo sapiens
atggatagttttgcaggccatgatgtgcagtgtccctttagcagtcattaactcacagtgagttatcaatgggtgttagttctctgtgggtctgacaacttagtatagtgaaaagagtgctggcctgtggctgaacatgctggagaagagcttgcctggccacagggacacagccacgcagatccagcatgtgtctcccatgtgccaagtggagcccccagccaagaaggcagccacactagcagagggtgacaaggacaatgacattgacctgtttgtcagcgacaatgaggaggaagacaaggaggcagcccggctgtgggagaagtggctgaggtggtatgtggagaagaaggccaagaagactgcgttggtggtcaagtcctccatcccgctggacatcaagccttgggacaatgagaccaatatagcccaattggaggcctgtatgcgcttcatccagctggacgggctggtctaggggggcctccaagctggtgcccatgggctacggtatccggaagctgcagattcagtgtgtggtgggggacgacaaggtggggacaaactttctggaagaggagattaccaagtttgagagcgtgtgtagagtgtcgatgttgcagctttcaacaaggtctgaagccttagagtgtgtgtgcgtgcatgcgcacgtgtgcaagtgtgtgaggccctgccactattaaaaactgaga

SEQ ID NO: 50681 - DNA, 742 bp, Homo sapiens
gatgtgttctcctgcatgagctccccagacgtaagctgaactctcttgctgcctctccctcccttgcaactgtcatttttttaacactgaacgttttgtttttctaaagcaaccttatatgaagtctgcatatataaaggtgaaagcagtattttacagctataaacagcaatccaaaagcacgacatttacctattataaagtcaatcagtgaggataatagggctgttggaataatcctgacaaagtgaaaagtagatgacagatcatggtgatagtctcatgtcagcttcagaccccaggttatgcctatattttgtttggttttgtgattgtgaaaaaaccctagttactgctgatagacaactgcaaggagcagcagagctttccctctcttctgtacatcaggtacaatccaaggatgctaggatccttggaatacagtttgaaaatcacagaagcatcttagtgctatttagacatctgtcttatctgctgtgccaatgggcctcctgagggcagggtcagagacccaggcaggatctgagtcccttggaggcccctaggacatgtctgctggatggaggaatccacccgaaggtcccagggccatccccagaattcagactttctgggctcccacattctgataaggctgatttgctcggccacaagactcacaggaaagcccaccaaaaaagcaagagcagaaataaaggcagctagaattggggcagaaaag

SEQ ID NO: 50682 - DNA, 535 bp, Homo sapiens
attaaccttaattattttaattagctattatggacatttggattttgtgggtggagcactgaaaaaaactatacatctttcaatatttgtattgcttgtttgattttcaaaattttattacattagctacactatttaaaacaatgttgaatgatagggggatatccttatcttatttctgattttaatggaaatgtttgcactacaccaattattaataatacgatatttgctattaagttttggtaattttcatatttcagttctttgtctcttagagttttattaagaatacttaattttattaactggcttttgacattgatgtagacaatatgttgatgtaatgaatgttacagattatttttcttatgttattggaaaacattttaatcatgatgtcttgcttggaacttctattcttgaaacacaaagggcagtagagttctatttatacaatttactaattatgtttcttccatctccaaaaggaaattgagtttccttacaataaaagaatacattaaaatagaaa

SEQ ID NO: 50683 - DNA, 385 bp, Homo sapiens
aaacagagactacggactactttgtatcccagcatgtagggcagtgcctttattgatttcttagttgaataacttataatcttcccatttctgtatttattttcttcctaaaccgcttaattatcttggtgtttttaccctcatgggcctttgataagaagacgagctgtgtgggggaaatcttttctaagctgcaagtaaaggagtgttttcattttcttaaatcagacacttgtgctatcacctttcattgcagtctctctggcctatgagaaaatgagacattgacatttataagaaaatattactaactatgcttctttcctgaataatgaaaatgcatcttaatgaattatttttctttgttacatgttttctcacaaca

SEQ ID NO: 50684 - DNA, 463 bp, Homo sapiens
catgtataaaataccttcagctgaacacctggaatagtgtttaattgaattaattgttactccttcgacttaagtatctggcttaagtacataggatattggtattgtgtcctagccaaattgacacaaaagtaatcattacacccaggtttctccaaatgttgtcattttacatttgtttttaccaaccccagctgtcctccctctttttatcttgctaccctgcctcccacacacacaattttctgaattctttggaagtaatttgtaaacacaatgcccacttatccctaacaatcaaaaaattatccttgaaacaatactcttatttaatctacaggtcttttcaaatttgtactgttctcccaataatacctttgaattttaaatccaggaggctgtaaagtagcaaactaacgccaactgaccagatttgttccccacaacttttaactttcttaac

SEQ ID NO: 50685 - DNA, 329 bp, Homo sapiens
atataagtatgtatgtgtgtgcgtataagtaaggtggttcatgtgagcatgtcctctcctcagcactccacttaccgactgctcaaatgaattaagatgtctcttcataatgaacacatgcctcttaccttttgacagtttaactataaaaatttgacttcctttatttcttttgcaaattagggttatacttaaaactttaaatattatttgtattaggcaatttgattatgatatgccttgatacagttttcttcatgatttttgtgcttgaagtttgttgagcttcttttgtctgtggattgatggtttacatcagatttagaaaa

SEQ ID NO: 50686 - DNA, 416 bp, Homo sapiens
tatctcaaaaaaaaaaaaagaaaaaaaaaaaagtagagattgcattagttccatatctccgcagagttctctggtagattaaatgttctctgtgcactaggccaaggaagttcctgttacctttgaaaatcattgtgtttgctctgattgtctacattagctcatatcagtcttttgaacactggttcaaatctgggtgttgggttaggatctgatgagtagagaatagtggaaagttgatataggaaggtatactggtttctggtgtgattctttagctacatttattccttgtcttatgtcatttcactggatcatgtaactgtcctggctttcagaaattatattagatgcccagcctttctcattcagagatgcctgtattattatgttatttcgattgcctaccaaaaaaa

SEQ ID NO: 50687 - DNA, 262 bp, Homo sapiens
gctaagtgcaccccaagggaagctttgggagcacaaagcccatgagggaaggtgagttttgagggaggagtggtgaggcacctgtcacagaaaaagaaaaaaaaaacaatacgcgccacggagaagcagggcctgggtcccccacgatgaaaatgccttcccatcagctcctgctctgggccctgtggaccctggagaccctggttcgagccacgggtggcctcgggccgctaggagtaccccccgtgcgcctctctgcgcc

SEQ ID NO: 50688 - DNA, 695 bp, Homo sapiens
aatgagctaatgagagagtgagcaagaggtggcttgattgggcgccctccttcccagtgcccggtctgtgatggcctcacatttgacctctaactgtggctcacactattcactctgcttgcattgctctcttcttcactcctgcattgcttcactaaaccccagccctaccaccttaaaactctactcacattttaagtctccttcaggatgccttaatggggtacgagttctttgtctgaaggctcacagcattcagtacttctaaagttgtcttttttcctctctcaagagagatcccaatatcgtcttctcttccatttcctggtcaaggatagcactaacacctaagtatttccaaggtgggaattgaaagaggcctttccatccagcctgtattcctgtccccagacatgtgccagacctgtgctaggatggctgaattaaatggaacaaatgataacattagcatttgaatttggaatttagggtcaggatggttccatagaagctgctatagtttggatgtttgtcccctccaaacttcatgttgaaatttgatccctagtgttggaggtgaggcttaacagggggtgtttgggtcatgggggcagatctcttgtgaatggcttagtgtcatccttgctgtagtgagtgagttcttgctttattagttcccacaagagctgattgtt

SEQ ID NO: 50689 - DNA, 439 bp, Homo sapiens
cattttagagaatccatattctataaccatgtgaacaaactgcccttctgaaaatttataataatttacaaatctcttccctcaggagtgtgtaacactgccgttcctgtgacagcctctaccaaaaaaatttttttaatctcttctaattgagaatacaattttaattggcattcattttactaataatgtcgaattgtttttacatcttatttgctggcatatatatatgctttttaaatggacataccaaagtatgtttatccaatgtatgctgctcctgtgaaattagtcccttcggaaggtggtgtctctattctagtgacgtgaccttcccttaaacatttggggtaactcttctttttgagtgaccatcaggggctttagtgacattcttttgggatagtcttagggatccagttattatcatcaagttggg

SEQ ID NO: 50690 - DNA, 632 bp, Homo sapiens
aaaatgcacatttcctgatcttttcccagagtttctgaatctgttggtctggggacaaggtccaggaatctgcagtgtcacatgcacccagggcatgttgacgctgtctctctgaggactgctctttgaaaaacaggcttatatcacaacaagaaggaggctggcccactagcttttaagtatttagctgatttcctgctgaaatagtgcaatgtggttaacagtgagccttggaagagatgagtaaaggtgatgcttcaaagacatgctgagcaaactgaaaagcaagttaaagcgccgtgacattgcttccaaaagccaaggattgacagcagctgacagtcatgctggtacctgtgtcacctttgaatacaaagaacattgggcattttgacttatttcagcagggataaaatgttagggaggaaaatattcccctaactgccttcctcctctgaaacatcaatgtagaataataatgccttctactcatgtatcagctttccaatcaccaacttatttgaaggcatcacaaaagagaccttttaaatcatctacccttaggcaaatagtacatttcttgaaattccttgaatgttgaaaaatgtacttttgaaaaagacattccaaga

SEQ ID NO: 50691 - DNA, 3173 bp, Homo sapiens
ggaacccgcgcaaattgaaaggtcagcctttcgcgcgctgtgtaggcaagttgcccgtgttctgcgttgccggccgtgggtgctctggccacagtgagttaggggcgtcggagcgggtttctccaaccgcaatcggctccgctcaaggggaggaggagagtcccttctcggaaggcctaaggaaacgtgtcgtctggaatgggcttgggggccacgcctgcacatctccgcgagacagagggataaagtgaagatggtgctgttattgttacctcgagtgccacatgcgatctctgagatatgtacacagtcattcttactatcgcactcagccattcttactacgctaaagaagaaataattattcgaggatatttgcctggcccagaagaaacttatgtaaatttcatgaactattatatccgttttcctcggagtgagagaaaactctttttagatatcatctgagaggtagttaatttggcaccatggggatacagggattgctacaatttatcaaagaagcttcagaacccatccatgtgaggaagtataaagggcaggtagtagctgtggatacatattgctggcttcacaaaggagctattgcttgtgctgaaaaactagccaaaggtgaacctactgataggtatgtaggattttgtatgaaatttgtaaatatgttactatctcatgggatcaagcctattctcgtatttgatggatgtactttaccttctaaaaaggaagtagagagatctagaagagaaagacgacaagccaatcttcttaagggaaagcaacttcttcgtgaggggaaagtctcggaagctcgagagtgtttcacccggtctatcaatatcacacatgccatggcccacaaagtaattaaagctgcccggtctcagggggtagattgcctcgtggctccctatgaagctgatgcgcagttggcctatcttaacaaagcgggaattgtgcaagccataattacagaggactcggatctcctagcttttggctgtaaaaaggtaattttaaagatggaccagtttggaaatggacttgaaattgatcaagctcggctaggaatgtgcagacagcttggggatgtattcacggaagagaagtttcgttacatgtgtattctttcaggttgtgactacctgtcatcactgcgtgggattggattagcaaaggcatgcaaagtcctaagactagccaataatccagatatagtaaaggttatcaagaaaattggacattatctcaagatgaatatcacggtaccagaggattacatcaacgggtttattcgggccaacaataccttcctctatcagctagtttttgatcccatcaaaaggaaacttattcctctgaacgcctatgaagatgatgttgatcctgaaacactaagctacgctgggcaatatgttgatgattccatagctcttcaaatagcacttggaaataaagatataaatacttttgaacagatcgatgactacaatccagacactgctatgcctgcccattcaagaagtcgtagttgggatgacaaaacatgtcaaaagtcagctaatgttagcagcatttggcataggaattactctcccagaccagagtcgggtactgtttcagatgccccacaattgaaggaaaatccaagtactgtgggagtggaacgagtgattagtactaaagggttaaatctcccaaggaaatcatccattgtgaaaagaccaagaagtgcagagctgtcagaagatgacctgttgagtcagtattctctttcatttacgaagaagaccaagaaaaatagctctgaaggcaataaatcattgagcttttctgaagtgtttgtgcctgacctggtaaatggacctactaacaaaaagagtgtaagcactccacctaggacgagaaataaatttgcaacatttttacaaaggaaaaatgaagaaagtggtgcagttgtggttccagggaccagaagcaggtttttttgcagttcagattctactgactgtgtatcaaacaaagtgagcatccagcctctggatgaaactgctgtcacagataaagagaacaatctgcatgaatcagagtatggagaccaagaaggcaagagactggttgacacagatgtagcacgtaattcaagtgatgacattccgaataatcatattccaggtgatcatattccagacaaggcaacagtgtttacagatgaagagtcctactcttttaagagcagcaaatttacaaggaccatttcaccacccactttgggaacactaagaagttgttttagttggtctggaggtcttggagatttttcaagaacgccgagcccctctccaagcacagcattgcagcagttccgaagaaagagcgattcccccacctctttgcctgagaataatatgtctgatgtgtcgcagttaaagagcgaggagtccagtgacgatgagtctcatcccttacgagaaggggcatgttcttcacagtcccaggaaagtggagaattctcactgcagagttcaaatgcatcaaagctttctcagtgctctagtaaggactctgattcagaggaatctgattgcaatattaagttacttgacagtcaaagtgaccagacctccaagctatgtttatctcatttctcaaaaaaagacacacctctaaggaacaaggttcctgggctatataagtccagttctgcagactctctttctacaaccaagatcaaacctctaggacctgccagagccagtgggctgagcaagaagccggcaagcatccagaagagaaagcatcataatgccgagaacaagccggggttacagatcaaactcaatgagctctggaaaaactttggatttaaaaaagattctgaaaagcttcctccttgtaagaaacccctgtccccagtcagagataacatccaactaactccagaagcggaagaggatatatttaacaaacctgaatgtggccgtgttcaaagagcaatattccagtaaatgcagactgctgcaaagcttttgcctgcaagagaatctgatcaatttgaagtccctgtttgggaatgaggcacttatcagcatgaagaattttttctcattctgtgccattttaaaaatagaatacattttgtatattgactt

SEQ ID NO: 50692 - DNA, 3020 bp, Homo sapiens
ttccagtgtataccgatgggcgagtgcatcccgtaagcatagtcttatgctgtatcccagggtactcatctgatctccgtgttgtacctcggagtgagagacatcatcttgttagatatcatctcagaactagtgaatcccagtcactgagtggagttgagagtctaagaacctctgaaatttgagaactgctggaccagagcctttagagctctgataaggtgtcaacagggtagttaatttggcaccatggggatacagggattgctacaatttatcaaagaagcttcagaacccatccatgtgaggaagtataaagggcaggtagtagctgtggatacatattgctggcttcacaaaggagctattgcttgtgctgaaaaactagccaaaggtgaacctactgataggtatgtaggattttgtatgaaatttgtaaatatgttactatctcatgggatcaagcctattctcgtatttgatggatgtactttaccttctaaaaaggaagtagagagatctagaagagaaagacgacaagccaatcttcttaagggaaagcaacttcttcgtgaggggaaagtctcggaagctcgagagtgtttcacccggtctatcaatatcacacatgccatggcccacaaagtaattaaagctgcccggtctcagggggtagattgcctcgtggctccctatgaagctgatgcgcagttggcctatcttaacaaagcgggaattgtgcaagccataattacagaggactcggatctcctagcttttggctgtaaaaaggtaattttaaagatggaccagtttggaaatggacttgaaattgatcaagctcggctaggaatgtgcagacagcttggggatgtattcacggaagagaagtttcgttacatgtgtattctttcaggttgtgactacctgtcatcactgcgtgggattggattagcaaaggcatgcaaagtcctaagactagccaataatccagatatagtaaaggttatcaagaaaattggacattatctcaagatgaatatcacggtaccagaggattacatcaacgggtttattcgggccaacaataccttcctctatcagctagtttttgatcccatcaaaaggaaacttattcctctgaacgcctatgaagatgatgttgatcctgaaacactaagctacgctgggcaatatgttgatgattccatagctcttcaaatagcacttggaaataaagatataaatacttttgaacagatcgatgactacaatccagacactgctatgcctgcccattcaagaagtcgtagttgggatgacaaaacatgtcaaaagtcagctaatgttagcagcatttggcataggaattactctcccagaccagagtcgggtactgtttcagatgccccacaattgaaggaaaatccaagtactgtgggagtggaacgagtgattagtactaaagggttaaatctcccaaggaaatcatccattgtgaaaagaccaagaagtgcagagctgtcagaagatgacctgttgagtcagtattctctttcatttacgaagaagaccaagaaaaatagctctgaaggcaataaatcattgagcttttctgaagtgtttgtgcctgacctggtaaatggacctactaacaaaaagagtgtaagcactccacctaggacgagaaataaatttgcaacatttttacaaaggaaaaatgaagaaagtggtgcagttgtggttccagggaccagaagcaggtttttttgcagttcagattctactgactgtgtatcaaacaaagtgagcatccagcctctggatgaaactgctgtcacagataaagagaacaatctgcatgaatcagagtatggagaccaagaaggcaagagactggttgacacagatgtagcacgtaattcaagtgatgacattccgaataatcatattccaggtgatcatattccagacaaggcaacagtgtttacagatgaagagtcctactcttttaagagcagcaaatttacaaggaccatttcaccacccactttgggaacactaagaagttgttttagttggtctggaggtcttggagatttttcaagaacgccgagcccctctccaagcacagcattgcagcagttccgaagaaagagcgattcccccacctctttgcctgagaataatatgtctgatgtgtcgcagttaaagagcgaggagtccagtgacgatgagtctcatcccttacgagaaggggcatgttcttcacagtcccaggaaagtggagaattctcactgcagagttcaaatgcatcaaagctttctcagtgctctagtaaggactctgattcagaggaatctgattgcaatattaagttacttgacagtcaaagtgaccagacctccaagctatgtttatctcatttctcaaaaaaagacacacctctaaggaacaaggttcctgggctatataagtccagttctgcagactctctttctacaaccaagatcaaacctctaggacctgccagagccagtgggctgagcaagaagccggcaagcatccagaagagaaagcatcataatgccgagaacaagccggggttacagatcaaactcaatgagctctggaaaaactttggatttaaaaaagattctgaaaagcttcctccttgtaagaaacccctgtccccagtcagagataacatccaactaactccagaagcggaagaggatatatttaacaaacctgaatgtggccgtgttcaaagagcaatattccagtaaatgcagactgctgcaaagcttttgcctgcaagagaatctgatcaatttgaagtccctgtttgggaatgaggcacttatcagcatgaagaattttttctcattctgtgccattttaaaaatagaatacattttgtatattgactttataattgggttgtggtttttttgctcagctttttatatttttataagaagctaaatagaagaataattgtatctctgacaggttt

SEQ ID NO: 50693 - DNA, 3240 bp, Homo sapiens
ggaacccgcgcaaattgaaaggtcagcctttcgcgcgctgtgtaggcaagttgcccgtgttctgcgttgccggccgtgggtgctctggccacagtgagttaggggcgtcggagcgggtttctccaaccgcaatcggctccgctcaaggggaggaggagagtcccttctcggaaggcctaaggaaacgtgtcgtctggaatgggcttgggggccacgcctgcacatctccgcgagacagagggataaagtgaagatggtgctgttattgttacctcgagtgccacatgcgatctctgagatatgtacacagtcattcttactatcgcactcagccattcttactacgctaaagaagaaataattattcgaggatatttgcctggcccagaagaaacttatgtaaatttcatgaactattatatccgttttcctcggagtgagagaaaactctttttagatatcatctgagagaactagtgaatcccagtcactgagtggagttgagagtctaagaacctctgaaatttgagaactgctggaccagagcctttagagctctgataaggtgtcaacagggtagttaatttggcaccatggggatacagggattgctacaatttatcaaagaagcttcagaacccatccatgtgaggaagtataaagggcaggtagtagctgtggatacatattgctggcttcacaaaggagctattgcttgtgctgaaaaactagccaaaggtgaacctactgataggtatgtaggattttgtatgaaatttgtaaatatgttactatctcatgggatcaagcctattctcgtatttgatggatgtactttaccttctaaaaaggaagtagagagatctagaagagagctgcccggtctcagggggtagattgcctcgtggctccctatgaagctgatgcgcagttggcctatcttaacaaagcgggaattgtgcaagccataattacagaggactcggatctcctagcttttggctgtaaaaaggtaattttaaagatggaccagtttggaaatggacttgaaattgatcaagctcggctaggaatgtgcagacagcttggggatgtattcacggaagagaagtttcgttacatgtgtattctttcaggttgtgactacctgtcatcactgcgtgggattggattagcaaaggcatgcaaagtcctaagactagccaataatccagatatagtaaaggttatcaagaaaattggacattatctcaagatgaatatcacggtaccagaggattacatcaacgggtttattcgggccaacaataccttcctctatcagctagtttttgatcccatcaaaaggaaacttattcctctgaacgcctatgaagatgatgttgatcctgaaacactaagctacgctgggcaatatgttgatgattccatagctcttcaaatagcacttggaaataaagatataaatacttttgaacagatcgatgactacaatccagacactgctatgcctgcccattcaagaagtcgtagttgggatgacaaaacatgtcaaaagtcagctaatgttagcagcatttggcataggaattactctcccagaccagagtcgggtactgtttcagatgccccacaattgaaggaaaatccaagtactgtgggagtggaacgagtgattagtactaaagggttaaatctcccaaggaaatcatccattgtgaaaagaccaagaagtgcagagctgtcagaagatgacctgttgagtcagtattctctttcatttacgaagaagaccaagaaaaatagctctgaaggcaataaatcattgagcttttctgaagtgtttgtgcctgacctggtaaatggacctactaacaaaaagagtgtaagcactccacctaggacgagaaataaatttgcaacatttttacaaaggaaaaatgaagaaagtggtgcagttgtggttccagggaccagaagcaggtttttttgcagttcagattctactgactgtgtatcaaacaaagtgagcatccagcctctggatgaaactgctgtcacagataaagagaacaatctgcatgaatcagagtatggagaccaagaaggcaagagactggttgacacagatgtagcacgtaattcaagtgatgacattccgaataatcatattccaggtgatcatattccagacaaggcaacagtgtttacagatgaagagtcctactcttttaagagcagcaaatttacaaggaccatttcaccacccactttgggaacactaagaagttgttttagttggtctggaggtcttggagatttttcaagaacgccgagcccctctccaagcacagcattgcagcagttccgaagaaagagcgattcccccacctctttgcctgagaataatatgtctgatgtgtcgcagttaaagagcgaggagtccagtgacgatgagtctcatcccttacgagaaggggcatgttcttcacagtcccaggaaagtggagaattctcactgcagagttcaaatgcatcaaagctttctcagtgctctagtaaggactctgattcagaggaatctgattgcaatattaagttacttgacagtcaaagtgaccagacctccaagctatgtttatctcatttctcaaaaaaagacacacctctaaggaacaaggttcctgggctatataagtccagttctgcagactctctttctacaaccaagatcaaacctctaggacctgccagagccagtgggctgagcaagaagccggcaagcatccagaagagaaagcatcataatgccgagaacaagccggggttacagatcaaactcaatgagctctggaaaaactttggatttaaaaaagattctgaaaagcttcctccttgtaagaaacccctgtccccagtcagagataacatccaactaactccagaagcggaagaggatatatttaacaaacctgaatgtggccgtgttcaaagagcaatattccagtaaatgcagactgctgcaaagcttttgcctgcaagagaatctgatcaatttgaagtccctgtttgggaatgaggcacttatcagcatgaagaattttttctcattctgtgccattttaaaaatagaatacattttgtatattgactttataattgggttgtggtttttttgctcagctttttatatttttataagaagctaaatagaagaataattgtatctctgacaggttt

SEQ ID NO: 50694 - DNA, 3233 bp, Homo sapiens
agtcagaaggtttgagggtcaaagaattgcttaatcctgggaggtggagttttccagcgatgcaagattattcccactgcactctagaattgggcgacagagtgagtccgtcaaaaaaaaagataaaattgttattttaagcagatgttttcataggaattggaacttatccttactagacttggattcaaatcctgccttggatacttacgagccatgtgatgtctggtgaactacttgaccctccaagccttggtttctttatctcccatcagtaaacaagttcaccaaagctagttacaacttgtttattgatgggagaggaagaaaatcaagggtggaaaattgttctaggcctaacctcaagtaaagggcagatgtcagaaggagaagggaacagcatcactagatagagaagacttcagcaatttccaaggagaaatcctaaggcataagtaaggctctctcttttaagtcatgttattccatagcaatggaaggaacaggccaccgtacctggcctgttaaaggtatgatggtaaaggtgaagtcagctttttctagcttacagttctgtcatccagttcctgagctaaaataggcgctacacttctgattttggctttgtcatttgagtctctggctcttttctgtatgggtcaagctagaaggaaacgatgcgatgcaggacagagcgtgaagtataaagaaatgtgtgctctgtgtagtcaggagaagagaggctgcattgtgtgcggaagtagagaagaaaccctgattggacacaaatagtggtgtaaaagtgtgtccagaattggtgggttcttggcctcactgacttcaagaatgaagccgcagaccctcgcggctgcccggtctcagggggtagattgcctcgtggctccctatgaagctgatgcgcagttggcctatcttaacaaagcgggaattgtgcaagccataattacagaggactcggatctcctagcttttggctgtaaaaaggtaattttaaagatggaccagtttggaaatggacttgaaattgatcaagctcggctaggaatgtgcagacagcttggggatgtattcacggaagagaagtttcgttacatgtgtattctttcaggttgtgactacctgtcatcactgcgtgggattggattagcaaaggcatgcaaagtcctaagactagccaataatccagatatagtaaaggttatcaagaaaattggacattatctcaagatgaatatcacggtaccagaggattacatcaacgggtttattcgggccaacaataccttcctctatcagctagtttttgatcccatcaaaaggaaacttattcctctgaacgcctatgaagatgatgttgatcctgaaacactaagctacgctgggcaatatgttgatgattccatagctcttcaaatagcacttggaaataaagatataaatacttttgaacagatcgatgactacaatccagacactgctatgcctgcccattcaagaagtcgtagttgggatgacaaaacatgtcaaaagtcagctaatgttagcagcatttggcataggaattactctcccagaccagagtcgggtactgtttcagatgccccacaattgaaggaaaatccaagtactgtgggagtggaacgagtgattagtactaaagggttaaatctcccaaggaaatcatccattgtgaaaagaccaagaagtgcagagctgtcagaagatgacctgttgagtcagtattctctttcatttacgaagaagaccaagaaaaatagctctgaaggcaataaatcattgagcttttctgaagtgtttgtgcctgacctggtaaatggacctactaacaaaaagagtgtaagcactccacctaggacgagaaataaatttgcaacatttttacaaaggaaaaatgaagaaagtggtgcagttgtggttccagggaccagaagcaggtttttttgcagttcagattctactgactgtgtatcaaacaaagtgagcatccagcctctggatgaaactgctgtcacagataaagagaacaatctgcatgaatcagagtatggagaccaagaaggcaagagactggttgacacagatgtagcacgtaattcaagtgatgacattccgaataatcatattccaggtgatcatattccagacaaggcaacagtgtttacagatgaagagtcctactcttttaagagcagcaaatttacaaggaccatttcaccacccactttgggaacactaagaagttgttttagttggtctggaggtcttggagatttttcaagaacgccgagcccctctccaagcacagcattgcagcagttccgaagaaagagcgattcccccacctctttgcctgagaataatatgtctgatgtgtcgcagttaaagagcgaggagtccagtgacgatgagtctcatcccttacgagaaggggcatgttcttcacagtcccaggaaagtggagaattctcactgcagagttcaaatgcatcaaagctttctcagtgctctagtaaggactctgattcagaggaatctgattgcaatattaagttacttgacagtcaaagtgaccagacctccaagctatgtttatctcatttctcaaaaaaagacacacctctaaggaacaaggttcctgggctatataagtccagttctgcagactctctttctacaaccaagatcaaacctctaggacctgccagagccagtgggctgagcaagaagccggcaagcatccagaagagaaagcatcataatgccgagaacaagccggggttacagatcaaactcaatgagctctggaaaaactttggatttaaaaaagattctgaaaagcttcctccttgtaagaaacccctgtccccagtcagagataacatccaactaactccagaagcggaagaggatatatttaacaaacctgaatgtggccgtgttcaaagagcaatattccagtaaatgcagactgctgcaaagcttttgcctgcaagagaatctgatcaatttgaagtccctgtttgggaatgaggcacttatcagcatgaagaattttttctcattctgtgccattttaaaaatagaatacattttgtatattgactttataattgggttgtggtttttttgctcagctttttatatttttataagaagctaaatagaagaataattgtatctctgacaggttt

SEQ ID NO: 50695 - DNA, 3605 bp, Homo sapiens
  misc_feature (3294)..(3294): n is a, c, g, or t
ggaacccgcgcaaattgaaaggtcagcctttcgcgcgctgtgtaggcaagttgcccgtgttctgcgttgccggccgtgggtgctctggccacagtgagttaggggcgtcggagcgggtttctccaaccgcaatcggctccgctcaaggggaggaggagagtcccttctcggaaggcctaaggaaacgtgtcgtctggaatgggcttgggggccacgcctgcacatctccgcgagacagagggataaagtgaagatggtgctgttattgttacctcgagtgccacatgcgatctctgagatatgtacacagtcattcttactatcgcactcagccattcttactacgctaaagaagaaataattattcgaggatatttgcctggcccagaagaaacttatgtaaatttcatgaactattatatccgttttcctcggagtgagagaaaactctttttagatatcatctgagagaactagtgaatcccagtcactgagtggagttgagagtctaagaacctctgaaatttgagaactgctggaccagagcctttagagctctgataaggtgtcaacagggtagttaatttggcaccatggggatacagggattgctacaatttatcaaagaagcttcagaacccatccatgtgaggaagtataaagggcaggtagtagctgtggatacatattgctggcttcacaaaggagctattgcttgtgctgaaaaactagccaaaggtgaacctactgataggtatgtaggattttgtatgaaatttgtaaatatgttactatctcatgggatcaagcctattctcgtatttgatggatgtactttaccttctaaaaaggaagtagagagatctagaagagaaagacgacaagccaatcttcttaagggaaagcaacttcttcgtgaggggaaagtctcggaagctcgagagtgtttcacccggtctatcaatatcacacatgccatggcccacaaagtaattaaagctgcccggtctcagggggtagattgcctcgtggctccctatgaagctgatgcgcagttggcctatcttaacaaagcgggaattgtgcaagccataattacagaggactcggatctcctagcttttggctgtaaaaaggtaattttaaagatggaccagtttggaaatggacttgaaattgatcaagctcggctaggaatgtgcagacagcttggggatgtattcacggaagagaagtttcgttacatgtgtattctttcaggttgtgactacctgtcatcactgcgtgggattggattagcaaaggcatgcaaagtcctaagactagccaataatccagatatagtaaaggttatcaagaaaattggacattatctcaagatgaatatcacggtaccagaggattacatcaacgggtttattcgggccaacaataccttcctctatcagctagtttttgatcccatcaaaaggaaacttattcctctgaacgcctatgaagatgatgttgatcctgaaacactaagctacgctgggcaatatgttgatgattccatagctcttcaaatagcacttggaaataaagatataaatacttttgaacagatcgatgactacaatccagacactgctatgcctgcccattcaagaagtcgtagttgggatgacaaaacatgtcaaaagtcagctaatgttagcagcatttggcataggaattactctcccagaccagagtcgggtactgtttcagatgccccacaattgaaggaaaatccaagtactgtgggagtggaacgagtgattagtactaaagggttaaatctcccaaggaaatcatccattgtgaaaagaccaagaagtgcagagctgtcagaagatgacctgttgagtcagtattctctttcatttacgaagaagaccaagaaaaatagctctgaaggcaataaatcattgagcttttctgaagtgtttgtgcctgacctggtaaatggacctactaacaaaaagagtgtaagcactccacctaggacgagaaataaatttgcaacatttttacaaaggaaaaatgaagaaagtggtgcagttgtggttccagggaccagaagcaggtttttttgcagttcagattctactgactgtgtatcaaacaaagtgagcatccagcctctggatgaaactgctgtcacagataaagagaacaatctgcatgaatcagagtatggagaccaagaaggcaagagactggttgacacagatgtagcacgtaattcaagtgatgacattccgaataatcatattccaggtgatcatattccagacaaggcaacagtgtttacagatgaagagtcctactcttttaagagcagcaaatttacaaggaccatttcaccacccactttgggaacactaagaagttgttttagttggtctggaggtcttggagatttttcaagaacgccgagcccctctccaagcacagcattgcagcagttccgaagaaagagcgattcccccacctctttgcctgagaataatatgtctgatgtgtcgcagttaaagagcgaggagtccagtgacgatgagtctcatcccttacgagaaggggcatgttcttcacagtcccaggaaagtggagaattctcactgcagagttcaaatgcatcaaagctttctcagtgctctagtaaggactctgattcagaggaatctgattgcaatattaagttacttgacagtcaaagtgaccagacctccaagctatgtttatctcatttctcaaaaaaagacacacctctaaggaacaaggttcctgggctatataagtccagttctgcagactctctttctacaaccaagatcaaacctctaggacctgccagagccagtgggctgagcaagaagccggcaagcatccagaagagaaagcatcataatgccgagaacaagccggggttacagatcaaactcaatgagctctggaaaaactttggatttaaaaaagattctgaaaagcttcctccttgtaagaaacccctgtccccagtcagagataacatccaactaactccagaagcggaagaggatatatttaacaaacctgaatgtggccgtgttcaaagagcaatattccagtaaatgcagactgctgcaaagcttttgcctgcaagagaatctgatcaatttgaagtccctgtttgggaatgaggcacttatcagcatgaagaattttttctcattctgtgccattttaaaaatagaatacattttgtatattgacttaaaaaaaaaaaaaaanaaaaaaaaaaaaaatttgtggggggcttgggcccggaaaaagtttttaaaaccaattggtgggggggggggggcccagataggttagggtaaccgtgtggccaaagcgtgctcccaaggaaaactcgggcgccaaggagacaaaggggcggggatctccctccccaattataaaaaaaccgcccgggggggaaccccagagcggtttctggacacaattctccgaagagggaggtcccggagggccactacaggggatccttcctcaccagggaggcccagaggaacgctccgaaatccaaagttaggcga

SEQ ID NO: 50696 - DNA, 3195 bp, Homo sapiens
ggaacccgcgcaaattgaaaggtcagcctttcgcgcgctgtgtaggcaagttgcccgtgttctgcgttgccggccgtgggtgctctggccacagtgagttaggggcgtcggagcgggtttctccaaccgcaatcggctccgctcaaggggaggaggagagtcccttctcggaaggcctaaggaaacgtgtcgtctggaatgggcttgggggccacgcctgcacatctccgcgagacagagggataaagtgaagatggtgctgttattgttacctcgagtgccacatgcgatctctgagatatgtacacagtcattcttactatcgcactcagccattcttactacgctaaagaagaaataattattcgaggatatttgcctggcccagaagaaacttatgtaaatttcatgaactattatatccgttttcctcggagtgagagaaaactctttttagatatcatctgagagaactagtgaatcccagtcactgagtggagttgagagtctaagaacctctgaaatttgagaactgctggaccagagcctttagagctctgataaggtgtcaacagggtagttaatttggcaccatggggatacagggattgctacaatttatcaaagaagcttcagaacccatccatgtgaggaagtataaagggcaggtagtagctgtggatacatattgctggcttcacaaaggagctattgcttgtgctgaaaaactagccaaaggtgaacctactgataggtatgtaggattttgtatgaaatttgtaaatatgttactatctcatgggatcaagcctattctcgtatttgatggatgtactttaccttctaaaaaggaagtagagagatctagaagagaaagacgacaagccaatcttcttaagggaaagcaacttcttcgtgaggggaaagtctcggaagctcgagagtgtttcacccggtctatcaatatcacacatgccatggcccacaaagtaattaaagctgcccggtctcagggggtagattgcctcgtggctccctatgaagctgatgcgcagttggcctatcttaacaaagcgggaattgtgcaagccataattacagaggactcggatctcctagcttttggctgtaaaaaggtaattttaaagatggaccagtttggaaatggacttgaaattgatcaagctcggctaggaatgtgcagacagcttggggatgtattcacggaagagaagtttcgttacatgtgtattctttcaggttgtgactacctgtcatcactgcgtgggattggattagcaaaggcatgcaaagtcctaagactagccaataatccagatatagtaaaggttatcaagaaaattggacattatctcaagatgaatatcacggtaccagaggattacatcaacgggtttattcgggccaacaataccttcctctatcagctagtttttgatcccatcaaaaggaaacttattcctctgaacgcctatgaagatgatgttgatcctgaaacactaagctacgctgggcaatatgttgatgattccatagctcttcaaatagcacttggaaataaagatataaatacttttgaacagatcgatgactacaatccagacactgctatgcctgcccattcaagaagtcgtagttgggatgacaaaacatgtcaaaagtcagctaatgttagcagcatttggcataggaattactctcccagaccagagtcgggtactgtttcagatgccccacaattgaaggaaaatccaagtactgtgggagtggaacgagtgattagtactaaagggttaaatctcccaaggaaatcatccattgtgaaaagaccaagaagtgcagagctgtcagaagatgacctgttgagtcagtattctctttcatttacgaagaagaccaagaaaaatagctctgaaggcaataaatcattgagcttttctgaagtgtttgtgcctgacctggtaaatggacctactaacaaaaagagtgtaagcactccacctaggacgagaaataaatttgcaacatttttacaaaggaaaaatgaagaaagtggtgcagttgtggttccagggaccagaagcaggtttttttgcagttcagattctactgactgtgtatcaaacaaagtgagcatccagcctctggatgaaactgctgtcacagataaagagaacaatctgcatgaatcagagtatggagaccaagaaggcaagagactggttgacacagatgtagcacgtaattcaagtgatgacattccgaataatcatattccaggtgatcatattccagacaaggcaacagtgtttacagatgaagagtcctactcttttaagagcagcaaatttacaaggaccatttcaccacccactttgggaacactaagaagttgttttagttggtctggaggtcttggagatttttcaagaacgccgagcccctctccaagcacagcattgcagcagttccgaagaaagagcgattcccccacctctttgcctgagaataatatgtctgatgtgtcgcagttaaagagcgaggagtccagtgacgatgagtctcatcccttacgagaaggggcatgttcttcacagtcccaggaaagtggagaattctcactgcagagttcaaatgcatcaaagctttctcagtgctctagtaaggactctgattcagaggaatctgattgcaatattaagttacttgacagtcaaagtgaccagacctccaagctatgtttatctcatttctcaaaaaaagacacacctctaaggaacaaggttcctgggctatataagtccagttctgcagactctctttctacaaccaagatcaaacctctaggacctgccagagccagtgggctgagcaagaagccggcaagcatccagaagagaaagcatcataatgccgagaacaagccggggttacagatcaaactcaatgagctctggaaaaactttggatttaaaaacaaatggtgtctcgtagtctgacgatttcagcacggagcatcactctgccttccgggttcaagctattcatcatatgccgtctcaaggagctgagtttacagcttcctacatgataggcagaaatctctaccacatcatttgctttcttaccgggtaatacgaggccccgtccgcaggctcaagccatgtacatcgc

SEQ ID NO: 50697 - DNA, 1148 bp, Homo sapiens
ggaacccgcgcaaattgaaaggtcagcctttcgcgcgctgtgtaggcaagttgcccgtgttctgcgttgccggccgtgggtgctctggccacagcctaaggaaacgtgtcgtctggaatgggcttgggggccacgcctgcacatctccgcgagacagagggataaagtgaagatggtgctgttattgttacctcgagtgccacatgcgatctctgagatatgtacacagtcattcttactatcgcactcagccattcttactacgctaaagaagaaataattattcgaggatatttgcctggcccagaagaaacttatgtaaatttcatgaactattatatccgttttcctcggagtgagagaaaactctttttagatatcatctgagaggtagttaatttggcaccatggggatacagggattgctacaatttatcaaagaagcttcagaacccatccatgtgaggaagtataaagggcaggtagtagctgtggatacatattgctggcttcacaaaggagctattgcttgtgctgaaaaactagccaaaggtgaacctactgatagaagacgacaagccaatcttcttaagggaaagcaacttcttcgtgaggggaaagtctcggaagctcgagagtgtttcacccggtctatcaatatcacacatgccatggcccacaaagtaattaaaggtcaagctagaaggaaacgatgcgatgcaggacagagcgtgaagtataaagaaatgtgtgctctgtgtagtcaggagaagagaggctgcattgtgtgcggaagtagagaagaaaccctgattggacacaaatagtggtgtaaaagtgtgtccagaattggtgggttcttggcctcactgacttcaagaatgaagccgcagaccctcgcggctgcccggtctcagggggtagattgcctcgtggctccctatgaagctgatgcgcagttggcctatcttaacaaagcgggaattgtgcaagccataattacagaggactcggatctcctagcttttggctgtaaaaaggttgtgactacctgtcatcactgcgtgggattggattagcaaaggcatgcaaagtcctaagactagccaataatccagatatagtaaaggtaagagtgatttgctaag

SEQ ID NO: 50698 - DNA, 3278 bp, Homo sapiens
ggaacccgcgcaaattgaaaggtcagcctttcgcgcgctgtgtaggcaagttgcccgtgttctgcgttgccggccgtgggtgctctggccacagtgagttaggggcgtcggagcgggtttctccaaccgcaatcggctccgctcaaggggaggaggagagtcccttctcggaaggcctaaggaaacgtgtcgtctggaatgggcttgggggccacgcctgcacatctccgcgagacagagggataaagtgaagatggtgctgttattgttacctcgagtgccacatgcgatctctgagatatgtacacagtcattcttactatcgcactcagccattcttactacgctaaagaagaaataattattcgaggatatttgcctggcccagaagaaacttatgtaaatttcatgaactattatatccgttttcctcggagtgagagaaaactctttttagatatcatctgagagaactagtgaatcccagtcactgagtggagttgagagtctaagaacctctgaaatttgagaactgctggaccagagcctttagagctctgataaggtgtcaacagggtagttaatttggcaccatggggatacagggattgctacaatttatcaaagaagcttcagaacccatccatgtgaggaagtataaagggcaggtagtagctgtggatacatattgctggcttcacaaaggagctattgcttgtgctgaaaaactagccaaaggtgaacctactgataggtatgtaggattttgtatgaaatttgtaaatatgttactatctcatgggatcaagcctattctcgtatttgatggatgtactttaccttctaaaaaggaagtagagagatctagaagagaaagacgacaagccaatcttcttaagggaaagcaacttcttcgtgaggggaaagtctcggaagctcgagagtgtttcacccggtctatcaatatcacacatgccatggcccacaaagtaattaaagctgcccggtctcagggggtagattgcctcgtggctccctatgaagctgatgcgcagttggcctatcttaacaaagcgggaattgtgcaagccataattacagaggactcggatctcctagcttttggctgtaaaaaggtaattttaaagatggaccagtttggaaatggacttgaaattgatcaagctcggctaggaatgtgcagacagcttggggatgtattcacggaagagaagtttcgttacatgtgtattctttcaggttgtgactacctgtcatcactgcgtgggattggattagcaaaggcatgcaaagtcctaagactagccaataatccagatatagtaaaggttatcaagaaaattggacattatctcaagatgaatatcacggtaccagaggattacatcaacgggtttattcgggccaacaataccttcctctatcagctagtttttgatcccatcaaaaggaaacttattcctctgaacgcctatgaagatgatgttgatcctgaaacactaagctacgctgggcaatatgttgatgattccatagctcttcaaatagcacttggaaataaagatataaatacttttgaacagatcgatgactacaatccagacactgctatgcctgcccattcaagaagtcgtagttgggatgacaaaacatgtcaaaagtcagctaatgttagcagcatttggcataggaattactctcccagaccagagtcgggtactgtttcagatgccccacaattgaaggaaaatccaagtactgtgggagtggaacgagtgattagtactaaagggttaaatctcccaaggaaatcatccattgtgaaaagaccaagaagtgcagagctgtcagaagatgacctgttgagtcagtattctctttcatttacgaagaagaccaagaaaaatagctctgaaggcaataaatcattgagcttttctgaagtgtttgtgcctgacctggtaaatggacctactaacaaaaagagtgtaagcactccacctaggacgagaaataaatttgcaacatttttacaaaggaaaaatgaagaaagtggtgcagttgtggttccagggaccagaagcaggtttttttgcagttcagattctactgactgtgtatcaaacaaagtgagcatccagcctctggatgaaactgctgtcacagataaagagaacaatctgcatgaatcagagtatggagaccaagaaggcaagagactggttgacacagatgtagcacgtaattcaagtgatgacattccgaataatcatattccaggtgatcatattccagacaaggcaacagtgtttacagatgaagagtcctactcttttaagagcagcaaatttacaaggaccatttcaccacccactttgggaacactaagaagttgttttagttggtctggaggtcttggagatttttcaagaacgccgagcccctctccaagcacagcattgcagcagttccgaagaaagagcgattcccccacctctttgcctgagaataatatgtctgatgtgtcgcagttaaagagcgaggagtccagtgacgatgagtctcatcccttacgagaaggggcatgttcttcacagtcccaggaaagtggagaattctcactgcagagttcaaatgcatcaaagctttctcagtgctctagtaaggactctgattcagaggaatctgattgcaatattaagttacttgacagtcaaagtgaccagacctccaagctatgtttatctcatttctcaaaaaaagacacacctctaaggaacaaggttcctgggctatataagtccagttctgcagactctctttctacaaccaagatcaaacctctaggacctgccagagccagtgggctgagcaagaagccggcaagcatccagaagagaaagcatcataatgccgagaacaagccggggttacagatcaaactcaatgagctctggaaaaactttggatttaaaaaagattctgaaaagcttcctccttgtaagaaacccctgtccccagtcagagataacatccaactaactccagaagcggaagaggatatatttaacaaacctgaatgtggccgtgttcaaagagcaatattccagtaaatgcagactgctgcaaagcttttgcctgcaagagaatctgatcaatttgaagtccctgtttgggaatgaggcacttatcagcatgaagaattttttctcattctgtgccattttaaaaatagaatacattttgtatattgactt

SEQ ID NO: 50699 - DNA, 3364 bp, Homo sapiens
ggaacccgcgcaaattgaaaggtcagcctttcgcgcgctgtgtaggcaagttgcccgtgttctgcgttgccggccgtgggtgctctggccacagtgagttaggggcgtcggagcgggtttctccaaccgcaatcggctccgctcaaggggaggaggagagtcccttctcggaaggcctaaggaaacgtgtcgtctggaatgggcttgggggccacgcctgcacatctccgcgagacagagggataaagtgaagatggtgctgttattgttacctcgagtgccacatgcgatctctgagatatgtacacagtcattcttactatcgcactcagccattcttactacgctaaagaagaaataattattcgaggatatttgcctggcccagaagaaacttatgtaaatttcatgaactattatatccgttttcctcggagtgagagaaaactctttttagatatcatctgagagaactagtgaatcccagtcactgagtggagttgagagtctaagaacctctgaaatttgagaactgctggaccagagcctttagagctctgataaggtgtcaacagggtagttaatttggcaccatggggatacagggattgctacaatttatcaaagaagcttcagaacccatccatgtgaggaagtataaagggcaggtagtagctgtggatacatattgctggcttcacaaaggagctattgcttgtgctgaaaaactagccaaaggtgaacctactgataggtatgtaggattttgtatgaaatttgtaaatatgttactatctcatgggatcaagcctattctcgtatttgatggatgtactttaccttctaaaaaggaagtagagagatctagaagagaaagacgacaagccaatcttcttaagggaaagcaacttcttcgtgaggggaaagtctcggaagctcgagagtgtttcacccggtctatcaatatcacacatgccatggcccacaaagtaattaaagctgcccggtctcagggggtagattgcctcgtggctccctatgaagctgatgcgcagttggcctatcttaacaaagcgggaattgtgcaagccataattacagaggactcggatctcctagcttttggctgtaaaaaggtaattttaaagatggaccagtttggaaatggacttgaaattgatcaagctcggctaggaatgtgcagacagcttggggatgtattcacggaagagaagtttcgttacatgtgtattctttcaggttgtgactacctgtcatcactgcgtgggattggattagcaaaggcatgcaaagtcctaagactagccaataatccagatatagtaaaggttatcaagaaaattggacattatctcaagatgaatatcacggtaccagaggattacatcaacgggtttattcgggccaacaataccttcctctatcagctagtttttgatcccatcaaaaggaaacttattcctctgaacgcctatgaagatgatgttgatcctgaaacactaagctacgctgggcaatatgttgatgattccatagctcttcaaatagcacttggaaataaagatataaatacttttgaacagatcgatgactacaatccagacactgctatgcctgcccattcaagaagtcgtagttgggatgacaaaacatgtcaaaagtcagctaatgttagcagcatttggcataggaattactctcccagaccagagtcgggtactgtttcagatgccccacaattgaaggaaaatccaagtactgtgggagtggaacgagtgattagtactaaagggttaaatctcccaaggaaatcatccattgtgaaaagaccaagaagtgcagagctgtcagaagatgacctgttgagtcagtattctctttcatttacgaagaagaccaagaaaaatagctctgaaggcaataaatcattgagcttttctgaagtgtttgtgcctgacctggtaaatggacctactaacaaaaagagtgtaagcactccacctaggacgagaaataaatttgcaacatttttacaaaggaaaaatgaagaaagtggtgcagttgtggttccagggaccagaagcaggtttttttgcagttcagattctactgactgtgtatcaaacaaagtgagcatccagcctctggatgaaactgctgtcacagataaagagaacaatctgcatgaatcagagtatggagaccaagaaggcaagagactggttgacacagatgtagcacgtaattcaagtgatgacattccgaataatcatattccaggtgatcatattccagacaaggcaacagtgtttacagatgaagagtcctactcttttaagagcagcaaatttacaaggaccatttcaccacccactttgggaacactaagaagttgttttagttggtctggaggtcttggagatttttcaagaacgccgagcccctctccaagcacagcattgcagcagttccgaagaaagagcgattcccccacctctttgcctgagaataatatgtctgatgtgtcgcagttaaagagcgaggagtccagtgacgatgagtctcatcccttacgagaaggggcatgttcttcacagtcccaggaaagtggagaattctcactgcagagttcaaatgcatcaaagctttctcagtgctctagtaaggactctgattcagaggaatctgattgcaatattaagttacttgacagtcaaagtgaccagacctccaagctatgtttatctcatttctcaaaaaaagacacacctctaaggaacaaggttcctgggctatataagtccagttctgcagactctctttctacaaccaagatcaaacctctaggacctgccagagccagtgggctgagcaagaagccggcaagcatccagaagagaaagcatcataatgccgagaacaagccggggttacagatcaaactcaatgagctctggaaaaactttggatttaaaaaagattctgaaaagcttcctccttgtaagaaacccctgtccccagtcagagataacatccaactaactccagaagcggaagaggatatatttaacaaacctgaatgtggccgtgttcaaagagcaatattccagtaaatgcagactgctgcaaagcttttgcctgcaagagaatctgatcaatttgaagtccctgtttgggaatgaggcacttatcagcatgaagaattttttctcattctgtgccattttaaaaatagaatacattttgtatattgactttataattgggttgtggtttttttgctcagctttttatatttttataagaagctaaatagaagaataattgtatctctgacaggttt

SEQ ID NO: 50700 - DNA, 3268 bp, Homo sapiens
ggaacccgcgcaaattgaaaggtcagcctttcgcgcgctgtgtaggcaagttgcccgtgttctgcgttgccggccgtgggtgctctggccacagcctaaggaaacgtgtcgtctggaatgggcttgggggccacgcctgcacatctccgcgagacagagggataaagtgaagatggtgctgttattgttacctcgagtgccacatgcgatctctgagatatgtacacagtcattcttactatcgcactcagccattcttactacgctaaagaagaaataattattcgaggatatttgcctggcccagaagaaacttatgtaaatttcatgaactattatatccgttttcctcggagtgagagaaaactctttttagatatcatctgagaggtagttaatttggcaccatggggatacagggattgctacaatttatcaaagaagcttcagaacccatccatgtgaggaagtataaagggcaggtagtagctgtggatacatattgctggcttcacaaaggagctattgcttgtgctgaaaaactagccaaaggtgaacctactgatagaagacgacaagccaatcttcttaagggaaagcaacttcttcgtgaggggaaagtctcggaagctcgagagtgtttcacccggtctatcaatatcacacatgccatggcccacaaagtaattaaaggtcaagctagaaggaaacgatgcgatgcaggacagagcgtgaagtataaagaaatgtgtgctctgtgtagtcaggagaagagaggctgcattgtgtgcggaagtagagaagaaaccctgattggacacaaatagtggtgtaaaagtgtgtccagaattggtgggttcttggcctcactgacttcaagaatgaagccgcagaccctcgcggctgcccggtctcagggggtagattgcctcgtggctccctatgaagctgatgcgcagttggcctatcttaacaaagcgggaattgtgcaagccataattacagaggactcggatctcctagcttttggctgtaaaaaggtaattttaaagatggaccagtttggaaatggacttgaaattgatcaagctcggctaggaatgtgcagacagcttggggatgtattcacggaagagaagtttcgttacatgtgtattctttcaggttgtgactacctgtcatcactgcgtgggattggattagcaaaggcatgcaaagtcctaagactagccaataatccagatatagtaaaggttatcaagaaaattggacattatctcaagatgaatatcacggtaccagaggattacatcaacgggtttattcgggccaacaataccttcctctatcagctagtttttgatcccatcaaaaggaaacttattcctctgaacgcctatgaagatgatgttgatcctgaaacactaagctacgctgggcaatatgttgatgattccatagctcttcaaatagcacttggaaataaagatataaatacttttgaacagatcgatgactacaatccagacactgctatgcctgcccattcaagaagtcgtagttgggatgacaaaacatgtcaaaagtcagctaatgttagcagcatttggcataggaattactctcccagaccagagtcgggtactgtttcagatgccccacaattgaaggaaaatccaagtactgtgggagtggaacgagtgattagtactaaagggttaaatctcccaaggaaatcatccattgtgaaaagaccaagaagtgcagagctgtcagaagatgacctgttgagtcagtattctctttcatttacgaagaagaccaagaaaaatagctctgaaggcaataaatcattgagcttttctgaagtgtttgtgcctgacctggtaaatggacctactaacaaaaagagtgtaagcactccacctaggacgagaaataaatttgcaacatttttacaaaggaaaaatgaagaaagtggtgcagttgtggttccagggaccagaagcaggtttttttgcagttcagattctactgactgtgtatcaaacaaagtgagcatccagcctctggatgaaactgctgtcacagataaagagaacaatctgcatgaatcagagtatggagaccaagaaggcaagagactggttgacacagatgtagcacgtaattcaagtgatgacattccgaataatcatattccaggtgatcatattccagacaaggcaacagtgtttacagatgaagagtcctactcttttaagagcagcaaatttacaaggaccatttcaccacccactttgggaacactaagaagttgttttagttggtctggaggtcttggagatttttcaagaacgccgagcccctctccaagcacagcattgcagcagttccgaagaaagagcgattcccccacctctttgcctgagaataatatgtctgatgtgtcgcagttaaagagcgaggagtccagtgacgatgagtctcatcccttacgagaaggggcatgttcttcacagtcccaggaaagtggagaattctcactgcagagttcaaatgcatcaaagctttctcagtgctctagtaaggactctgattcagaggaatctgattgcaatattaagttacttgacagtcaaagtgaccagacctccaagctatgtttatctcatttctcaaaaaaagacacacctctaaggaacaaggttcctgggctatataagtccagttctgcagactctctttctacaaccaagatcaaacctctaggacctgccagagccagtgggctgagcaagaagccggcaagcatccagaagagaaagcatcataatgccgagaacaagccggggttacagatcaaactcaatgagctctggaaaaactttggatttaaaaaagattctgaaaagcttcctccttgtaagaaacccctgtccccagtcagagataacatccaactaactccagaagcggaagaggatatatttaacaaacctgaatgtggccgtgttcaaagagcaatattccagtaaatgcagactgctgcaaagcttttgcctgcaagagaatctgatcaatttgaagtccctgtttgggaatgaggcacttatcagcatgaagaattttttctcattctgtgccattttaaaaatagaatacattttgtatattgactttataattgggttgtggtttttttgctcagctttttatatttttataagaagctaaatagaagaataattgtatctctgacaggttt

SEQ ID NO: 50701 - DNA, 4179 bp, Homo sapiens
  misc_feature (3294)..(3294): n is a, c, g, or t
ggaacccgcgcaaattgaaaggtcagcctttcgcgcgctgtgtaggcaagttgcccgtgttctgcgttgccggccgtgggtgctctggccacagtgagttaggggcgtcggagcgggtttctccaaccgcaatcggctccgctcaaggggaggaggagagtcccttctcggaaggcctaaggaaacgtgtcgtctggaatgggcttgggggccacgcctgcacatctccgcgagacagagggataaagtgaagatggtgctgttattgttacctcgagtgccacatgcgatctctgagatatgtacacagtcattcttactatcgcactcagccattcttactacgctaaagaagaaataattattcgaggatatttgcctggcccagaagaaacttatgtaaatttcatgaactattatatccgttttcctcggagtgagagaaaactctttttagatatcatctgagagaactagtgaatcccagtcactgagtggagttgagagtctaagaacctctgaaatttgagaactgctggaccagagcctttagagctctgataaggtgtcaacagggtagttaatttggcaccatggggatacagggattgctacaatttatcaaagaagcttcagaacccatccatgtgaggaagtataaagggcaggtagtagctgtggatacatattgctggcttcacaaaggagctattgcttgtgctgaaaaactagccaaaggtgaacctactgataggtatgtaggattttgtatgaaatttgtaaatatgttactatctcatgggatcaagcctattctcgtatttgatggatgtactttaccttctaaaaaggaagtagagagatctagaagagaaagacgacaagccaatcttcttaagggaaagcaacttcttcgtgaggggaaagtctcggaagctcgagagtgtttcacccggtctatcaatatcacacatgccatggcccacaaagtaattaaagctgcccggtctcagggggtagattgcctcgtggctccctatgaagctgatgcgcagttggcctatcttaacaaagcgggaattgtgcaagccataattacagaggactcggatctcctagcttttggctgtaaaaaggtaattttaaagatggaccagtttggaaatggacttgaaattgatcaagctcggctaggaatgtgcagacagcttggggatgtattcacggaagagaagtttcgttacatgtgtattctttcaggttgtgactacctgtcatcactgcgtgggattggattagcaaaggcatgcaaagtcctaagactagccaataatccagatatagtaaaggttatcaagaaaattggacattatctcaagatgaatatcacggtaccagaggattacatcaacgggtttattcgggccaacaataccttcctctatcagctagtttttgatcccatcaaaaggaaacttattcctctgaacgcctatgaagatgatgttgatcctgaaacactaagctacgctgggcaatatgttgatgattccatagctcttcaaatagcacttggaaataaagatataaatacttttgaacagatcgatgactacaatccagacactgctatgcctgcccattcaagaagtcgtagttgggatgacaaaacatgtcaaaagtcagctaatgttagcagcatttggcataggaattactctcccagaccagagtcgggtactgtttcagatgccccacaattgaaggaaaatccaagtactgtgggagtggaacgagtgattagtactaaagggttaaatctcccaaggaaatcatccattgtgaaaagaccaagaagtgcagagctgtcagaagatgacctgttgagtcagtattctctttcatttacgaagaagaccaagaaaaatagctctgaaggcaataaatcattgagcttttctgaagtgtttgtgcctgacctggtaaatggacctactaacaaaaagagtgtaagcactccacctaggacgagaaataaatttgcaacatttttacaaaggaaaaatgaagaaagtggtgcagttgtggttccagggaccagaagcaggtttttttgcagttcagattctactgactgtgtatcaaacaaagtgagcatccagcctctggatgaaactgctgtcacagataaagagaacaatctgcatgaatcagagtatggagaccaagaaggcaagagactggttgacacagatgtagcacgtaattcaagtgatgacattccgaataatcatattccaggtgatcatattccagacaaggcaacagtgtttacagatgaagagtcctactcttttaagagcagcaaatttacaaggaccatttcaccacccactttgggaacactaagaagttgttttagttggtctggaggtcttggagatttttcaagaacgccgagcccctctccaagcacagcattgcagcagttccgaagaaagagcgattcccccacctctttgcctgagaataatatgtctgatgtgtcgcagttaaagagcgaggagtccagtgacgatgagtctcatcccttacgagaaggggcatgttcttcacagtcccaggaaagtggagaattctcactgcagagttcaaatgcatcaaagctttctcagtgctctagtaaggactctgattcagaggaatctgattgcaatattaagttacttgacagtcaaagtgaccagacctccaagctatgtttatctcatttctcaaaaaaagacacacctctaaggaacaaggttcctgggctatataagtccagttctgcagactctctttctacaaccaagatcaaacctctaggacctgccagagccagtgggctgagcaagaagccggcaagcatccagaagagaaagcatcataatgccgagaacaagccggggttacagatcaaactcaatgagctctggaaaaactttggatttaaaaaagattctgaaaagcttcctccttgtaagaaacccctgtccccagtcagagataacatccaactaactccagaagcggaagaggatatatttaacaaacctgaatgtggccgtgttcaaagagcaatattccagtaaatgcagactgctgcaaagcttttgcctgcaagagaatctgatcaatttgaagtccctgtttgggaatgaggcacttatcagcatgaagaattttttctcattctgtgccattttaaaaatagaatacattttgtatattgacttaaaaaaaaaaaaaaanaaaaaaaaaaaacactttttgggccggccttgggcccctgaaaaaaccttctttaacccaattctgttgggccgcggggcccccattgggctaggtgaaccatgtcgccaaacgtggttccctagggaaacctccgggccaaggaaatagcgcgttgggtcttccccctattaaaaaaacccccggggggcaacccgaggcggttctctggcacactttccaagatgggagttctggaggggcccattaacggggctcttttcccccggggggctctcaccgcgagacccccgatttctcaattaccccccgcctttcgtgtgcctcaccaacaccaacgcacaataacacaatacaaaacaaaaaaactcacaaaaaacacccaaactaaaaaataccacgcacacactaaaaaccacaaaaaaaacacacacacacacacaacacactacactaacacaacaaccagccacaacacaaccaacaccactacgccacaccacacagtacaccccaccctcaccacactacctccaccccatactccaaccatccgacctccaccaccctccaccctactacccgccaaacaaccaccaccacctacctataccaccaaccaacccaccccccaccccacaccccaaccccccaccccacccactctcacaacatcaccacaaccatcacaacaccccctctcatccacccacccatccaccactctaaccatcaccaccccacgcccccccccccagccccacccccacacacaccccagcccctcacacccacccacccacccacacccacactccaccaagccccacccacacccacccaccacaccactccacaccacccaaccctcacaacaccctcccc

SEQ ID NO: 50702 - DNA, 3261 bp, Homo sapiens
ggaacccgcgcaaattgaaaggtcagcctttcgcgcgctgtgtaggcaagttgcccgtgttctgcgttgccggccgtgggtgctctggccacagtgagttaggggcgtcggagcgggtttctccaaccgcaatcggctccgctcaaggggaggaggagagtcccttctcggaaggcctaaggaaacgtgtcgtctggaatgggcttgggggccacgcctgcacatctccgcgagacagagggataaagtgaagatggtgctgttattgttacctcgagtgccacatgcgatctctgagatatgtacacagtcattcttactatcgcactcagccattcttactacgctaaagaagaaataattattcgaggatatttgcctggcccagaagaaacttatgtaaatttcatgaactattatatccgttttcctcggagtgagagaaaactctttttagatatcatctgagagaactagtgaatcccagtcactgagtggagttgagagtctaagaacctctgaaatttgagaactgctggaccagagcctttagagctctgataaggtgtcaacagggtagttaatttggcaccatggggatacagggattgctacaatttatcaaagaagcttcagaacccatccatgtgaggaagtataaagggcaggtagtagctgtggatacatattgctggcttcacaaaggagctattgcttgtgctgaaaaactagccaaaggtgaacctactgataggtatgtaggattttgtatgaaatttgtaaatatgttactatctcatgggatcaagcctattctcgtatttgatggatgtactttaccttctaaaaaggaagtagagagatctagaagagaaagacgacaagccaatcttcttaagggaaagcaacttcttcgtgaggggaaagtctcggaagctcgagagtgtttcacccggtctatcaatatcacacatgccatggcccacaaagtaattaaagctgcccggtctcagggggtagattgcctcgtggctccctatgaagctgatgcgcagttggcctatcttaacaaagcgggaattgtgcaagccataattacagaggactcggatctcctagcttttggctgtaaaaaggtaattttaaagatggaccagtttggaaatggacttgaaattgatcaagctcggctaggaatgtgcagacagcttggggatgtattcacggaagagaagtttcgttacatgtgtattctttcaggttgtgactacctgtcatcactgcgtgggattggattagcaaaggcatgcaaagtcctaagactagccaataatccagatatagtaaaggttatcaagaaaattggacattatctcaagatgaatatcacggtaccagaggattacatcaacgggtttattcgggccaacaataccttcctctatcagctagtttttgatcccatcaaaaggaaacttattcctctgaacgcctatgaagatgatgttgatcctgaaacactaagctacgctgggcaatatgttgatgattccatagctcttcaaatagcacttggaaataaagatataaatacttttgaacagatcgatgactacaatccagacactgctatgcctgcccattcaagaagtcgtagttgggatgacaaaacatgtcaaaagtcagctaatgttagcagcatttggcataggaattactctcccagaccagagtcgggtactgtttcagatgccccacaattgaaggaaaatccaagtactgtgggagtggaacgagtgattagtactaaagggttaaatctcccaaggaaatcatccattgtgaaaagaccaagaagtgcagagctgtcagaagatgacctgttgagtcagtattctctttcatttacgaagaagaccaagaaaaatagctctgaaggcaataaatcattgagcttttctgaagtgtttgtgcctgacctggtaaatggacctactaacaaaaagagtgtaagcactccacctaggacgagaaataaatttgcaacatttttacaaaggaaaaatgaagaaagtggtgcagttgtggttccagggaccagaagcaggtttttttgcagttcagattctactgactgtgtatcaaacaaagtgagcatccagcctctggatgaaactgctgtcacagataaagagaacaatctgcatgaatcagagtatggagaccaagaaggcaagagactggttgacacagatgtagcacgtaattcaagtgatgacattccgaataatcatattccaggtgatcatattccagacaaggcaacagtgtttacagatgaagagtcctactcttttaagagcagcaaatttacaaggaccatttcaccacccactttgggaacactaagaagttgttttagttggtctggaggtcttggagatttttcaagaacgccgagcccctctccaagcacagcattgcagcagttccgaagaaagagcgattcccccacctctttgcctgagaataatatgtctgatgtgtcgcagttaaagagcgaggagtccagtgacgatgagtctcatcccttacgagaaggggcatgttcttcacagtcccaggaaagtggagaattctcactgcagagttcaaatgcatcaaagctttctcagtgctctagtaaggactctgattcagaggaatctgattgcaatattaagttacttgacagtcaaagtgaccagacctccaagctatgtttatctcatttctcaaaaaaagacacacctctaaggaacaaggttcctgggctatataagtccagttctgcagactctctttctacaaccaagatcaaacctctaggacctgccagagccagtgggctgagcaagaagccggcaagcatccagaagagaaagcatcataatgccgagaacaagccggggttacagatcaaactcaatgagctctggaaaaactttggatttaaaaaatggagtctcgctgtgtcacaatctcagctcactgcaacctctgcctcccaggttcaagcaattctgcctcagcctcccaaggagctgagattacagcttcctccatcctaggcagaaataaagtcccaaatctttgttttttaacgggtcatagaggacccatcatcaccctttattcattccttgatcatctcaggctagagaagtctagggatacagctatatataacatgaccagaagaattaactgggccgtagcata

SEQ ID NO: 50703 - DNA, 884 bp, Homo sapiens
ccaactttcctggctctgatccagggctctttacactatgctgctcccactctgcggcgggaagaaccacctggaggtggcggggggggttgatttctatcacccctagggagagaggatcggggacccgctgatcttccagctcccctcacccaacgtcgtgcatgctgcagacagacctttccgtccttcatgaacacacgtgtggtagacagatgactgtcctgtaccctgtgctgctctaggtgtgccagacgtggagctgtccagttgggagaagatggattccaaagatgaaagctcgcatgtgtggccgacatctgcagagcatgaacagaatgccgcacaggtgaagactggtcttttccagcttggtattgagaggttttcagctggactcagtttgctgacagcaaagaaatacagctgctatctagtagtgactagtcgttaggagccgacatgaagaactcgtacacaaggaatagggactgttttggccccttgaatgctccatcgatgtggctcaccgtgagttaggagagctagaccaccagctataggcttctccgccttgtctgcaatttactgtcataatctgttttactaccccgctttatttatgttattgctgctgaaaacctcaaactatagtttgtttcttttacgttatccatagtagtttggtcctttgtgtgtaatgagtacaggtatgtctataaagtgagtggccttttcttttctttttaaattcagaatgtaaacctctaagtcaaagttgttccattatgagtcagccactttagaggttagtcacttgaccaaatgctgctgtcatcgatgacctttgcctttcagattgctgctagaaccaaccacatgtt

SEQ ID NO: 50704 - DNA, 564 bp, Homo sapiens
cttgggtatgtaatcctcctagatgcctgtctatctccatccacacatcacaagtctactcccgtgagcagtgttatgtgtgaacctgtgaacccttgttcatgtcatgtctcttgtgttttcatgagatgcgtttttaattaactgtgacattcagtcccaagaaaggctttgcttacgagtaaaattgcgaagtatgttagccattgggatggttagcttatacaatctctttggagccatgtgaatgaaaagctttagctaaatttaagattactatctttattttctgtattaatgaaagcttattactggctaaaatgggagttaacttttctaaaaattggtgcttagcagtaggataatttttctgtgtaggcaggctatccaaagagctactgataattttttgttcgtttgtttgattagactctgtttacagaccccggccaggtagcttatgtccaacaggatgctacagctcagcaggcctcattgccagttcataaccaggtgctgccttccatcgagagtgtagatgggtccgaccctttggcaactctg

SEQ ID NO: 50705 - DNA, 649 bp, Homo sapiens
ccaactttcctggctctgatccagggctctttacactatgctgctcccactctgcggcgggaagaaccacctggaggtggcggggggggttgatttctatcacccctagggagagaggatcggggacccgctgatcttccagctcccctcacccaacgtcgtgcatgctgcagacagacctttccgtccttcatgaacacacgtgtggtagacagatgactgtcctgtaccctgtgctgctctaggtgtgccagacgtggagctgtccagttgggagaagatggattccaaagatgaaagctcgcatgtgtggccgacatctgcagagcatgaacagaatgccgcacaggtgcactttgttccggacacaggaacagtggctcagattgtctataccgatgaccaggttcgccccccacagcaggtggtgtacacggcagatggtgcctcctacacatcagtggatggtccagagcacacgctggtgtacatccacccggtggaagctgcacagactctgtttacagaccccggccaggtagcttatgtccaacaggatgctacagctcagcaggcctcattgccagttcataaccaggtgctgccttccatcgagagtgtagatgggtccgaccctttggcaactctg

SEQ ID NO: 50706 - DNA, 264 bp, Homo sapiens
gcagaattattgagtcatatggcaacactatatttaacattctgagaaactgttaaaacccttttccaaagtggcttcacaattttacattcctagcagcaatgaatgagggtcccaatttttctacattcttgtctactaacttaccattgttaaagtctctctctgttttgtttttttttagccatcctagtggctgcctacataccttttcacagaagaaaataactttattaaatgttaatgattaaagtatgttatggt

SEQ ID NO: 50707 - DNA, 291 bp, Homo sapiens
ccagaccctcagcacccgtaactgatctccgagttcttggtctacttgctggcctggggaagcacctccaccaagtgggcggagggtgagtcggtgaagggcccatgaggtctgacccgcttcctgtccatcatccctacccgatgggggccaggctctaagcccagcccgctatgggggtcaagggggttcctaccaaggcctggaccctttatcctctatccatcgggctgctctctcctcccacaggtgaggggtgagtgtctcttccacccccaccccaaacgccat

SEQ ID NO: 50708 - DNA, 539 bp, Homo sapiens
caaaaggtagtttgttctgccttccaatctctcctcaatcctttcatcacctcttatggaaagttagattttttaagatattttttatttctttaaagatgatttatgtttgtaagaccaggtggtgcactgtgtactaatacatgtccacagaagccaactcttgcagggctggactgttctaaatctagaactgttgtttatttaattccctctagcagtatttctcaaactttttgactatgatccacagtaagaagcagtgcatgcgtgcccacacatattcacattcatacctacacccacaactgaaacaaaaactttgagacagtacttaatcttactgtgaggcaatctgttagaattttcattctgttttatttcatttagaaaaattgggttggtatgggcactttgaaaaaaacactgccctatatagtgcttaacaaaatgtattttcccaggaggtggaggttgtagtaagccgaaatcacatcactctagcccgggtgacagagcgagactctgtctcaaaaaaa

SEQ ID NO: 50709 - DNA, 1222 bp, Homo sapiens
tgttttggtttttcagtttgtacaagaggaagaagacgcatgatatgtgtttggctcatgtgcctgaatatggctccacagggaagacttgatacagctgaagctattgctttttagagactttttattttgagcagctgccttaacagccttcgtcttgttacatcacatgagatatatctctggaataggaagagaaaaaagacatgactgagcaataatttttgactaaaacttaaaattacaaaaccaaaaccagagatagatgtccctgaagttgtatttttatagtatgtgagaacacaattttcttatcctagttttaaggcattcctctggacccaggatttttgtttagtttcattcacataatcaaactcttttttttttttttgccatagactaatgcattttggtgtaatgatctgagcccttatccagaaggcatctaagactcatgtacaaaaatagatttcagggctaaacattctctgttcactaactcttaatgtaatataagggataaattatgcttgtttatttaattgtgcttaaccagagtactaggttggagtcaaaccacagatatatttgtgagatgtgacaaaatgtagcttttagcccgtaatacccaagtcatctgggaacataactgatgacagtgtcaacacctttcaggaattctggaggtgcctttgagtttagaaattcgtaggttctctagaagcaacagtagcatactaaattaacacataacatttcaagctacatttacataattgcagtggttatgattaatacaaattatattaactgcctgttttactccttatagctgattggctgaatttaccagtgggtttggtatgttcaacaaatgatccaaattaccttttcatttcagttaagaaactaatcaaagcaaatacactttgatttgttgagaggcagagattctccctaagtggcaatgtccttggccttctaagctaaaacctaaatggaactataatatatattttgatgctttatctcacttgagttttttattctttaactgaagggcagccatggaccataaatacatagaagataaaaatatattgagcttaggagtttggtctgttcaatggatgagaactttatattttcccttataaacacaattttcaaagaatagcctgtaatagtcgtgaaaatggaaaccaatactggggaaatg

SEQ ID NO: 50710 - DNA, 1278 bp, Homo sapiens
tgttttggtttttcagtttgtacaagaggaagaagacgcatgatatgtgtttggctcatgtgcctgaatatggctccacagggaagacttgatacagctgaagctattgctttttagagactttttattttgagcagctgccttaacagccttcgtcttgttacatcacatgagatatatctctggaataggaagagaaaaaagacatgactgagcaataatttttgactaaaacttaaaattacaaaaccaaaaccagagatagatgtccctgaagttgtatttttatagtatgtgagaacacaattttcttatcctagttttaaggcattcctctggacccaggatttttgtttagtttcattcacataatcaaactcttttttttttttttgccatagactaatgcattttggtgtaatgatctgagcccttatccagaaggcatctaagactcatgtacaaaaatagatttcagggctaaacattctaaaagacaattgagtgcttcttttttctccggcccctagatgtaaatgaataacctctgttcactaactcttaatgtaatataagggataaattatgcttgtttatttaattgtgcttaaccagagtactaggttggagtcaaaccacagatatatttgtgagatgtgacaaaatgtagcttttagcccgtaatacccaagtcatctgggaacataactgatgacagtgtcaacacctttcaggaattctggaggtgcctttgagtttagaaattcgtaggttctctagaagcaacagtagcatactaaattaacacataacatttcaagctacatttacataattgcagtggttatgattaatacaaattatattaactgcctgttttactccttatagctgattggctgaatttaccagtgggtttggtatgttcaacaaatgatccaaattaccttttcatttcagttaagaaactaatcaaagcaaatacactttgatttgttgagaggcagagattctccctaagtggcaatgtccttggccttctaagctaaaacctaaatggaactataatatatattttgatgctttatctcacttgagttttttattctttaactgaagggcagccatggaccataaatacatagaagataaaaatatattgagcttaggagtttggtctgttcaatggatgagaactttatattttcccttataaacacaattttcaaagaatagcctgtaatagtcgtgaaaatggaaaccaatactggggaaatg

SEQ ID NO: 50711 - DNA, 467 bp, Homo sapiens
tttttcttttaaacattttgtaatggaatattctgaacacacagaaaagcagacaattgcacaatgagctccatgttccatcttacatcttcagcagtaatcaacagtcaatctagtatcgtcgtatttcagctctctttgccccctttctccttcgaattaaaaaaaaaattttactgactagagaaagcctatgaattctgaaatatattttgatattattgtgaaaaaattgtacagcttaaaaatagtattatcatttgagatctcatctggttttatcctattttaatatggattagaggatacaaagatggtgatcacccctcccttctttggcgaagtcaagcatcatttcttttctaaattcttacctcatcttcccttatggaaatgccctcctccacccatgcatgcaggtgtgtcggtttttaaatttgtgtcctaataagacttgataaaaacgc

SEQ ID NO: 50712 - DNA, 645 bp, Homo sapiens
aagacagagtcttgttctgtcgcccaggccagttttttttttcttgtacagatggggttttaccatgttgctcaggctggtctcaaactcctggagtcaagggatctatttgcctcagcctctcaaagtgctgggattacaggtgtgagccacggctcctggctccttgctccagaatcagttttttaatggaagatagctcatactttgtttttgtttttaaagagacagggtctcactctgttgcccaggctggtagtagcgtgatcatagctcactgcagtctcaaactcctggactcaaatagtgctctggagtacctagaactacaagtgcctaccaccacacccagctaatttatttgtttttttttttttagagatggggggggtctccctatgttgcccaggctggtctcaaactcttcacctcaagcaaaactcccactgcagaaagctttgggattacaggcatgagccaccatgccaagcccatacttattgttaataaagtttcagtgacttgcttactaatcttatgcaaaatttcatgtaatttatgtaatactacataacaatgctacatatggtatgtatacatacactgtatacacacaaaggtctgttctgggtattttatgtatct

SEQ ID NO: 50713 - DNA, 325 bp, Homo sapiens
cccaaagtgctgggattacaggtgtgagccactgagcccggcctaccactctttttaagtggccttctgtaccctgctacatgaattgattgtttctgtggaaaaacataataataaataaacaaataataaagatgtgaacaaactaattttattaataatcccagcgtatatttatctagcatgggaagaaaaagactgggcaatctgtcctttgaaagtaaaaattcaaatattaattttgattattcttttctgaatgccatttcaaaaatgacatatttcttgtatataaatttacttaaatatcactaacattgtaagg

SEQ ID NO: 50714 - DNA, 326 bp, Homo sapiens
ggtccttattctccagcaccttacagataacaaaatggaaaaaaattaaaagctcagaaatagatatatatatccaagaattaatttttatttattgactgattgagacagtctcactctgtcgcctatgctggagtgcagtggcgtgattttggctcacttaacctctgcttctgggttcaagcaattctcgtacctcagtttcctgagtagctgggactacaggcatgcgccaccacggccagctcattttttctattttagtagagacggggtttcactgtgttggccaggctggtctcaaactcctggcctcaaatgatctg

SEQ ID NO: 50715 - DNA, 264 bp, Homo sapiens
gtcttgtcaattaattaccaagttgattctgtgaaataatctggtgatcctggaagggtaaagagaggaatctatactgtcaatatggttctgggcctgaaaaatatcagaacccaggttgtagtatgatttagtcccctgaaatactatgggatatatactactataaatggcttcacttctcctttcagagcagggacacctaaagagcaaatgtctgtttaattaattattccagaagatcctcaatggtgcccttaggag

SEQ ID NO: 50716 - DNA, 356 bp, Homo sapiens
ttgaagaaccagttggtggagctacccccttatacccagctggctgtctctttgagtcatcattggaagactgacatcccgtgtcccttgggactggatggtttgtgctcttctagttttacaaatgcccccaccacattcttgggtgtatctgaggcccagtgtgggctgcagttctccagacttgcaggaaccagtttgatttcccagggctgttgactttttcttgtacttgtatcattgcccctgactttgaggcttaggggaccatggagcactggggaaatcatatgccctcagtcctcactaggggctgggccatccattaaacaaaggctgtccagatgtgttaatga

SEQ ID NO: 50717 - DNA, 1026 bp, Homo sapiens
agaaggtggtattctgactgtatctaacaatagggaagcctgggaaatatggctggctggtgcccaggaaaaggaggaaataagtttggttaaatagttagcaatctttgttgtagaagttgatgaaataaaggtgccccatagcaggtgttcagtagataattttcaatgagttgacttacttacactgcaatttctagcattagtgacttgaaccccaaaaaacagagttggtgagggaggaaaatgttgtaatgatgagtctggtcataaacacagtgagaaagttgtaggtagagatatctggttggcagcttggaattgggtatccctgatagtgtgccccaaaatgatggtctaatattataaattgcaagactccaaatatgttcatgctgttaccacagaaaaagcatgttttgtatccctgcacagattttgttttcctaccattgattgtgatgggtcagatttgttctttattcctttttcatggtggggcttaaaggtctaggacagagtggtggtggtgagtatcacagtgtctgtgcccttttgaggtgatgacacacagagtttctaaatatgacaatggaagattctattcttttcatagtaaaaccctggaggcaggctgtacagagacatgagtcagctctccatctccagcggaactccaggggcttctccaggccaggcttcctgaaggttggccagaaataagacatctgcagcttccaggacagctcagttgctaaataggacttacgttttgtttagtatgtctgggtagtaagaccttgcactgccatatggaggttgtggtaagacaaatttgggcgcagtatgaaggaaagaattttctaaggaagatttctgaacttttaatgggctgcctcatcagaccatcaggaaggccaggcacccagtgagctggaaagatgcagactgtattcctgtactgagcagaggattagactacgttattctcaaaagcccttccatcttgaaaatctcacactcctt

SEQ ID NO: 50718 - DNA, 296 bp, Homo sapiens
acagtgtagccctcctattagaataaataaattatgtggttggactggaatgctacaggcacactatgactggaagtggaaggagagagaatgtttatttaaaatacagcacacataaataataaataaaagtttaaaacttaatcagcaacagcaacaggaccagcctcccctgttccatttatggttcttttcaggaacacctgtatcttttcctaaggataaaaagtggcacaaggagacaaaaggctttggaaggaaagaaaatactttgttgtgactttgtgcttttctga

SEQ ID NO: 50719 - DNA, 290 bp, Homo sapiens
gggagggcaaagctaggcagggctgggctggagaatcctgcattctggccaccccaacagggcacaagcaccagcccttgcaggggttgcaaggcagttctcaggccccgaaggaatgctccagggaggagcagagcaaccactgccatgccaaagatccagcatggggaaagtggggtcgctagggctccacaacctggcaggtgatagtgggacccggttctctacagttttgacctggttggattccctcctaccatctgctgctggcagcaagctgaaacagccag

SEQ ID NO: 50720 - DNA, 415 bp, Homo sapiens
ccatatatttagtctaaaagaaatatcatagggccaggcgcgatggctcacacctataatcccagtacattttgggaggcagaagagagaggattacttgaggccaggagttcgagaccagcctgagcaatagggcaagacctcctgtctgcaacaattttttttttaattgctcgatatggtggcatgcactggtggtcctagctactcaggaggctgaagcaggaggatcccttgagcccaggagtttgaggcttcagtgagctgtgatagttcaactgcactccagcctggatgaccctgtcccccaaaaaagaggaaaataagaaattttatggttaacaaaagcaccaaacctatagtgatttttttcagtcagacagtagtggccatccttctcatcttcacctgtgat

SEQ ID NO: 50721 - DNA, 393 bp, Homo sapiens
aagctgccagtgctatcgtgggggttctgccttgatgactttatctaatgctgactacttcccaaaggtgccaccttcaatcaagaatttggggattaagtctccaaagcatgatatttagaaaacatattcaaaccagagcattatgtatagacagaaatatacacatatttagtacattttaaaagaaagtaaggctcactacatcaatcatacaatcatttagttcctacgtcacatttgctcattagactttgtctataaccaagagtagtgagaagtaaattaagttgctgagatgtctttttggttctaaacacattcaagataaaatgattttaaataagtagaattgcttggcagcttgccacttctgtaacaattctgcttatt

SEQ ID NO: 50722 - DNA, 671 bp, Homo sapiens
acgagactctggcatgctaactagttacgcgacccccgagcagggatccaggatgaacccccaaaagttcggggtgagaacttctcttggtggaaggtgatggaggaagacctgcaaagccagctcctccagcggcttcagggatcctctgttgtcccagtgaacagatagagaggtggaggaggtgacagggagctaggcagccgtgctccctccagtgcggacttgtctccctctgagggaggcaagaggctggcgatcagggatcttgttgcattgggagcaggggcggctctcctggtccccaggagagatgctttgaggagcattcctctagattgcacaagggacagtgcctttaaccaagcgaggagtccaaagctcaggacctgactaccctgagggcacgctgacgcctctccccagggggatggggagctttctgcacccccagtggcatctcctcatcacgttctgtgccgtccttgggaaaggcctgcattctgatccttccaggcccttcgagcatggaggggcactggggaaggtcccccgagggaggagcacgttgctgagtaaagaggtgttactcacctaatttaactatataatcacttgagggtggccggtacccatttgcccttaaggaggcgtttccatttggccgcgtt

SEQ ID NO: 50723 - DNA, 1533 bp, Homo sapiens
ggagctcccggcccgctgccgcagggactgggagcggtctccgcagggactgggagcgggctccgcagcgcactctagcccgcggctcggctcagtcggtctgcgaggatccggcccgccgccccccgggggacccgatggcctcggagggcctggcgggggcgctggcttccgtgctggctggccaggggtccagcgtgcacagctgcgactcggcgccggccggggagccgccggcgcccgtgcggctgcggaagaacgtgtgctacgtggtgctggccgtgttcctcagcgagcaggatgaggtgctactgatccaggaggccaagagggagtgccgggggtcgtggtacctgcctgcggggagaatggagccaggggagaccatcgtggaggcgctgcagcgggaggtgaaggaggaggcggggctgcactgtgagcccgagacactgctgtccgtggaggagcggggcccctcctgggtccgcttcgtgttcctcgctcgccccacaggtggaattctcaagacttccaaggaggccgatgcggagtccctgcaggctgcctggtacccacggacctccctgcccactccgctgcgagcccatgacatcctgcacctggttgaactagccgcccagtatcgccagcaagccaggcaccctctcattctgccccaagagctaccctgtgatctggtctgccagcggctcgtggctacctttaccagcgcccagacagtgtgggtgttagtgggcacagtggggatgcctcacttgcctgtcactgcctgtggcctcgaccctgtggagcagaggggtggcatgaagatggccgtcctgcggctgctgcaggagtgtctgaccctgcaccacttggtggtggagatcaaggggttgcttggactgcagcacctgggccgagatcacagtgatggcatctgtttgaatgtgctggtgaccgtggcttttcggagcccagggatccaggatgaacccccaaaagttcggggtgagaacttctcttggtggaaggtgatggaggaagacctgcaaagccagctcctccagcggcttcagggatcctctgttgtcccagtgaacagatagagaggtggaggaggtgacagggagctaggcagccgtgctccctccagtgcggacttgtctccctctgagggaggcaagaggctggcgatcagggatcttgttgcattgggagcaggggcggctctcctggtccccaggagagatgctttgaggagcattcctctagattgcacaagggacagtgcctttaaccaagcgaggagtccaaagctcaggacctgactaccctgagggcacgctgacgcctctccccagggggatggggagctttctgcacccccagtggcatctcctcatcacgttctgtgccgtccttgggaaaggcctgcattctgatccttccaggcccttcgagcatggaggggcactggggaaggtcccccgagggaggagcacgttgctgagtaaagaggtgttactcacc

SEQ ID NO: 50724 - DNA, 1770 bp, Homo sapiens
ggagctcccggcccgctgccgcagggactgggagcggtctccgcagggactgggagcgggctccgcagcgcactctagcccgcggctcggctcagtcggtctgcgaggatccggcccgccgccccccgggggacccgatggcctcggagggcctggcgggggcgctggcttccgtgctggctggccaggggtccagcgtgcacagctgcgactcggcgccggccggggagccgccggcgcccgtgcggctgcggaagaacgtgtgctacgtggtgctggccgtgttcctcagcgagcaggatgaggtgctactgatccaggaggccaagagggagtgccgggggtcgtggtacctgcctgcggggagaatggagccaggggagaccatcgtggaggcgctgcagcgggaggtgaaggaggaggcggggctgcactgtgagcccgagacactgctgtccgtggaggagcggggcccctcctgggtccgcttcgtgttcctcgctcgccccacaggtatggcccacctggaggcagtgtgaacagggccagttgacacctttcccccagctcctcggtgaggtgagcccctctacagccagtcctgttatggctggcacagcctggcatgggcagattccagcctttgggctgggggcctctctcctgggtcagggatgtctgttgactctgccagagctgcacttctctccacacagaccctccctgccccatcccccacatctcccccaggtggaattctcaagacttccaaggaggccgatgcggagtccctgcaggctgcctggtacccacggacctccctgcccactccgctgcgagcccatgacatcctgcacctggttgaactagccgcccagtatcgccagcaagccaggcaccctctcattctgccccaagagctaccctgtgatctggtctgccagcggctcgtggctacctttaccagcgcccagacagtgtgggtgttagtgggcacagtggggatgcctcacttgcctgtcactgcctgtggcctcgaccctgtggagcagaggggtggcatgaagatggccgtcctgcggctgctgcaggagtgtctgaccctgcaccacttggtggtggagatcaaggggttgcttggactgcagcacctgggccgagatcacagtgatggcatctgtttgaatgtgctggtgaccgtggcttttcggagcccagggatccaggatgaacccccaaaagttcggggtgagaacttctcttggtggaaggtgatggaggaagacctgcaaagccagctcctccagcggcttcagggatcctctgttgtcccagtgaacagatagagaggtggaggaggtgacagggagctaggcagccgtgctccctccagtgcggacttgtctccctctgagggaggcaagaggctggcgatcagggatcttgttgcattgggagcaggggcggctctcctggtccccaggagagatgctttgaggagcattcctctagattgcacaagggacagtgcctttaaccaagcgaggagtccaaagctcaggacctgactaccctgagggcacgctgacgcctctccccagggggatggggagctttctgcacccccagtggcatctcctcatcacgttctgtgccgtccttgggaaaggcctgcattctgatccttccaggcccttcgagcatggaggggcactggggaaggtcccccgagggaggagcacgttgctgagtaaagaggtgttactcacc

SEQ ID NO: 50725 - DNA, 1934 bp, Homo sapiens
ggagctcccggcccgctgccgcagggactgggagcggtctccgcagggactgggagcgggctccgcagcgcactctagcccgcggctcggctcagtcggtctgcgaggatccggcccgccgccccccgggggacccgatggcctcggagggcctggcgggggcgctggcttccgtgctggctggccaggggtccagcgtgcacagctgcgactcggcgccggccggggagccgccggcgcccgtgcggctgcggaagaacgtgtgctacgtggtgctggccgtgttcctcagcgagcaggatgaggtgctactgatccaggaggccaagagggagtgccgggggtcgtggtacctgcctgcggggagaatggagccaggggagaccatcgtggaggcgctgcagcgggaggtgaaggaggaggcggggctgcactgtgagcccgagacactgctgtccgtggaggagcggggcccctcctgggtccgcttcgtgttcctcgctcgccccacaggtggaattctcaagacttccaaggaggccgatgcggagtccctgcaggctgcctggtacccacggacctccctgcccactccgctgcgagcccatgacatcctgcacctggttgaactagccgcccagtatcgccagcaagccaggcaccctctcattctgccccaagagctaccctgtgatctggtctgccagcggctcgtggctacctttaccagcgcccagacagtgtgggtgttagtgggcacagtggggatgcctcacttgcctgtcactgcctgtggcctcgaccctgtggagcagaggggtggcatgaagatggccgtcctgcggctgctgcaggagtgtctgaccctgcaccacttggtggtggagatcaaggggttgcttggactgcagcacctgggccgagatcacagtgatggcatctgtttgaatgtgctggtgaccgtggcttttcggagcccagggatccaggatgaacccccaaaagttcggggtgagaacttctcttggtggaaggtgatggaggaagacctgcaaagccagctcctccagcggcttcagggatcctctgttgtcccagtgaacagatagagaggtggaggaggtgacagggagctaggcagccgtgctccctccagtgcggacttgtctccctctgagggaggcaagaggctggcgatcagggatcttgttgcattgggagcaggggcggctctcctggtccccaggagagatgctttgaggagcattcctctagattgcacaagggacagtgcctttaaccaagcgaggagtccaaagctcaggacctgactaccctgagggcacgctgacgcctctccccagggggatggggagctttctgcacccccagtggcatctcctcatcacgttctgtgccgtccttgggaaaggcctgcattctgatccttccaggcccttcgagcatggaggggcactggggaaggtcccccgagggaggagcacgttgctgagtaaagaggtgttactcaccttgcctccctgcctacacgtctctgtggggagaaagtgatggggactactgtccaggagctgctgctcccctcgtgttacccacaggcacccatgcctttcccagtgcactgacagtgcgggccagtctgctgtccagcacggcccctggggctccctccagttggcctgctggcccgggatgtgactctgaggggacccatccctaatgaaacacagctctgagccctccaagggttgggcagtgggcggccccagaggaacttcaagtgggacaggagctgcaggtgctgcctctgctctctccttgagcctccctggcgcagaccactccccctggctctcctgcctctgccttttcacaacttcagcccatgccagaccaaaccttttcttcatttc

SEQ ID NO: 50726 - DNA, 326 bp, Homo sapiens
ggtcatgcctgcatcttaggactgttaggactgttgtaaggaacagatgcctttaaaagctcagcatagtatctgacatatccaagtttttttacatgcagagaattacttttattctatagggaacatgctactgttatcaagcaaaagtggctcactgcctgatgtgctagaggccaatactgtgacactggagatttgtcgggggaaaaaagccctatattgcaggtcaactcacaaggagacaggagtcaagctcaaatctgtctccccatgctggcttcaaggcagcattattattagaaaaggttcagggagtagatctt

SEQ ID NO: 50727 - DNA, 375 bp, Homo sapiens
tagggctgcatcctgaggagagaccaaggaggagaggaggcacccaagcaaaatgtcccttccctgtggatcaagtgcagatacgctgtcttcctctgtgtgtgtatttgtttgatgagtagatggttcagagcagtggatctgggtcagattgacctgggttcaaatccaagctcaggctcttacttcctggcacatgactcaacctttctgacagtcaatttcttcagctgtaaactaggagtgatgtgccaggtgcggtgactcacacctgtaatcccagcaactcaggaagccaaggtgggaggattgctcgaggccaggagttcaaggccagcctgggcaacatagcaagaccccatctcaaaacaaaag

SEQ ID NO: 50728 - DNA, 416 bp, Homo sapiens
tccgagatggactatcactctgtcacccaggccggagtgcaatgatgcaactccaacctccacctcccatgagattctcctgcctcagactccgagtagctgagattatagtcacccggctaatttttgtatttttagtagagagaaggtttcaccatgttggccaggctggtcttgacctcagttgatctgcccacctcagactcccaaagtgctggtattacaggtatgagccacggcacctgaccataaagcatattcttaacaagtgtttgatacacacttttactcaccttaacagtactgcagtgcaaacctttggccataagaatataaaccaaatctcttgttaaattgtctttaattcccaggataacaccactatagacagaaggtacttcccactaaaagaaaca

SEQ ID NO: 50729 - DNA, 251 bp, Homo sapiens
atattgttatcaacaatacacaaactcaatataatcatcagaaaatatcatgtaaatccaacttaagataaacccagattaagagttcatccttggaataactgaccaccttttttcaaaagtacatagatcatgaaggacaaggaaggactgaggaattgtgtcaagttggagggagactgcagaggcacaagaacagaagcaatatatgatcctgaattcattcctggaatagaaaagagatgtttgag

SEQ ID NO: 50730 - DNA, 324 bp, Homo sapiens
gcaagaaaacaaagtggaaaacaataaggaagtgaaggtaacccctttataacctcccactgcttcattccttggaaatagaaatgactcagggaggcagatgaggataaataaaacgctgccttgaaacagtctctatgcttagctagattctgtctgcagctgctttctgcagaatcctgcaaattgggtttgtcatctgaccgtgtctctctcctcctgtgtctctacatctatttcaggtccctgggtttgctcgtgtctgttgccttggttcctctgctgtgttcctctaactgtgggcaatgcctccatccatttcta

SEQ ID NO: 50731 - DNA, 699 bp, Homo sapiens
gtgttaatataaaaaacatttgtcaagagtagaccctttctgagaaatatattagacaatatttgtttcagttatcttagtaggatttttccccttttaggttttgtttgtttccttttggctttgttttgtttggtcttgtttcttttaaattaaactaattttggaatgtgctgacacgcgagagtggtactggatagccagtggaaatgcgtggcatacgttcctagaacattaattttacctgaggtctgggagagagactttttttatgagataaacatgggtgtcctagagtatcattgcaaattagtgtgaatttttatgattaaaaatgagaagagaaatttggtattttttggaggactattttaggctgtgccccaaaaccctgggaatatttgttcactctctctgccattatggctgcttctgtgtagggaaaataaaatgacaaacctacatgttttctcacagatgataaatgtatttcttcttctctgtagcctattaattaatatctaacactgctgtctcttctagcttccacagtttactttcttttggtgcataatttaatgagtgttcgtttattttctgaagtgttatttgtataaagtgagcccacataaaagcttctttccaaagtgttttcatgggaaacggatcttggtggtgatctgtcacttagcacgtcac

SEQ ID NO: 50732 - DNA, 290 bp, Homo sapiens
aaaaaacttaaaaatcagctggacgtgctgatgtgtgcctgtagtcccagctactagggaggctgaggtgttaagggattgcttgagcttgtccaggaggtcgaggctacagtgagccataatcgtgccaccacattccatcctgggtgacaaagcgagaacctgtcttaaaaaacaaataagagacaaacaagagaatacataacataagctaagtaaattttctgtagaggtcgtacccatataaatattcaggaggtgaccatactttccctgtttgtaaacccctt

SEQ ID NO: 50733 - DNA, 1315 bp, Homo sapiens
tcttagatgagaaacctgttataattgccagctgtctacacaaagaatatgcaggccagaagaaaagttgcttttcaaagaggaagaagaaaatagcagcaagaaatatctctttctgtgttcaagaaggtgaaattttgggattgctaggacccaatggtgctggaaaaagttcatctattagaatgatatctgggatcacaaagccaactgctggagaggtggaactgaaaggctgcagttcagttttgggccacctggggtactgccctcaagagaacgtgctgtggcccatgctgacgttgagggaacacctggaggtgtatgctgccgtcaaggggctcaggaaagcggacgcgaggctcgccatcgcaagattagtgagtgctttcaaactgcatgagcagctgaatgttcctgtgcagaaattaacagcaggaatcacgagaaagttgtgttttgtgctgagcctcctgggaaactcacctgtcttgctcctggatgaaccatctacgggcataaccccacagggcagcagcaaatgtggcaggcaatccaggcagtcgttaaaaacacagagagaggtgtcctcctgaccacccataacctggctgaggcggaagccttgtgtgaccgtgtggccatcatggtgtctggaaggcttagatgcattggctccatccaacacctgaaaaacaaacttggcaaggattacattctagagctaaaagtgaaggaaacgtctcaagtgactttggtccacactgagattctgaagcttttcccacaggctgcagggcaggaaaggtattcctctttgttaacctataagctgcccgtggcagacgtttaccctctatcacagacctttcacaaattagaagcagtgaagcataactttaacctggaagaatacagcctttctcagtgcacactggagaaggtattcttagagctttctaaagaacaggaagtaggaaattttgatgaagaaattgatacaacaatgagatggaaactcctccctcattcagatgaaccttaaaacctcaaacctagtaattttttgttgatctcctataaacttatgttttatgtaataattaatagtatgtttaattttaaagatcatttaaaattaacatcaggtatattttgtaaatttagttaacaaatacataaattttaaaattattcttcctctcaaacataggggtgatagcaaacctgtgataaaggcaatacaaaatattagtaaagtcacccaaagagtcaggcactgggtattgtggaaataaaactatataaacttaga

SEQ ID NO: 50734 - DNA, 1296 bp, Homo sapiens
tcttagatgagaaacctgttataattgccagctgtctacacaaagaatatgcaggccagaagaaaagttgcttttcaaagaggaagaagaaaatagcagcaagaaatatctctttctgtgttcaagaaggtgaaattttgggattgctaggacccaatggtgctggaaaaagttcatctattagaatgatatctgggatcacaaagccaactgctggagaggtggaactgaaaggctgcagttcagttttgggccacctggggtactgccctcaagagaacgtgctgtggcccatgctgacgttgagggaacacctggaggtgtatgctgccgtcaaggggctcaggaaagcggacgcgaggctcgccatcgcaagattagtgagtgctttcaaactgcatgagcagctgaatgttcctgtgcagaaattaacagcaggaatcacgagaaagttgtgttttgtgctgagcctcctgggaaactcacctgtcttgctcctggatgaaccatctacgggcataaccccacagggcagcagcaaatgtggcaggcaatccaggcagtcgttaaaaacacagagagaggtgtcctcctgaccacccataacctggctgaggcggaagccttgtgtgaccgtgtggccatcatggtgtctggaaggcttagatgcattggctccatccaacacctgaaaaacaaacttggcaaggattacattctagagctaaaagtgaaggaaacgtctcaagtgactttggtccacactgagattctgaagcttttcccacaggctgcagggcaggaaaggtattcctctttgttaacctataagctgcccgtggcagacgtttaccctctatcacagacctttcacaaattagaagcagtgaagcataactttaacctggaagaatacagcctttctcagtgcacactggagaaggtattcttagagctttctaaagaacaggaagtaggaaattttgaatgagatggaaactcctccctcattcagatgaaccttaaaacctcaaacctagtaattttttgttgatctcctataaacttatgttttatgtaataattaatagtatgtttaattttaaagatcatttaaaattaacatcaggtatattttgtaaatttagttaacaaatacataaattttaaaattattcttcctctcaaacataggggtgatagcaaacctgtgataaaggcaatacaaaatattagtaaagtcacccaaagagtcaggcactgggtattgtggaaataaaactatataaacttaga

SEQ ID NO: 50735 - DNA, 979 bp, Homo sapiens
tcttagatgagaaacctgttataattgccagctgtctacacaaagaatatgcaggccagaagaaaagttgcttttcaaagaggaagaagaaaatagcagcaagaaatatctctttctgtgttcaagaaggtgaaattttgggattgctaggacccaatggtgctggaaaaagttcatctattagaatgatatctgggatcacaaagccaactgctggagaggtggaactgaaaggctgcagttcagttttgggccacctggggtactgccctcaagagaacgtgctgtggcccatgctgacgttgagggaacacctggaggtgtatgctgccgtcaaggggctcaggaaagcggacgcgaggctcgccatcgcaagattagtgagtgctttcaaactgcatgagcagctgaatgttcctgtgcagaaattaacagcaggaatcacgagaaagttgtgttttgtgctgagcctcctgggaaactcacctgtcttgctcctggatgaaccatctacgggcataaccccacagggcagcagcaaatgtggcaggcaatccaggcagtcgttaaaaacacagagagaggtgtcctcctgaccacccataacctggctgaggcggaagccttgtgtgaccgtgtggccatcatggtgtctggaaggcttagatgcattggctccatccaacacctgaaaaacaaacttggcaaggattacattctagagctaaaagtgaaggaaacgtctcaagtgactttggtccacactgagattctgaagcttttcccacaggctgcagggcaggaaaggtattcctctttgttaacctataagctgcccgtggcagacgtttaccctctatcacagacctttcacaaattagaagcagggactatgtgaagaagctgttggctggtcgcatggggaaataaataagggatggcatatgccatatttatggatttctttctttcttgccca

SEQ ID NO: 50736 - DNA, 647 bp, Homo sapiens
ctattactcttgtgtctagatttctgtccatgctagaagaagaagtatatagtcaaaactctcccatctgggatcaggattttctctcagcctcttccagaaccagccagctaggcatccaaacagttatcaatccacctcctgtggctgggacaatttcatacaattcaacctcatcttcccttgagcagccaaacgcagggagcagcagtcctgcctgcaaagcctcttctggacttgaggcaaacccaggagaaaagaggaaaatgactgattctcatgttctggaggaggccaagaaaccccgagttatgggggatattccgatggaattaatcaacgaggttatgtctaccatcacggaccctgcagcaatgcttggaccagagaccaattttctgtcagcacactcggccagggatgaggcggcaaggttggaagagcgcaggggtgtaattgaatttcacgtggttggcaattccctcaaccagaaaccaaacaagaagatcctgatgtggctggttggcctacagaacgttttctcccaccagctgccccgaatgccaaaagaatacatcacacggctcgtctttgacccgaaacacaaaaccctagcttgttccgctgggggatctctagagtcaact

SEQ ID NO: 50737 - DNA, 5359 bp, Homo sapiens
ggggccgcgtcgacgcggaaaagaggccgtggggggcctcccagcgctggcagacaccgtgaggctggcagccgccggcacgcacacctagtccgcagtcccgaggaacatgtccgcagccagggcgcggagcagagtcccgggcaggagaaccaagggagggcgtgtgctgtggcggcggcggcagcggcagcggagccgctagtcccctccctcctgggggagcagctgccgccgctgccgccgccgccaccaccatcagcgcgcggggcccggccagagcgagccgggcgagcggcgcgctagggggagggcgggggcggggaggggggtgggcgaagggggcgggagggcgtggggggagggtctcgctctcccgactaccagagcccgagggagaccctggcggcggcggcggcgcctgacactcggcgcctcctgccgtgctccggggcggcatgtccgaggctggcggggccgggccgggcggctgcggggcaggagccggggcaggggccgggcccggggcgctgcccccgcagcctgcggcgcttccgcccgcgcccccgcagggctccccctgcgccgctgccgccgggggctcgggcgcctgcggtccggcgacggcagtggctgcagcgggcacggccgaaggaccgggaggcggtggctcggcccgaatcgccgtgaagaaagcgcaactacgctccgctccgcgggccaagaaactggagaaactcggagtgtactccgcctgcaaggccgaggagtcttgtaaatgtaatggctggaaaaaccctaacccctcacccactccccccagagccgacctgcagcaaataattgtcagtctaacagaatcctgtcggagttgtagccatgccctagctgctcatgtttcccacctggagaatgtgtcagaggaagaaatgaacagactcctgggaatagtattggatgtggaatatctctttacctgtgtccacaaggaagaagatgcagataccaaacaagtttatttctatctatttaagctcttgagaaagtctattttacaaagaggaaaacctgtggttgaaggctctttggaaaagaaacccccatttgaaaaacctagcattgaacagggtgtgaataactttgtgcagtacaaatttagtcacctgccagcaaaagaaaggcaaacaatagttgagttggcaaaaatgttcctaaaccgcatcaactattggcatctggaggcaccatctcaacgaagactgcgatctcccaatgatgatatttctggatacaaagagaactacacaaggtggctgtgttactgcaacgtgccacagttctgcgacagtctacctcggtacgaaaccacacaggtgtttgggagaacattgcttcgctcggtcttcactgttatgaggcgacaactcctggaacaagcaagacaggaaaaagataaactgcctcttgaaaaacgaactctaatcctcactcatttcccaaaatttctgtccatgctagaagaagaagtatatagtcaaaactctcccatctgggatcaggattttctctcagcctcttccagaaccagccagctaggcatccaaacagttatcaatccacctcctgtggctgggacaatttcatacaattcaacctcatcttcccttgagcagccaaacgcagggagcagcagtcctgcctgcaaagcctcttctggacttgaggcaaacccaggagaaaagaggaaaatgactgattctcatgttctggaggaggccaagaaaccccgagttatgggggatattccgatggaattaatcaacgaggttatgtctaccatcacggaccctgcagcaatgcttggaccagagaccaattttctgtcagcacactcggccagggatgaggcggcaaggttggaagagcgcaggggtgtaattgaatttcacgtggttggcaattccctcaaccagaaaccaaacaagaagatcctgatgtggctggttggcctacagaacgttttctcccaccagctgccccgaatgccaaaagaatacatcacacggctcgtctttgacccgaaacacaaaacccttgctttaattaaagatggccgtgttattggtggtatctgtttccgtatgttcccatctcaaggattcacagagattgtcttctgtgctgtaacctcaaatgagcaagtcaagggctatggaacacacctgatgaatcatttgaaagaatatcacataaagcatgacatcctgaacttcctcacatatgcagatgaatatgcaattggatactttaagaaacagggtttctccaaagaaattaaaatacctaaaaccaaatatgttggctatatcaaggattatgaaggagccactttaatgggatgtgagctaaatccacggatcccgtacacagaattttctgtcatcattaaaaagcagaaggagataattaaaaaactgattgaaagaaaacaggcacaaattcgaaaagtttaccctggactttcatgttttaaagatggagttcgacagattcctatagaaagcattcctggaattagagagacaggctggaaaccgagtggaaaagagaaaagtaaagagcccagagaccctgaccagctttacagcacgctcaagagcatcctccagcaggtgaagagccatcaaagcgcttggcccttcatggaacctgtgaagagaacagaagctccaggatattatgaagttataaggttccccatggatctgaaaaccatgagtgaacgcctcaagaataggtactacgtgtctaagaaattattcatggcagacttacagcgagtctttaccaattgcaaagagtacaacccccctgagagtgaatactacaaatgtgccaatatcctggagaaattcttcttcagtaaaattaaggaagctggattaattgacaagtgattttttttcccctctgcttcttagaaactcaccaagcagtgtgcctaaagcaaggtggtttagttttttacaaagaattggacatgatgtattgaagagacttgtaaatgtaataattagcacttttgaaaaaacaaaaaacctccttttagcttttcagatatgtatttaaattgaagtcataggacatttttattttatggaatagattttaatctatttactactattaaggtaaattttctatggcatgtccattagctatttcatgatagatgattaggggtttcctcaaaacctgtgtgtgaggaaattgcacacagtagcaaaatttggggaaatccataacattttcagaccatgaatgaatgtttccatttttttctaatggaatgtgagagtttacttttattttattctgaaggactttaaggaagggatacatgattttaaaaaagcctgtaagaggtgaaatatgtgatgtttgaagtctctttatagactttttatatatattttttaaaacactcatctagatgaggtgctttgagcagttctgaaaaatgcagttccaggaaagcaactgctttggttcctaaggaagaaattctaaataatgcaaacttttaaaataagcatctaggtttttgataattctgtctacttacaacaaacttgttagtacataaccactattttaataattattttctctacacaaatgtgtaatatcatatttgactttgcttatgcaggccataagttccaaaagataatttccctgcccacaaaggcataaacttgaaaacacatgagattgaatcaacatgctttaataggaaaagatgtatggtctatatatgtatcaatctggtgaatcctcgttctaataaaggttctttttcttttctatgatacacacagccacgctgataatatgcaaatgaacattttcctttatgtctctccagataatgtttattgtctgaggtaaattaaattcccaccagggtttgctgtcagtattttaacacccacattagtatatgcgtccagggtcataaccccctaaaatccatcatgcaaccttattaatctgtcttgggattccagtttagtgcttggatttatttcctgattacactacatagaaaagtgagacatctgccattcccaactctgggaaaaccaactaatatacaaccatataaatgaaggccatcttgatggtctcaacactaatttttatgatgcaaatttatacactgatttttgtaaaggacaaagttttaaaagcgtatttaacttgatgttttctatcagcataaataaaatggtcatgaatagtcattaaaaacagttgccagtgataatctgcatgaaggaaaaagaaccctgcaaatggctattgagttggaagtattgtttttgatatgtaagagatattcagaatgctcacactgaaaatgcctcaactttttaaagtgtaagaaaccaccatgagtggtgtctagatttctaatgaagaatcatgatacagtttggattaagtatcttggactggttttaaacagtgctttgtaccggatctgctgaagcatctgtccagctggtatcctgtgaaagtttgttattttctgagtagacattcttatagagtattgtctttaaaatcagattgtctcttctatattgaaagcatttttatgttttctaatttaaaaattaatattttcttatagatattgtgcaataaagctgaagtagaatgtgtggtttttgcaaatgctttaacagctgataaaaattttacatttgtaaaattaatatattgtactggtacaaaatagttttaaattatattttaaaaagcttcaaaaaaaaaaaaaaaaaaaaaaaaaaaaaaaaaaaaaaaaaaaaaaagaaaaaaaaaaaaaaaaaaagaagagaagaaggcgacacaagacaagaaataatcatccaagaagaagagcagaagatcacgaacagaggacgcgacgacccgatacgaagggacacacatgaaacacacacgaatcccagacgcttgactactgccccgaccagagagcagataccaaccctgcagacatgtgctagaagaaagaagacaaaaccgccgagggctcaattttaaatgagaggaaacaacaccaaacatcgtgcaaacacgaaacaagaagtaagagaaagaaataatgacagaggtacccatacacgcgcatcaaaaaatcaacatgggcccgggcaagaggaaaaaaagtggaagacatacacccagacgacgataataataggtgagatcgaacaacacaaacacacacctctataatcagaatcagtatgaaacatcatatagcgaaataccaaaagaccaaaca

SEQ ID NO: 50738 - DNA, 3816 bp, Homo sapiens
ggggccgcgtcgacgcggaaaagaggccgtggggggcctcccagcgctggcagacaccgtgaggctggcagccgccggcacgcacacctagtccgcagtcccgaggaacatgtccgcagccagggcgcggagcagagtcccgggcaggagaaccaagggagggcgtgtgctgtggcggcggcggcagcggcagcggagccgctagtcccctccctcctgggggagcagctgccgccgctgccgccgccgccaccaccatcagcgcgcggggcccggccagagcgagccgggcgagcggcgcgctagggggagggcgggggcggggaggggggtgggcgaagggggcgggagggcgtggggggagggtctcgctctcccgactaccagagcccgagggagaccctggcggcggcggcggcgcctgacactcggcgcctcctgccgtgctccggggcggcatgtccgaggctggcggggccgggccgggcggctgcggggcaggagccggggcaggggccgggcccggggcgctgcccccgcagcctgcggcgcttccgcccgcgcccccgcagggctccccctgcgccgctgccgccgggggctcgggcgcctgcggtccggcgacggcagtggctgcagcgggcacggccgaaggaccgggaggcggtggctcggcccgaatcgccgtgaagaaagcgcaactacgctccgctccgcgggccaagaaactggagaaactcggagtgtactccgcctgcaaggccgaggagtcttgtaaatgtaatggctggaaaaaccctaacccctcacccactccccccagagccgacctgcagcaaataattgtcagtctaacagaatcctgtcggagttgtagccatgccctagctgctcatgtttcccacctggagaatgtgtcagaggaagaaatgaacagactcctgggaatagtattggatgtggaatatctctttacctgtgtccacaaggaagaagatgcagataccaaacaagtttatttctatctatttaagctcttgagaaagtctattttacaaagaggaaaacctgtggttgaaggctctttggaaaagaaacccccatttgaaaaacctagcattgaacagggtgtgaataactttgtgcagtacaaatttagtcacctgccagcaaaagaaaggcaaacaatagttgagttggcaaaaatgttcctaaaccgcatcaactattggcatctggaggcaccatctcaacgaagactgcgatctcccaatgatgatatttctggatacaaagagaactacacaaggtggctgtgttactgcaacgtgccacagttctgcgacagtctacctcggtacgaaaccacacaggtgtttgggagaacattgcttcgctcggtcttcactgttatgaggcgacaactcctggaacaagcaagacaggaaaaagataaactgcctcttgaaaaacgaactctaatcctcactcatttcccaaaatttctgtccatgctagaagaagaagtatatagtcaaaactctcccatctgggatcaggattttctctcagcctcttccagaaccagccagctaggcatccaaacagttatcaatccacctcctgtggctgggacaatttcatacaattcaacctcatcttcccttgagcagccaaacgcagggagcagcagtcctgcctgcaaagcctcttctggacttgaggcaaacccaggagaaaagaggaaaatgactgattctcatgttctggaggaggccaagaaaccccgagttatgggggatattccgatggaattaatcaacgaggttatgtctaccatcacggaccctgcagcaatgcttggaccagagaccaattttctgtcagcacactcggccagggatgaggcggcaaggttggaagagcgcaggggtgtaattgaatttcacgtggttggcaattccctcaaccagaaaccaaacaagaagatcctgatgtggctggttggcctacagaacgttttctcccaccagctgccccgaatgccaaaagaatacatcacacggctcgtctttgacccgaaacacaaaacccttgctttaattaaagatggccgtgttattggtggtatctgtttccgtatgttcccatctcaaggattcacagagattgtcttctgtgctgtaacctcaaatgagcaagtcaagggctatggaacacacctgatgaatcatttgaaagaatatcacataaagcatgacatcctgaacttcctcacatatgcagatgaatatgcaattggatactttaagaaacagggtttctccaaagaaattaaaatacctaaaaccaaatatgttggctatatcaaggattatgaaggagccactttaatgggatgtgagctaaatccacggatcccgtacacagaattttctgtcatcattaaaaagcagaaggagataattaaaaaactgattgaaagaaaacaggcacaaattcgaaaagtttaccctggactttcatgttttaaagatggagttcgacagattcctatagaaagcattcctggaattagagagacaggctggaaaccgagtggaaaagagaaaagtaaagagcccagagaccctgaccagctttacagcacgctcaagagcatcctccagcaggtgaagagccatcaaagcgcttggcccttcatggaacctgtgaagagaacagaagctccaggatattatgaagttataaggttccccatggatctgaaaaccatgagtgaacgcctcaagaataggtactacgtgtctaagaaattattcatggcagacttacagcgagtctttaccaattgcaaagagtacaacccccctgagagtgaatactacaaatgtgccaatatcctggagaaattcttcttcagtaaaattaaggaagctggattaattgacaagtgattttttttcccctctgcttcttagaaactcaccaagcagtgtgcctaaagcaaggtggtttagttttttacaaagaattggacatgatgtattgaagagacttgtaaatgtaataattagcacttttgaaaaaacaaaaaacctccttttagcttttcagatatgtatttaaattgaagtcataggacatttttattttatggaatagattttaatctatttactactattaaggtaaattttctatggcatgtccattagctatttcatgatagatgattaggggtttcctcaaaacctgtgtgtgaggaaattgcacacagtagcaaaatttggggaaatccataacattttcagaccatgaatgaatgtttccatttttttctaatggaatgtgagagtttacttttattttattctgaaggactttaaggaagggatacatgattttaaaaaagcctgtaagaggtgaaatatgtgatgtttgaagtctctttatagactttttatatatattttttaaaacactcatctagatgaggtgctttgagcagttctgaaaaatgcagttccaggaaagcaactgctttggttcctaaggaagaaattctaaataatgcaaacttttaaaataagcatctaggtttttgataattctgtctacttacaacaaacttgttgtcctaccctattatatttttctctaccatgtgttatctttttgcttgctttgggctagttcaagtattccgccaggttttgaactgtgtggtcgtttggaaagtgctcttttaagggcgccaaggttcttgaaaaaaaaatcgggccgaatgggagaagaaagatcaaccaggtcata

SEQ ID NO: 50739 - DNA, 2941 bp, Homo sapiens
ctgtataattctgactgaatagctaacagtagtcagttcatcatacttattgttgctaatctacttagcttccttgtgctgaataggggattgaaccagatgactaataatggtccctttaatgctaaaatggctgtgattttacatttttaaaaaacccacaaaagaatgaacttaagatttaagaactgttttccttggtcataagaatttctcttaaataaaagcattgggatgataaaaatgtaatcaaaccaacaacatagattcctttcccagtcccagttttgtcagctggtgtttaaagggagtcaaagattgctaatatttttttttcctgtgcagatctgaaaaccatgagtgaacgcctcaagaataggtactacgtgtctaagaaattattcatggcagacttacagcgagtctttaccaattgcaaagagtacaacccccctgagagtgaatactacaaatgtgccaatatcctggagaaattcttcttcagtaaaattaaggaagctggattaattgacaagtgattttttttcccctctgcttcttagaaactcaccaagcagtgtgcctaaagcaaggtggtttagttttttacaaagaattggacatgatgtattgaagagacttgtaaatgtaataattagcacttttgaaaaaacaaaaaacctccttttagcttttcagatatgtatttaaattgaagtcataggacatttttattttatggaatagattttaatctatttactactattaaggtaaattttctatggcatgtccattagctatttcatgatagatgattaggggtttcctcaaaacctgtgtgtgaggaaattgcacacagtagcaaaatttggggaaatccataacattttcagaccatgaatgaatgtttccatttttttctaatggaatgtgagagtttacttttattttattctgaaggactttaaggaagggatacatgattttaaaaaagcctgtaagaggtgaaatatgtgatgtttgaagtctctttatagactttttatatatattttttaaaacactcatctagatgaggtgctttgagcagttctgaaaaatgcagttccaggaaagcaactgctttggttcctaaggaagaaattctaaataatgcaaacttttaaaataagcatctaggtttttgataattctgtctacttacaacaaacttgttagtacataaccactattttaataattattttctctacacaaatgtgtaatatcatatttgactttgcttatgcaggccataagttccaaaagataatttccctgcccacaaaggcataaacttgaaaacacatgagattgaatcaacatgctttaataggaaaagatgtatggtctatatatgtatcaatctggtgaatcctcgttctaataaaggttctttttcttttctatgatacacacagccacgctgataatatgcaaatgaacattttcctttatgtctctccagataatgtttattgtctgaggtaaattaaattcccaccagggtttgctgtcagtattttaacacccacattagtatatgcgtccagggtcataaccccctaaaatccatcatgcaaccttattaatctgtcttgggattccagtttagtgcttggatttatttcctgattacactacatagaaaagtgagacatctgccattcccaactctgggaaaaccaactaatatacaaccatataaatgaaggccatcttgatggtctcaacactaatttttatgatgcaaatttatacactgatttttgtaaaggacaaagttttaaaagcgtatttaacttgatgttttctatcagcataaataaaatggtcatgaatagtcattaaaaacagttgccagtgataatctgcatgaaggaaaaagaaccctgcaaatggctattgagttggaagtattgtttttgatatgtaagagatattcagaatgctcacactgaaaatgcctcaactttttaaagtgtaagaaaccaccatgagtggtgtctagatttctaatgaagaatcatgatacagtttggattaagtatcttggactggttttaaacagtgctttgtaccggatctgctgaagcatctgtccagctggtatcctgtgaaagtttgttattttctgagtagacattcttatagagtattgtctttaaaatcagattgtctcttctatattgaaagcatttttatgttttctaatttaaaaattaatattttcttatagatattgtgcaataaagctgaagtagaatgtgtggtttttgcaaatgctttaacagctgataaaaattttacatttgtaaaattaatatattgtactggtacaaaatagttttaaattatattttaaaaagcttcaaaaaaaaaaaaaaaaaaaaaaaaaaaaaaaaaaaaaaaaaaaaaaagaaaaaaaaaaaaaaaaaaagaagagaagaaggcgacacaagacaagaaataatcatccaagaagaagagcagaagatcacgaacagaggacgcgacgacccgatacgaagggacacacatgaaacacacacgaatcccagacgcttgactactgccccgaccagagagcagataccaaccctgcagacatgtgctagaagaaagaagacaaaaccgccgagggctcaattttaaatgagaggaaacaacaccaaacatcgtgcaaacacgaaacaagaagtaagagaaagaaataatgacagaggtacccatacacgcgcatcaaaaaatcaacatgggcccgggcaagaggaaaaaaagtggaagacatacacccagacgacgataataataggtgagatcgaacaacacaaacacacacctctataatcagaatcagtatgaaacatcatatagcgaaataccaaaagaccaaaca

SEQ ID NO: 50740 - DNA, 1445 bp, Homo sapiens
tccttgaatgaatgaatgaggcaggacagggttgttaaaagagcttccctttggagtccgacccttgcttcgaaacttctagtagtgcagcttgcatgataggagggggccccccctcctatcatgcaaccttattaatctgtcttgggattccagtttagtgcttggatttatttcctgattacactacatagaaaagtgagacatctgccattcccaactctgggaaaaccaactaatatacaaccatataaatgaaggccatcttgatggtctcaacactaatttttatgatgcaaatttatacactgatttttgtaaaggacaaagttttaaaagcgtatttaacttgatgttttctatcagcataaataaaatggtcatgaatagtcattaaaaacagttgccagtgataatctgcatgaaggaaaaagaaccctgcaaatggctattgagttggaagtattgtttttgatatgtaagagatattcagaatgctcacactgaaaatgcctcaactttttaaagtgtaagaaaccaccatgagtggtgtctagatttctaatgaagaatcatgatacagtttggattaagtatcttggactggttttaaacagtgctttgtaccggatctgctgaagcatctgtccagctggtatcctgtgaaagtttgttattttctgagtagacattcttatagagtattgtctttaaaatcagattgtctcttctatattgaaagcatttttatgttttctaatttaaaaattaatattttcttatagatattgtgcaataaagctgaagtagaatgtgtggtttttgcaaatgctttaacagctgataaaaattttacatttgtaaaattaatatattgtactggtacaaaatagttttaaattatattttaaaaagcttcaaaaaaaaaaaaaaaaaaaaaaaaaaaaaaaaaaaaaaaaaaaaaaagaaaaaaaaaaaaaaaaaaagaagagaagaaggcgacacaagacaagaaataatcatccaagaagaagagcagaagatcacgaacagaggacgcgacgacccgatacgaagggacacacatgaaacacacacgaatcccagacgcttgactactgccccgaccagagagcagataccaaccctgcagacatgtgctagaagaaagaagacaaaaccgccgagggctcaattttaaatgagaggaaacaacaccaaacatcgtgcaaacacgaaacaagaagtaagagaaagaaataatgacagaggtacccatacacgcgcatcaaaaaatcaacatgggcccgggcaagaggaaaaaaagtggaagacatacacccagacgacgataataataggtgagatcgaacaacacaaacacacacctctataatcagaatcagtatgaaacatcatatagcgaaataccaaaagaccaaaca

SEQ ID NO: 50741 - DNA, 3169 bp, Homo sapiens
ggggccgcgtcgacgcggaaaagaggccgtggggggcctcccagcgctggcagacaccgtgaggctggcagccgccggcacgcacacctagtccgcagtcccgaggaacatgtccgcagccagggcgcggagcagagtcccgggcaggagaaccaagggagggcgtgtgctgtggcggcggcggcagcggcagcggagccgcgggagggtctcgctctcccgactaccagagcccgagggagaccctggcggcggcggcggcgcctgacactcggcgcctcctgccgtgctccggggcggcatgtccgaggctggcggggccgggccgggcggctgcggggcaggagccggggcaggggccgggcccggggcgctgcccccgcagcctgcggcgcttccgcccgcgcccccgcagggctccccctgcgccgctgccgccgggggctcgggcgcctgcggtccggcgacggcagtggctgcagcgggcacggccgaaggaccgggaggcggtggctcggcccgaatcgccgtgaagaaagcgcaactacgctccgctccgcgggccaagaaactggagaaactcggagtgtactccgcctgcaaggccgaggagtcttgtaaatgtaatggctggaaaaaccctaacccctcacccactccccccagagccgacctgcagcaaataattgtcagtctaacagaatcctgtcggagttgtagccatgccctagctgctcatgtttcccacctggagaatgtgtcagaggaagaaatgaacagactcctgggaatagtattggatgtggaatatctctttacctgtgtccacaaggaagaagatgcagataccaaacaagtttatttctatctatttaagctcttgagaaagtctattttacaaagaggaaaacctgtggttgaaggctctttggaaaagaaacccccatttgaaaaacctagcattgaacagggtgtgaataactttgtgcagtacaaatttagtcacctgccagcaaaagaaaggcaaacaatagttgagttggcaaaaatgttcctaaaccgcatcaactattggcatctggaggcaccatctcaacgaagactgcgatctcccaatgatgatatttctggatacaaagagaactacacaaggtggctgtgttactgcaacgtgccacagttctgcgacagtctacctcggtacgaaaccacacaggtgtttgggagaacattgcttcgctcggtcttcactgttatgaggcgacaactcctggaacaagcaagacaggaaaaagataaactgcctcttgaaaaacgaactctaatcctcactcatttcccaaaatttctgtccatgctagaagaagaagtatatagtcaaaactctcccatctgggatcaggattttctctcagcctcttccagaaccagccagctaggcatccaaacagttatcaatccacctcctgtggctgggacaatttcatacaattcaacctcatcttcccttgagcagccaaacgcagggagcagcagtcctgcctgcaaagcctcttctggacttgaggcaaacccaggagaaaagaggaaaatgactgattctcatgttctggaggaggccaagaaaccccgagttatgggggatattccgatggaattaatcaacgaggttatgtctaccatcacggaccctgcagcaatgcttggaccagagaccaattttctgtcagcacactcggccagggatgaggcggcaaggttggaagagcgcaggggtgtaattgaatttcacgtggttggcaattccctcaaccagaaaccaaacaagaagatcctgatgtggctggttggcctacagaacgttttctcccaccagctgccccgaatgccaaaagaatacatcacacggctcgtctttgacccgaaacacaaaacccttgctttaattaaagatggccgtgttattggtggtatctgtttccgtatgttcccatctcaaggattcacagagattgtcttctgtgctgtaacctcaaatgagcaagtcaagggctatggaacacacctgatgaatcatttgaaagaatatcacataaagcatgacatcctgaacttcctcacatatgcagatgaatatgcaattggatactttaagaaacagggtttctccaaagaaattaaaatacctaaaaccaaatatgttggctatatcaaggattatgaaggagccactttaatgggatgtgagctaaatccacggatcccgtacacagaattttctgtcatcattaaaaagcagaaggagataattaaaaaactgattgaaagaaaacaggcacaaattcgaaaagtttaccctggactttcatgttttaaagatggagttcgacagattcctatagaaagcattcctggaattagagagacaggctggaaaccgagtggaaaagagaaaagtaaagagcccagagaccctgaccagctttacagcacgctcaagagcatcctccagcaggtgaagagccatcaaagcgcttggcccttcatggaacctgtgaagagaacagaagctccaggatattatgaagttataaggttccccatgggtaataccattaacattttctaagtatagatttaaaactctggatggcggtgtgggggacaaatggttgctgaggttgatttgtactcctctgcttagggtaggaagtgtatgacgggtggtgggattccatgcaccgtggcgggtcagtgatggcagagaagtgggtggctgtgttcattagagacattctgcagctgtcgtttagagcccacatgagcttaacgacactagacgcagaaaatccacggtaactgcagacagcactagatttgaaagctggcactttagatataactttgcttatattctaactctttggtgcaaatagaaaaacatcagcttatcctcttgatatgctttgcgtctgtcgtaaataggtattcctttgaataattattcaggataataatgaaagaagttagattaaactacttgactgctgtactttcagagggagaaattctacttaccacaattcttgattttccatgcccttgatgggtactgttaatgtcactgtatatactctttattttacgctttgtctcatatccaaaatca

SEQ ID NO: 50742 - DNA, 2788 bp, Homo sapiens
ggggccgcgtcgacgcggaaaagaggccgtggggggcctcccagcgctggcagacaccgtgaggctggcagccgccggcacgcacacctagtccgcagtcccgaggaacatgtccgcagccagggcgcggagcagagtcccgggcaggagaaccaagggagggcgtgtgctgtggcggcggcggcagcggcagcggagccgcgggagggtctcgctctcccgactaccagagcccgagggagaccctggcggcggcggcggcgcctgacactcggcgcctcctgccgtgctccggggcggcatgtccgaggctggcggggccgggccgggcggctgcggggcaggagccggggcaggggccgggcccggggcgctgcccccgcagcctgcggcgcttccgcccgcgcccccgcagggctccccctgcgccgctgccgccgggggctcgggcgcctgcggtccggcgacggcagtggctgcagcgggcacggccgaaggaccgggaggcggtggctcggcccgaatcgccgtgaagaaagcgcaactacgctccgctccgcgggccaagaaactggagaaactcggagtgtactccgcctgcaaggccgaggagtcttgtaaatgtaatggctggaaaaaccctaacccctcacccactccccccagagccgacctgcagcaaataattgtcagtctaacagaatcctgtcggagttgtagccatgccctagctgctcatgtttcccacctggagaatgtgtcagaggaagaaatgaacagactcctgggaatagtattggatgtggaatatctctttacctgtgtccacaaggaagaagatgcagataccaaacaagtttatttctatctatttaagctcttgagaaagtctattttacaaagaggaaaacctgtggttgaaggctctttggaaaagaaacccccatttgaaaaacctagcattgaacagggtgtgaataactttgtgcagtacaaatttagtcacctgccagcaaaagaaaggcaaacaatagttgagttggcaaaaatgttcctaaaccgcatcaactattggcatctggaggcaccatctcaacgaagactgcgatctcccaatgatgatatttctggatacaaagagaactacacaaggtggctgtgttactgcaacgtgccacagttctgcgacagtctacctcggtacgaaaccacacaggtgtttgggagaacattgcttcgctcggtcttcactgttatgaggcgacaactcctggaacaagcaagacaggaaaaagataaactgcctcttgaaaaacgaactctaatcctcactcatttcccaaaatttctgtccatgctagaagaagaagtatatagtcaaaactctcccatctgggatcaggattttctctcagcctcttccagaaccagccagctaggcatccaaacagttatcaatccacctcctgtggctgggacaatttcatacaattcaacctcatcttcccttgagcagccaaacgcagggagcagcagtcctgcctgcaaagcctcttctggacttgaggcaaacccaggagaaaagaggaaaatgactgattctcatgttctggaggaggccaagaaaccccgagttatgggggatattccgatggaattaatcaacgaggttatgtctaccatcacggaccctgcagcaatgcttggaccagagaccaattttctgtcagcacactcggccagggatgaggcggcaaggttggaagagcgcaggggtgtaattgaatttcacgtggttggcaattccctcaaccagaaaccaaacaagaagatcctgatgtggctggttggcctacagaacgttttctcccaccagctgccccgaatgccaaaagaatacatcacacggctcgtctttgacccgaaacacaaaacccttgctttaattaaagatggccgtgttattggtggtatctgtttccgtatgttcccatctcaaggattcacagagattgtcttctgtgctgtaacctcaaatgagcaagtcaagggctatggaacacacctgatgaatcatttgaaagaatatcacataaagcatgacatcctgaacttcctcacatatgcagatgaatatgcaattggatactttaagaaacagggtttctccaaagaaattaaaatacctaaaaccaaatatgttggctatatcaaggattatgaaggagccactttaatgggatgtgagctaaatccacggatcccgtacacagaattttctgtcatcattaaaaagcagaaggagataattaaaaaactgattgaaagaaaacaggcacaaattcgaaaagtttaccctggactttcatgttttaaagatggagttcgacagattcctatagaaagcattcctggaattagagagacaggctggaaaccgagtggaaaagagaaaagtaaagagcccagagaccctgaccagctttacagcacgctcaagagcatcctccagcaggtgaagagccatcaaagcgcttggcccttcatggaacctgtgaagagaacagaagctccaggatattatgaagttataaggttccccatggatctgaaaaccatgagtgaacgcctcaagaataggtactacgtgtctaagaaattattcatggcagacttacagcgagtctttaccaattgcaaagagtacaacccccctgagagtgaatactacaaatgtgccaatatcctggagaaattcttcttcagtaaaattaaggaagctggatta

SEQ ID NO: 50743 - DNA, 516 bp, Homo sapiens
cagaaattcataatctacattcattctgaaaacttttatattaatattcagcaagtgatctttaagattgagctaggaacttgtggccctggtgtgttattttcaaataactagaaacttacattttcaaatgatgatttttatctttgaagcaaggattttgattttgttttggttttatagcttattttcaaagttaagaaacgcaagaaagggtgttaatatatttcattcaggaaaggtcctggttggtaaaatatgtaaaagtacaaacttctgaattcaccatcatttcctgatggatttgtaaaaatttttctccccagtctaatgtatttgtttgtatactaacttccacacagggctatggaacacacctgatgaatcatttgaaagaatatcacataaagcatgacatcctgaacttcctcacatatgcagatgaatatgcaattggatactttaagaaacaggttggtttctcaccacgcaacactgttttgtcactccttttct

SEQ ID NO: 50744 - DNA, 4296 bp, Homo sapiens
ggggccgcgtcgacgcggaaaagaggccgtggggggcctcccagcgctggcagacaccgtgaggctggcagccgccggcacgcacacctagtccgcagtcccgaggaacatgtccgcagccagggcgcggagcagagtcccgggcaggagaaccaagggagggcgtgtgctgtggcggcggcggcagcggcagcggagccgctagtcccctccctcctgggggagcagctgccgccgctgccgccgccgccaccaccatcagcgcgcggggcccggccagagcgagccgggcgagcggcgcgctagggggagggcgggggcggggaggggggtgggcgaagggggcgggagggcgtggggggagggtctcgctctcccgactaccagagcccgagggagaccctggcggcggcggcggcgcctgacactcggcgcctcctgccgtgctccggggcggcatgtccgaggctggcggggccgggccgggcggctgcggggcaggagccggggcaggggccgggcccggggcgctgcccccgcagcctgcggcgcttccgcccgcgcccccgcagggctccccctgcgccgctgccgccgggggctcgggcgcctgcggtccggcgacggcagtggctgcagcgggcacggccgaaggaccgggaggcggtggctcggcccgaatcgccgtgaagaaagcgcaactacgctccgctccgcgggccaagaaactggagaaactcggagtgtactccgcctgcaaggccgaggagtcttgtaaatgtaatggctggaaaaaccctaacccctcacccactccccccagagccgacctgcagcaaataattgtcagtctaacagaatcctgtcggagttgtagccatgccctagctgctcatgtttcccacctggagaatgtgtcagaggaagaaatgaacagactcctgggaatagtattggatgtggaatatctctttacctgtgtccacaaggaagaagatgcagataccaaacaagtttatttctatctatttaagctcttgagaaagtctattttacaaagaggaaaacctgtggttgaaggctctttggaaaagaaacccccatttgaaaaacctagcattgaacagggtgtgaataactttgtgcagtacaaatttagtcacctgccagcaaaagaaaggcaaacaatagttgagttggcaaaaatgttcctaaaccgcatcaactattggcatctggaggcaccatctcaacgaagactgcgatctcccaatgatgatatttctggatacaaagagaactacacaaggtggctgtgttactgcaacgtgccacagttctgcgacagtctacctcggtacgaaaccacacaggtgtttgggagaacattgcttcgctcggtcttcactgttatgaggcgacaactcctggaacaagcaagacaggaaaaagataaactgcctcttgaaaaacgaactctaatcctcactcatttcccaaaatttctgtccatgctagaagaagaagtatatagtcaaaactctcccatctgggatcaggattttctctcagcctcttccagaaccagccagctaggcatccaaacagttatcaatccacctcctgtggctgggacaatttcatacaattcaacctcatcttcccttgagcagccaaacgcagggagcagcagtcctgcctgcaaagcctcttctggacttgaggcaaacccaggagaaaagaggaaaatgactgattctcatgttctggaggaggccaagaaaccccgagttatgggggatattccgatggaattaatcaacgaggttatgtctaccatcacggaccctgcagcaatgcttggaccagagaccaattttctgtcagcacactcggccagggatgaggcggcaaggttggaagagcgcaggggtgtaattgaatttcacgtggttggcaattccctcaaccagaaaccaaacaagaagatcctgatgtggctggttggcctacagaacgttttctcccaccagctgccccgaatgccaaaagaatacatcacacggctcgtctttgacccgaaacacaaaacccttgctttaattaaagatggccgtgttattggtggtatctgtttccgtatgttcccatctcaaggattcacagagattgtcttctgtgctgtaacctcaaatgagcaagtcaagggctatggaacacacctgatgaatcatttgaaagaatatcacataaagcatgacatcctgaacttcctcacatatgcagatgaatatgcaattggatactttaagaaacagggtttctccaaagaaattaaaatacctaaaaccaaatatgttggctatatcaaggattatgaaggagccactttaatgggatgtgagctaaatccacggatcccgtacacagaattttctgtcatcattaaaaagcagaaggagataattaaaaaactgattgaaagaaaacaggcacaaattcgaaaagtttaccctggactttcatgttttaaagatggagttcgacagattcctatagaaagcattcctggaattagagagacaggctggaaaccgagtggaaaagagaaaagtaaagagcccagagaccctgaccagctttacagcacgctcaagagcatcctccagcaggtgaagagccatcaaagcgcttggcccttcatggaacctgtgaagagaacagaagctccaggatattatgaagttataaggttccccatggatctgaaaaccatgagtgaacgcctcaagaataggtactacgtgtctaagaaattattcatggcagacttacagcgagtctttaccaattgcaaagagtacaacccccctgagagtgaatactacaaatgtgccaatatcctggagaaattcttcttcagtaaaattaaggaagctggattaattgacaagtgattttttttcccctctgcttcttagaaactcaccaagcagtgtgcctaaagcaaggtggtttagttttttacaaagaattggacatgatgtattgaagagacttgtaaatgtaataattagcacttttgaaaaaacaaaaaacctccttttagcttttcagatatgtatttaaattgaagtcataggacatttttattttatggaatagattttaatctatttactactattaaggtaaattttctatggcatgtccattagctatttcatgatagatgattaggggtttcctcaaaacctgtgtgtgaggaaattgcacacagtagcaaaatttggggaaatccataacattttcagaccatgaatgaatgtttccatttttttctaatggaatgtgagagtttacttttattttattctgaaggactttaaggaagggatacatgattttaaaaaagcctgtaagaggtgaaatatgtgatgtttgaagtctctttatagactttttatatatattttttaaaacactcatctagatgaggtgctttgagcagttctgaaaaatgcagttccaggaaagcaactgctttggttcctaaggaagaaattctaaataatgcaaacttttaaaataagcatctaggtttttgataattctgtctacttacaacaaacttgttagtacataaccactattttaataattattttctctacacaaatgtgtaatatcatatttgactttgcttatgcaggccataagttccaaaagataatttccctgcccacaaaggcataaacttgaaaacacatgagattgaatcaacatgctttaataggaaaagatgtatggtctatatatgtatcaatctggtgaatcctcgttctaataaaggttctttttcttttctatgatacacacagccacgctgataatatgcaaatgaacattttcctttatgtctctccagataatgtttattgtctgaggtaaattaaattcccaccagggtttgctgtcagtattttaacacccacattagtatatgcgtccagggtcataaccccctaaaatccatcatgcaaccttattaatctgtcttgggattccagtttagtgcttggatttatttcctgattacactacatagaaaagtgagacatctgccattcccaactctgggaaaaccaactaatatacaaccatataaatgaaggccatcttgatggtctcaacactaatttttatgatgcaaatttatacactgatttaaaagggggaacaggcctgtatcccccctaacatctatggtatctctttatagtatgttctgacctc

SEQ ID NO: 50745 - DNA, 3679 bp, Homo sapiens
tctgtcttgtcttcataacttgtatgtgtatgtgtctctgtgtgtatgtgtgcacacatgtgtatttaggactctgaaaatccacaaatgtgtatcttattagaacaaagatgagaagcttggatgtgtcccatccccactgtcttgagagaatagctctgtgtaattttttcctgtctcttgcatctcagaccaattttctgtcagcacactcggccagggatgaggcggcaaggttggaagagcgcaggggtgtaattgaatttcacgtggttggcaattccctcaaccagaaaccaaacaagaagatcctgatgtggctggttggcctacagaacgttttctcccaccagctgccccgaatgccaaaagaatacatcacacggctcgtctttgacccgaaacacaaaacccttgctttaattaaagatggccgtgttattggtggtatctgtttccgtatgttcccatctcaaggattcacagagattgtcttctgtgctgtaacctcaaatgagcaagtcaagggctatggaacacacctgatgaatcatttgaaagaatatcacataaagcatgacatcctgaacttcctcacatatgcagatgaatatgcaattggatactttaagaaacagggtttctccaaagaaattaaaatacctaaaaccaaatatgttggctatatcaaggattatgaaggagccactttaatgggatgtgagctaaatccacggatcccgtacacagaattttctgtcatcattaaaaagcagaaggagataattaaaaaactgattgaaagaaaacaggcacaaattcgaaaagtttaccctggactttcatgttttaaagatggagttcgacagattcctatagaaagcattcctggaattagagagacaggctggaaaccgagtggaaaagagaaaagtaaagagcccagagaccctgaccagctttacagcacgctcaagagcatcctccagcaggtgaagagccatcaaagcgcttggcccttcatggaacctgtgaagagaacagaagctccaggatattatgaagttataaggttccccatggatctgaaaaccatgagtgaacgcctcaagaataggtactacgtgtctaagaaattattcatggcagacttacagcgagtctttaccaattgcaaagagtacaacccccctgagagtgaatactacaaatgtgccaatatcctggagaaattcttcttcagtaaaattaaggaagctggattaattgacaagtgattttttttcccctctgcttcttagaaactcaccaagcagtgtgcctaaagcaaggtggtttagttttttacaaagaattggacatgatgtattgaagagacttgtaaatgtaataattagcacttttgaaaaaacaaaaaacctccttttagcttttcagatatgtatttaaattgaagtcataggacatttttattttatggaatagattttaatctatttactactattaaggtaaattttctatggcatgtccattagctatttcatgatagatgattaggggtttcctcaaaacctgtgtgtgaggaaattgcacacagtagcaaaatttggggaaatccataacattttcagaccatgaatgaatgtttccatttttttctaatggaatgtgagagtttacttttattttattctgaaggactttaaggaagggatacatgattttaaaaaagcctgtaagaggtgaaatatgtgatgtttgaagtctctttatagactttttatatatattttttaaaacactcatctagatgaggtgctttgagcagttctgaaaaatgcagttccaggaaagcaactgctttggttcctaaggaagaaattctaaataatgcaaacttttaaaataagcatctaggtttttgataattctgtctacttacaacaaacttgttagtacataaccactattttaataattattttctctacacaaatgtgtaatatcatatttgactttgcttatgcaggccataagttccaaaagataatttccctgcccacaaaggcataaacttgaaaacacatgagattgaatcaacatgctttaataggaaaagatgtatggtctatatatgtatcaatctggtgaatcctcgttctaataaaggttctttttcttttctatgatacacacagccacgctgataatatgcaaatgaacattttcctttatgtctctccagataatgtttattgtctgaggtaaattaaattcccaccagggtttgctgtcagtattttaacacccacattagtatatgcgtccagggtcataaccccctaaaatccatcatgcaaccttattaatctgtcttgggattccagtttagtgcttggatttatttcctgattacactacatagaaaagtgagacatctgccattcccaactctgggaaaaccaactaatatacaaccatataaatgaaggccatcttgatggtctcaacactaatttttatgatgcaaatttatacactgatttttgtaaaggacaaagttttaaaagcgtatttaacttgatgttttctatcagcataaataaaatggtcatgaatagtcattaaaaacagttgccagtgataatctgcatgaaggaaaaagaaccctgcaaatggctattgagttggaagtattgtttttgatatgtaagagatattcagaatgctcacactgaaaatgcctcaactttttaaagtgtaagaaaccaccatgagtggtgtctagatttctaatgaagaatcatgatacagtttggattaagtatcttggactggttttaaacagtgctttgtaccggatctgctgaagcatctgtccagctggtatcctgtgaaagtttgttattttctgagtagacattcttatagagtattgtctttaaaatcagattgtctcttctatattgaaagcatttttatgttttctaatttaaaaattaatattttcttatagatattgtgcaataaagctgaagtagaatgtgtggtttttgcaaatgctttaacagctgataaaaattttacatttgtaaaattaatatattgtactggtacaaaatagttttaaattatattttaaaaagcttcaaaaaaaaaaaaaaaaaaaaaaaaaaaaaaaaaaaaaaaaaaaaaaagaaaaaaaaaaaaaaaaaaagaagagaagaaggcgacacaagacaagaaataatcatccaagaagaagagcagaagatcacgaacagaggacgcgacgacccgatacgaagggacacacatgaaacacacacgaatcccagacgcttgactactgccccgaccagagagcagataccaaccctgcagacatgtgctagaagaaagaagacaaaaccgccgagggctcaattttaaatgagaggaaacaacaccaaacatcgtgcaaacacgaaacaagaagtaagagaaagaaataatgacagaggtacccatacacgcgcatcaaaaaatcaacatgggcccgggcaagaggaaaaaaagtggaagacatacacccagacgacgataataataggtgagatcgaacaacacaaacacacacctctataatcagaatcagtatgaaacatcatatagcgaaataccaaaagaccaaaca

SEQ ID NO: 50746 - DNA, 2087 bp, Homo sapiens
ggggccgcgtcgacgcggaaaagaggccgtggggggcctcccagcgctggcagacaccgtgaggctggcagccgccggcacgcacacctagtccgcagtcccgaggaacatgtccgcagccagggcgcggagcagagtcccgggcaggagaaccaagggagggcgtgtgctgtggcggcggcggcagcggcagcggagccgcgggagggtctcgctctcccgactaccagagcccgagggagaccctggcggcggcggcggcgcctgacactcggcgcctcctgccgtgctccggggcggcatgtccgaggctggcggggccgggccgggcggctgcggggcaggagccggggcaggggccgggcccggggcgctgcccccgcagcctgcggcgcttccgcccgcgcccccgcagggctccccctgcgccgctgccgccgggggctcgggcgcctgcggtccggcgacggcagtggctgcagcgggcacggccgaaggaccgggaggcggtggctcggcccgaatcgccgtgaagaaagcgcaactacgctccgctccgcgggccaagaaactggagaaactcggagtgtactccgcctgcaaggccgaggagtcttgtaaatgtaatggctggaaaaaccctaacccctcacccactccccccagagccgacctgcagcaaataattgtcagtctaacagaatcctgtcggagttgtagccatgccctagctgctcatgtttcccacctggagaatgtgtcagaggaagaaatgaacagactcctgggaatagtattggatgtggaatatctctttacctgtgtccacaaggaagaagatgcagataccaaacaagtttatttctatctatttaagctcttgagaaagtctattttacaaagaggaaaacctgtggttgaaggctctttggaaaagaaacccccatttgaaaaacctagcattgaacagggtgtgaataactttgtgcagtacaaatttagtcacctgccagcaaaagaaaggcaaacaatagttgagttggcaaaaatgttcctaaaccgcatcaactattggcatctggaggcaccatctcaacgaagactgcgatctcccaatgatgatatttctggatacaaagagaactacacaaggtggctgtgttactgcaacgtgccacagttctgcgacagtctacctcggtacgaaaccacacaggtgtttgggagaacattgcttcgctcggtcttcactgttatgaggcgacaactcctggaacaagcaagacaggaaaaagataaactgcctcttgaaaaacgaactctaatcctcactcatttcccaaaatttctgtccatgctagaagaagaagtatatagtcaaaactctcccatctgggatcaggattttctctcagcctcttccagaaccagccagctaggcatccaaacagttatcaatccacctcctgtggctgggacaatttcatacaattcaacctcatcttcccttgagcagccaaacgcagggagcagcagtcctgcctgcaaagcctcttctggacttgaggcaaacccaggagaaaagaggaaaatgactgattctcatgttctggaggaggccaagaaaccccgagttatgggggatattccgatggaattaatcaacgaggttatgtctaccatcacggaccctgcagcaatgcttggaccagaggtcagcagggtaaacctgggcagccagctggtagacctcttctgctctcctggccactccagctgtcagaagtggggatgctaatgctgagagttaacatgttatgctaccctggtttgcatttaacctggtggtcagtgtggagagggcaggaacaactgatcaagaggtaattccccttgatgaatatcacatcacaggtccacttactaataatctcacagttgaaggcatcattcccagctttttatcttgaaaaatttcaagccctcataaatgttgcagaaattctgtaataaaaatccatagactctttacttagattcagcagttaacattatgccacatttgctatctctctttctctctgcgc

SEQ ID NO: 50747 - DNA, 455 bp, Homo sapiens
tcatgggccgtctcatcaacatggcttccagtgaccaccctttttattctcttaggaagccaaagaacaacgctgcatctgacactcacttcaatagcacctgaattatgtgcttctccttaaaatgtggcccagtgacattttgggctggatgataaaaaataaaaataaattaaaaatgtggcccgagtatttaagagcaaaatattgacactgatttatcagggtggttctctcacatccactattatctaattcaaagcaaacagatatccttatctggcatgacagtcttaaggcctgtgtgtctggtatcaagccctcaaaaatgtctttttatgtctgatgatttactgaaaaccctaataccctttctgttttcttgttgcttgagcccttaatgcgtgccaggcactgtgccaaatgctttacagacgttatctcattccatcctc

SEQ ID NO: 50748 - DNA, 419 bp, Homo sapiens
atatatatatatgcacacacacacacacacatacacacacagacacacacgtatgaagagtgaggaaaaaaatcatggtacatgtgtcatgaccaagtagggtttctacaaagtgcttacatttgaaaatcagtgtgacagaatacaaggtaaaatctgctcaccttaagagatctggagaaggcatttgaaagaattcaactccttttgtgataaaccaaattgttagccaactgggaatagaagggaacattttcaacctgataaaggtatgaaactacagcttagcattattatattcaatagtgtaagataatgcttttcccctaatatcaagaacgaggcaaggatgcctagtcttattgattctattcaacattttgcagacagaaaatcctggctagttcagtaaagctgta

SEQ ID NO: 50749 - DNA, 575 bp, Homo sapiens
tcagaactctcatggagagctgaaatgtttatgactatcaaacagaacaggagttaactgaattaactgaaccaatagaaaactaatctttttgacctttttgcttaaaacattgctaatactttgttttgttttttagaattatgaaaactaaagctatttacagcttttaacaattgagtaaagtatactgttaccagaattgggagcatatttgtttctctctacctggtttctccagaatttggaaactatttagtcactgaaaactaagctgtgttttcttaaaaccctgcaaactgaagccagacaacttgaacttcagaagaaaataacagcaacctatttacgtacataagccactttcatacctgcctactaatgtatggacttcagagtaatgtggcttatatcgatttttctaggattgttcttttgtttgttgttgttttttctcccttcctccctgctattttctcttcacagaatgtgagacttcacaacctactaaaaatgagcttttgggacttacccatctaggaataaaccatcatagctatgagaaatcagatgaa

SEQ ID NO: 50750 - DNA, 1711 bp, Homo sapiens
gggaagggaagtgcgtcggtaggggagggctcacctctccaggttgaaacgatggcggtcagaaccgcctgaggtaaaaacgggtggcactggggaagcggaggcgtagctcccgagagcctcacacttgtgctcagtgccgcctcacccctggtggatccgcgatggccgcggattcccctggattgccggcgctgggcaggagcgccacttctaatctctcccgagactggacgcccggcgccttccacgcgcgttgtgtctttccgggcggtccctcgaagctggctaccccgcgggctgttgactgcagtgggatctggtcactcagatgcggatagagggctaaatgcaagatggtatggcatccagactctgctcataagtatctgcagtgatccataccttgattgtacatctactctgcatcctgaggacctgaacatgctaactggtggctgcagatttgtcttctaaggagcaagtgtggtctgtggacaggcagcttcagcctcacctgggattttgtttgcactagaaagtgccaagccctaccctagacctattaaagcagaactggcgtttaacaagacaccccaggtaatttgtgtgcaccttagagtctgagatgcactagtgtagtgattcgcagggggacaattttgacctccaggggacaatatctggagacatttttgggtgtcacaacgtgctggggagagggtgctactggcatctaatgggctgaggccaagggtgctgctaaacatccggcaataccgggccaacctcccccctcctcctgcccacagtaaagaattaccccgcctggattgtcagtagtgcagaggtagaggaaaccctacacctgtgaaactcatctgacctttactatgaattcctggatctcctggtgcatatcatttctgttgccctggctgacatttccaccttttctcttttctagattttattacaagaactcaatctgttggtctctaggaatcacctattgccttgctatgttttgttgaacctgtttttgaatctgctttctacattgggggaaatagggtatacgtttgttaaaccttaaaagctctgtatgcttataagggaaatcaccagacacgtgggataaagctttgcagaggtgaagggctgtcttccaccagagagaacccagaaggagttcagggttaagcctgactcatcatgagatcaggtatccccaatccacagcggacttccacagttcaccttcctaggtaaccgctctgccttcccaggtaaagtaggaataatatcagaacttacagcatattttgaggtcaaattgtagaatttggtgatttcatttttattattactcaaccttttatttacaaccaaattaataaggctacttacacataacaatgtgtggacatacacattaagagaatcatttgctgcctagcactcctacctaggtactttaagaacatcattgagtggatactccctctgctgggtaaaatactttgccacaatatcagctgaaatgatacctcttccagactgtaatggcagaagtagttatcccctctttcgtgctgtcatcacacttgatgcatgcctactttataatacttatgccattgtctctgttattgggtttctgtcttctactgtgaaagggtgagcccataaaaaacagggaatgtgtctt

SEQ ID NO: 50751 - DNA, 1439 bp, Homo sapiens
gggaagggaagtgcgtcggtaggggagggctcacctctccaggttgaaacgatggcggtcagaaccgcctgagctaaatgcaagatggtatggcatccagactctgctcataagtatctgcagtgatccataccttgattgtacatctactctgcatcctgaggacctgaacatgctaactggtggctgcagatttgtcttctaaggagcaagtgtggtctgtggacaggcagcttcagcctcacctgggattttgtttgcactagaaagtgccaagccctaccctagacctattaaagcagaactggcgtttaacaagacaccccaggtaatttgtgtgcaccttagagtctgagatgcactagtgtagtgattcgcagggggacaattttgacctccaggggacaatatctggagacatttttgggtgtcacaacgtgctggggagagggtgctactggcatctaatgggctgaggccaagggtgctgctaaacatccggcaataccgggccaacctcccccctcctcctgcccacagtaaagaattaccccgcctggattgtcagtagtgcagaggtagaggaaaccctacacctgtgaaactcatctgacctttactatgaattcctggatctcctggtgcatatcatttctgttgccctggctgacatttccaccttttctcttttctagattttattacaagaactcaatctgttggtctctaggaatcacctattgccttgctatgttttgttgaacctgtttttgaatctgctttctacattgggggaaatagggtatacgtttgttaaaccttaaaagctctgtatgcttataagggaaatcaccagacacgtgggataaagctttgcagaggtgaagggctgtcttccaccagagagaacccagaaggagttcagggttaagcctgactcatcatgagatcaggtatccccaatccacagcggacttccacagttcaccttcctaggtaaccgctctgccttcccaggtaaagtaggaataatatcagaacttacagcatattttgaggtcaaattgtagaatttggtgatttcatttttattattactcaaccttttatttacaaccaaattaataaggctacttacacataacaatgtgtggacatacacattaagagaatcatttgctgcctagcactcctacctaggtactttaagaacatcattgagtggatactccctctgctgggtaaaatactttgccacaatatcagctgaaatgatacctcttccagactgtaatggcagaagtagttatcccctctttcgtgctgtcatcacacttgatgcatgcctactttataatacttatgccattgtctctgttattgggtttctgtcttctactgtgaaagggtgagcccataaaaaacagggaatgtgtctt

SEQ ID NO: 50752 - DNA, 1785 bp, Homo sapiens
gggaagggaagtgcgtcggtaggggagggctcacctctccaggttgaaacgatggcggtcagaaccgcctgaggtaaaaacgggtggcactggggaagcggaggcgtagctcccgagagcctcacacttgtgctcagtgccgcctcacccctggtggatccgcgatggccgcggattcccctggattgccggcgctgggcaggagcgccacttctaatctctcccgagactggacgcccggcgccttccacgcgcgttgtgtctttccgggcggtccctcgaagctggctaccccgcgggctgttgactgcagtgggatctggtcactcagatgcggatagagggctaaatgcaagatggtatggcatccagactctgctcataagtatctgcagtgatccataccttgattgtacatctactctgcatcctgaggacctgaacatgctaactggtggctgcagatttgtcttctaaggagcaagtgtggtctgtggacaggcagcttcagcctcacctgggattttgtttgcactagaaagtgccaagccctaccctagacctattaaagcagaactggcgtttaacaagacaccccaggtaatttgtgtgcaccttagagtctgagatgcactagtgtagtgattcgcagggggacaattttgacctccaggggacaatatctggagacatttttgggtgtcacaacgtgctggggagagggtgctactggcatctaatgggctgaggccaagggtgctgctaaacatccggcaataccgggccaacctcccccctcctcctgcccacagtaaagaattaccccgcctggattgtcagtagtgcagaggtagaggaaaccctacacctgtgaaactcatctgacctttactatgaattcctggatctcctggtgcatatcatttctgttgccctggctgacatttccaccttttctcttttctagattttattacaagaactcaatctgttggtctctaggaatcacctattgccttgctatgttttgttgaacctgtttttgaatctgctttctacattgggggaaatagggtatacgtttgttaaaccttaaaagctctgtatgcttataagggaaatcaccagacacgtgggataaagctttgcagaggtgaagggctgtcttccaccagagagaacccagaaggagttcagggttaagcctgactcatcatgagatcaggtatccccaatccacagcggacttccacagttcaccttcctaggtaaccgctctgccttcccaggtaaagtaggaataatatcagaacttacagcatattttgaggtcaaattgtagaatttggtgatttcatttttattattactcaaccttttatttacaaccaaattaataaggctacttacacataacaatgtgtggacatacacattaagagaatcatttgctgcctagcactcctacctaggtactttaagaacatcattgagtggatactccctctgctgggtaaaatactttgccacaatatcagctgaaatgatacctcttccagactgtaatggcagaagtagttatcccctctttcgtgctgtcatcacacttgatgcatgcctactttataatacttatgccattgtctctgttattgggtttctgtcttctactgtgaaagggtgagcccataaaaaacagggaatgtgtctttcaaaatgttgtatcctgctcattctgatgtgaagccattgtcctccttcaataaaataaaacagcatttctga

SEQ ID NO: 50753 - DNA, 918 bp, Homo sapiens
gggaagggaagtgcgtcggtaggggagggctcacctctccaggttgaaacgatggcggtcagaaccgcctgaggtaaaaacgggtggcactggggaagcggaggcgtagctcccgagagcctcacacttgtgctcagtgccgcctcacccctggtggatccgcgatggccgcggattcccctggattgccggcgctgggcaggagcgccacttctaatctctcccgagactggacgcccggcgccttccacgcgcgttgtgtctttccgggcggtccctcgaagctggctaccccgcgggctgttgactgcagtgggatctggtcactcagatgcggatagagggctaaatgcaagatggtatggcatccagactctgctcataagtatctgcagtgatccataccttgattgtacatctactctgcatcctgaggacctgaacatgctaactggtggctgcagatttgtcttctaaggagcaagtgtggtctgtggacaggcagcttcagcctcacctgggattttgtttgcactagaaagtgccaagccctaccctagacctattaaagcagaactggcgtttaacaagacaccccagagtcactgaaaactaagctgtgttttcttaaaaccctgcaaactgaagccagacaacttgaacttcagaagaaaataacagcaacctatttacgtacataagccactttcatacctgcctactaatgtatggacttcagagtaatgtggcttatatcgatttttctaggattgttcttttgtttgttgttgttttttctcccttcctccctgctattttctcttcacagaatgtgagacttcacaacctactaaaaatgagcttttgggacttacccatctaggaataaaccatcatagctatgagaaatcagatgaa

SEQ ID NO: 50754 - DNA, 683 bp, Homo sapiens
gggaagggaagtgcgtcggtaggggagggctcacctctccaggttgaaacgatggcggtcagaaccgcctgaggtaaaaacgggtggcactggggaagcggaggcgtagctcccgagagcctcacacttgtgctcagtgccgcctcacccctggtggatccgcgatggccgcggattcccctggattgccggcgctgggcaggagcgccacttctaatctctcccgagactggacgcccggcgccttccacgcgcgttgtgtctttccgggcggtccctcgaagctggctaccccgcgggctgttgactgcagtgggatctggtcactcagatgcggatagaggggtacgggagccggagaggtggaacaggtccttccgggtgcggagagctgggccgtccagccgcctctttgttcccgcgtgggtcccgcgcggaatccccaccaccggggccgactgtcgtggtccctggagtcagcaccctgccctccccgccgtggtggcgggtggctggggggtccccggcccggcgagcccggcggagcgaccctgcgcttctgccctggcgagcttccggactcaggccatttaaatttttttccccagcagaatgaagttactctttgccaaagtcacggtttttaaatgtgtgagcctgaaaacatatcatgcagtcgtttt

SEQ ID NO: 50755 - DNA, 1215 bp, Homo sapiens
catgggcgctgcagcagctacaaagacgacgccggctgcgctcgcgggaccagagggagggaggctgcggacgagtgcggggaggagtttgagatgggaggcgcttgcaggggctcccccagttctgcgctgtgagccggggcacaaagagccctctgcactagcgccgcaggaccgcggacccgagttggaggcatctgtccacccatgtggttccagacacgttcatgtggccaccatgaccccgtcggcatcacaggggtaaccaagagagcagcaagttcctgggacagaggagacagaagggaatttccaggttcttcaggacgttcacaaccacactgagaagcatctttgcagataagtatttaaacttaccagcccatagcctaccagcctgccctcttctggtctgtgcaggaaagtgtagtatcctagaatgccaaagtgggaggggaaatgggtgatgtagctcattctcttttctacctctatggaagaaagaaagagcctgtccccattttgtggggtcccagaaagggtgattttcacacttcacatttggcgttagggctagtatttcacaaacattaccgtctggaacttttgaaggctgagttaaatgacttcatcttgtgtacttgtagaactgctattagaaggaggctggggactccctgatgatgtgaaccagcccttctcttctcagttttagcactttgtgatcatatttataaaccttggacagggctccttggccttagagttaagtgaagagttaacactgtgactttagatgcatttttctcagtgcaagtgtctgagctcatctccagttctggactcgtgcccccactcccgggtgctgacagcaagctctgaagatatgctgagagagctccctgactctcctgactcaggtctgccagttgatgaagacagcacagttgttaccaaaaacaaaacctggcagatggtcctaggtcaggattagtggtcattctctggtcttctccagactggtgacacagggtggtcttaaaagagtcctagtccagcctctggctccccgaatttcctctggtgcatggggcatcaggaaagggcaggggagaaggagggggagcagaaaaataactgaggctgggcagaagggtcccttccatttcccatccattgcttcaaacaatgggtgattaccgtgcaccttgagtg

SEQ ID NO: 50756 - DNA, 1289 bp, Homo sapiens
catgggcgctgcagcagctacaaagacgacgccggctgcgctcgcgggaccagagggagggaggctgcggacgagtgcggggaggagtttgagatgggaggcgcttgcaggggctcccccagttctgcgctgtgagccggggcacaaagagccctctgcactagcgccgcaggaccgcggacccgagttggaggcatctgtccacccatgtggttccagacacgttcatgtggccaccatgaccccgtcggcatcacaggggtaaccaaggtccacagaacgaggggaaagggtcactgtggatcaagccaggctcctctgagcagtccagggtctatttacagagagcagcaagttcctgggacagaggagacagaagggaatttccaggttcttcaggacgttcacaaccacactgagaagcatctttgcagataagtatttaaacttaccagcccatagcctaccagcctgccctcttctggtctgtgcaggaaagtgtagtatcctagaatgccaaagtgggaggggaaatgggtgatgtagctcattctcttttctacctctatggaagaaagaaagagcctgtccccattttgtggggtcccagaaagggtgattttcacacttcacatttggcgttagggctagtatttcacaaacattaccgtctggaacttttgaaggctgagttaaatgacttcatcttgtgtacttgtagaactgctattagaaggaggctggggactccctgatgatgtgaaccagcccttctcttctcagttttagcactttgtgatcatatttataaaccttggacagggctccttggccttagagttaagtgaagagttaacactgtgactttagatgcatttttctcagtgcaagtgtctgagctcatctccagttctggactcgtgcccccactcccgggtgctgacagcaagctctgaagatatgctgagagagctccctgactctcctgactcaggtctgccagttgatgaagacagcacagttgttaccaaaaacaaaacctggcagatggtcctaggtcaggattagtggtcattctctggtcttctccagactggtgacacagggtggtcttaaaagagtcctagtccagcctctggctccccgaatttcctctggtgcatggggcatcaggaaagggcaggggagaaggagggggagcagaaaaataactgaggctgggcagaagggtcccttccatttcccatccattgcttcaaacaatgggtgattaccgtgcaccttgagtg

SEQ ID NO: 50757 - DNA, 386 bp, Homo sapiens
gctacttgggaggctgagatgggaagatcacttgagcccgggagattgaggctgcagtgagccaagattgtgccattgcactccagcctgggtgacagagtaagagtgagatcctgtctcaaaacaaaaacaaaacaacttttatagcagatagcatgcaatggttagcatagtaatacaacactgacaattttaactcctatctttgttaagattttatatacttgaaacaggttaatgggaagtattttcctagaaagtaagtttatgcccctttctaataattacataataatgtaacttactgaaatggacaccgctgttaagcactctatgaggccttttataggcattataacaaatcttcatgccagtcctatgtgata

SEQ ID NO: 50758 - DNA, 479 bp, Homo sapiens
aaaatcaagggaaggagttttaatgacttcaggagtagctgagcccttggtttcattttcctgataacgagcactttacagtcctccctggacgctggagatgtgacttagggcacatatctgggctctgaatcattctgaactctgtgtgcccactgaatcagtgtctgtgccaacccatgaataagcagtggcagaaattcctggagggtcttctatccaaattctgatgggtccccatttttctttttagactgaggagataagaacatagggtgggatggccactgataaggcagaagtctgaagtaaggatgtaacacccaaaatgtgaaacagtattcggagtaaaaatatacattattactcaaggaggttcatatccttatcaatgcagcatcccacatgcttccagaaatcgctaatcatgtttatgtcaatgaaaatatcatgtatcagagttgtggattcaaagattt

SEQ ID NO: 50759 - DNA, 315 bp, Homo sapiens
ctaggaatctttctccttcacagtcagaaatcagataaaagataagggaagatgttggtgctaaatttctggacatgctatgcaggagtgaaatgtcagatgacaaagcaatatcaggaagaagactgccaaaggacaatcttgttgaattctgggcagaaacactaaggagagatctgaattgaaactatgttattataataattgtgttatcttcaatctgggcatggcacacacaggaacattctggcctgatgctgctcaagctctccctctttggataaataaatggcttcagttttcaaaacattctcc

SEQ ID NO: 50760 - DNA, 841 bp, Homo sapiens
ctaggaatctttctccttcacagtcagaaatcagataaaagataagggaagatgttggtgctaaatttctggacatgctatgcaggagtgaaatgtcagatgacaaagcaatatcaggaagaagactgccaaaggacaatcttgttgaattctgggcagaaacactaaggagagatctgaattgaaactatgttattataataattgtgttatcttcaatctgggcatggcacacacaggaacattctggcctgatgctgctcaagctctccctctttggataaataaatggcttcagttttcaaaacattctcctaaagcacttttatattcttattttttaaattgtataacacccagtacacctcagtggtcccagtctttaaaagccttgttaattttacctgtaaattttctttctttatattcttttatcgaattcatatcttctcatttatgccagtaatgttctcacccataaactctaccctaaggtcaaaatgtttccttcctcctcttttaaataactgtcaatatgggctctcccaataaacaaaccaccgccaaaaaaagaacaacaaaaagcctgtatctgggatgctatgtgaggaaataattacccttcacaaaccctatcttcaggatatttctgtattttaagccacaccaacataaggtaggatgtatttgtgtgtgttatgtttttccaccttggaaatatttttaaggaagttgggatatattatcttaaatttcattatcagagtgaggttaggaaattaaatacattgtattttaaatggaccaaggtgattcccaaacaatcataatactaatatgg

SEQ ID NO: 50761 - DNA, 2431 bp, Homo sapiens
cgagcgccgagcggtcgatcgccgtagctcccgcagcctgcgatctccagtctgtggctcctaccagccattgtaggccaataatccgttatggagcatgcctttaccccgttggagcccctgctttccactgggaatttgaagtactgccttgtaattcttaatcagcctttggacaactattttcgtcatctttggaacaaagctcttttaagagcctgtgccgatggaggtgccaaccgcttatatgatatcaccgaaggagagagagaaagctttttgcctgaattcatcaatggagactttgattctattaggcctgaagtcagagaatactatgctactaagggatgtgagctcatttcaactcctgatcaagaccacactgactttactaagtgccttaaaatgctccaaaagaagatagaagaaaaagacttaaaggttgatgtgatcgtgacactgggaggccttgctgggcgttttgaccagattatggcatctgtgaataccttgttccaagcgactcacatcactccttttccaattataataatccaagaggaatcgctgatctacctgctccaaccaggaaagcacaggttgcatgtagacactggaatggagggtgattggtgtggccttattcctgttggacagccttgtatgcaggttacaaccacaggcctcaagtggaacctcacaaatgatgtgcttgcttttggaacattggtcagtacttccaatacctacgacgggtctggtgttgtgactgtggaaactgaccacccactcctctggaccatggccatcaaaagctaacctgttgactggcatccataagtgtgcctctgccttatctcatttctcaacagttcattgctcaacaagaacgattcacctgggtttgcaagaatctaaacctctctaggggaagcccactgggtttaaagatgttagtgtttagataatacaggtaacattataaatgacagatctcaattttatagtagtgggaaagatacatgctaagaaagcaaataagctctattatattcggttggaacctaatgggaatcattccactatacaattcagtactgattattcttcttacattattaatcattccatttatcctagaaaattgtttttaatttgaatcagagaaaactgttgaggttcctcttggagtctagaacatccttaaatgtctaacaacaagggctacctctgagtaccttttagtattagttttctgtatatgatatatattatcttatactgaaaaaaaattcctttcagattggggtgttagaagtgcaccaggtcactctgaccttattactgtctttggtattgtcttaaataaatcaagaatcattgacctaattgttaaatttaaaaataggtagttagcaataggtggaaagagaaatgatgtgaaagataaatgatgattcgtggagccctactcacacattaacccccaaattcaaaagtaagaatgcaaaagtctagagggggtaacagtctgcatcatcatcacaacctaaatggagaaagctgtgcagaggaaacttaagcataaaaattgaattcgtttctgacataccttagactgaaaaactgttggttcatccagaagtgtattcatattaccagaaaatgagtttgtctatggggatacatgaacttcatatactaaggagcctaactccaaagcctgcgttctcatcccagtctgatattcacctaagtttccggacccttttccttagctgtaaaatggaagcggttggactgatggtgtctgaggttctttcccacactgaaattctaaatattgacacttagcagtcatagggctgataatacacacagttactgacttagcctaaacaacctggtgcatcgaaatgtattcacctttcttttgtaaagagaccatcttctatcttctttccacctttctctgttttatgaaaccaactgttgacatacaaaccatgattgaaggagaacctgtccaacatgttttatgtacacaaatccctatgttgctataagaaaagtgaaagtaactgttttcttcttggtgctatgacagtgtgagactcaggttgtctgtagagaatgaaaggagcagtggcccgcgtgattgtggcatttaaggagcagtggcccatgtgactgtggcattttcggcacttttcattactttctgcttgaccggaagttgaggcttagctatgtttccatcttcagtttctgaagactagttatatattccttactagaaatatattcataatatataaaagaaatatatctgtgattttaaaattttgctaccaaagaatgcatgttctgtgtgccctgaaaatgttaccagtgttaataaatggatacttatcaaaaaagaaaaaag

SEQ ID NO: 50762 - DNA, 731 bp, Homo sapiens
agcggggcggttaactgccaccaagtggtggttgtatgccatagctctgtaacatgaacagtgtttccaataaactgtccaccgcaaaacccgttaaaaaatgagtgagctccatgagctgaggagctagcagattgccgggattacaaagacaacgagacaggaccctttccttagcagggtttacaatctctcttttaagagcctgtgccgatggaggtgccaaccgcttatatgatatcaccgaaggagagagagaaagattcctctgacagtatcctccaagacctgacatggacaatgtgtgaaaaagcgctcaacctccaacttgaaactctcctcgaggcccccagccaccagtcatctcatcaggacaccgaaagacacccattactgtggagcttccaagggtcttggcaactcttttatcggaaacgagagctttttgcctgaattcatcaatggagactttgattctattaggcctgaagtcagagaatactatgctactaagggatgtgagctcatttcaactcctgatcaagaccacactgactttactaagtgccttaaaatgctccaaaagaagatagaagaaaaagacttaaagaagaaacagtgaaaggaatactgttcaattccaacatcagctgtgtaaccgaggcatcgtaatacttttatgacaagtttcactacctttttgcctgtgccagtgtacctcaaagggatat

SEQ ID NO: 50763 - DNA, 2439 bp, Homo sapiens
agcggggcggttaactgccaccaagtggtggttgtatgccatagctctgtaacatgaacagtgtttccaataaactgtccaccgcaaaacccctcttttaagagcctgtgccgatggaggtgccaaccgcttatatgatatcaccgaaggagagagagaaagcctccaacttgaaactctcctcgaggcccccagccaccagtcatctcatcaggacaccgaaagacacccattactgtggagcttccaagggtcttggcaactcttttatcggaaacgagagctttttgcctgaattcatcaatggagactttgattctattaggcctgaagtcagagaatactatgctactaagggatgtgagctcatttcaactcctgatcaagaccacactgactttactaagtgccttaaaatgctccaaaagaagatagaagaaaaagacttaaaggttgatgtgatcgtgacactgggaggccttgctgggcgttttgaccagattatggcatctgtgaataccttgttccaagcgactcacatcactccttttccaattataataatccaagaggaatcgctgatctacctgctccaaccaggaaagcacaggttgcatgtagacactggaatggagggtgattggtgtggccttattcctgttggacagccttgtatgcaggttacaaccacaggcctcaagtggaacctcacaaatgatgtgcttgcttttggaacattggtcagtacttccaatacctacgacgggtctggtgttgtgactgtggaaactgaccacccactcctctggaccatggccatcaaaagctaacctgttgactggcatccataagtgtgcctctgccttatctcatttctcaacagttcattgctcaacaagaacgattcacctgggtttgcaagaatctaaacctctctaggggaagcccactgggtttaaagatgttagtgtttagataatacaggtaacattataaatgacagatctcaattttatagtagtgggaaagatacatgctaagaaagcaaataagctctattatattcggttggaacctaatgggaatcattccactatacaattcagtactgattattcttcttacattattaatcattccatttatcctagaaaattgtttttaatttgaatcagagaaaactgttgaggttcctcttggagtctagaacatccttaaatgtctaacaacaagggctacctctgagtaccttttagtattagttttctgtatatgatatatattatcttatactgaaaaaaaattcctttcagattggggtgttagaagtgcaccaggtcactctgaccttattactgtctttggtattgtcttaaataaatcaagaatcattgacctaattgttaaatttaaaaataggtagttagcaataggtggaaagagaaatgatgtgaaagataaatgatgattcgtggagccctactcacacattaacccccaaattcaaaagtaagaatgcaaaagtctagagggggtaacagtctgcatcatcatcacaacctaaatggagaaagctgtgcagaggaaacttaagcataaaaattgaattcgtttctgacataccttagactgaaaaactgttggttcatccagaagtgtattcatattaccagaaaatgagtttgtctatggggatacatgaacttcatatactaaggagcctaactccaaagcctgcgttctcatcccagtctgatattcacctaagtttccggacccttttccttagctgtaaaatggaagcggttggactgatggtgtctgaggttctttcccacactgaaattctaaatattgacacttagcagtcatagggctgataatacacacagttactgacttagcctaaacaacctggtgcatcgaaatgtattcacctttcttttgtaaagagaccatcttctatcttctttccacctttctctgttttatgaaaccaactgttgacatacaaaccatgattgaaggagaacctgtccaacatgttttatgtacacaaatccctatgttgctataagaaaagtgaaagtaactgttttcttcttggtgctatgacagtgtgagactcaggttgtctgtagagaatgaaaggagcagtggcccgcgtgattgtggcatttaaggagcagtggcccatgtgactgtggcattttcggcacttttcattactttctgcttgaccggaagttgaggcttagctatgtttccatcttcagtttctgaagactagttatatattccttactagaaatatattcataatatataaaagaaatatatctgtgattttaaaattttgctaccaaagaatgcatgttctgtgtgccctgaaaatgttaccagtgttaataaatggatacttatcaaaaaagaaaaaag

SEQ ID NO: 50764 - DNA, 2243 bp, Homo sapiens
aaccaggaaactatggtcatggtccttaaatgatgaaagaaaatcaaggaatacagagtgatcatttgtgttatatatatctgatggctttttgcctgaattcatcaatggagactttgattctattaggcctgaagtcagagaatactatgctactaagggatgtgagctcatttcaactcctgatcaagaccacactgactttactaagtgccttaaaatgctccaaaagaagatagaagaaaaagacttaaaggttgatgtgatcgtgacactgggaggccttgctgggcgttttgaccagattatggcatctgtgaataccttgttccaagcgactcacatcactccttttccaattataataatccaagaggaatcgctgatctacctgctccaaccaggaaagcacaggttgcatgtagacactggaatggagggtgattggtgtggccttattcctgttggacagccttgtatgcaggttacaaccacaggcctcaagtggaacctcacaaatgatgtgcttgcttttggaacattggtcagtacttccaatacctacgacgggtctggtgttgtgactgtggaaactgaccacccactcctctggaccatggccatcaaaagctaacctgttgactggcatccataagtgtgcctctgccttatctcatttctcaacagttcattgctcaacaagaacgattcacctgggtttgcaagaatctaaacctctctaggggaagcccactgggtttaaagatgttagtgtttagataatacaggtaacattataaatgacagatctcaattttatagtagtgggaaagatacatgctaagaaagcaaataagctctattatattcggttggaacctaatgggaatcattccactatacaattcagtactgattattcttcttacattattaatcattccatttatcctagaaaattgtttttaatttgaatcagagaaaactgttgaggttcctcttggagtctagaacatccttaaatgtctaacaacaagggctacctctgagtaccttttagtattagttttctgtatatgatatatattatcttatactgaaaaaaaattcctttcagattggggtgttagaagtgcaccaggtcactctgaccttattactgtctttggtattgtcttaaataaatcaagaatcattgacctaattgttaaatttaaaaataggtagttagcaataggtggaaagagaaatgatgtgaaagataaatgatgattcgtggagccctactcacacattaacccccaaattcaaaagtaagaatgcaaaagtctagagggggtaacagtctgcatcatcatcacaacctaaatggagaaagctgtgcagaggaaacttaagcataaaaattgaattcgtttctgacataccttagactgaaaaactgttggttcatccagaagtgtattcatattaccagaaaatgagtttgtctatggggatacatgaacttcatatactaaggagcctaactccaaagcctgcgttctcatcccagtctgatattcacctaagtttccggacccttttccttagctgtaaaatggaagcggttggactgatggtgtctgaggttctttcccacactgaaattctaaatattgacacttagcagtcatagggctgataatacacacagttactgacttagcctaaacaacctggtgcatcgaaatgtattcacctttcttttgtaaagagaccatcttctatcttctttccacctttctctgttttatgaaaccaactgttgacatacaaaccatgattgaaggagaacctgtccaacatgttttatgtacacaaatccctatgttgctataagaaaagtgaaagtaactgttttcttcttggtgctatgacagtgtgagactcaggttgtctgtagagaatgaaaggagcagtggcccgcgtgattgtggcatttaaggagcagtggcccatgtgactgtggcattttcggcacttttcattactttctgcttgaccggaagttgaggcttagctatgtttccatcttcagtttctgaagactagttatatattccttactagaaatatattcataatatataaaagaaatatatctgtgattttaaaattttgctaccaaagaatgcatgttctgtgtgccctgaaaatgttaccagtgttaataaatggatacttatcaaaaaagaaaaaag

SEQ ID NO: 50765 - DNA, 2225 bp, Homo sapiens
cgagcgccgagcggtcgatcgccgtagctcccgcagcctgcgatctccagtctgtggctcctaccagccattgtggaatttgaagtactgccttgtaattcttaatcagcctttggacaactattttcgtcatctttggaacaaagctcttttaagagcctgtgccgatggaggtgccaaccgcttatatgatatcaccgaaggagagagagaaagctttttgcctgaattcatcaatggagactttgattctattaggcctgaagtcagagaatactatgctactaagggatgtgagctcatttcaactcctgatcaagaccacactgactttactaagtgccttaaaatgctccaaaagaagatagaagaaaaagacttaaagggaaagcacaggttgcatgtagacactggaatggagggtgattggtgtggccttattcctgttggacagccttgtatgcaggttacaaccacaggcctcaagtggaacctcacaaatgatgtgcttgcttttggaacattggtcagtacttccaatacctacgacgggtctggtgttgtgactgtggaaactgaccacccactcctctggaccatggccatcaaaagctaacctgttgactggcatccataagtgtgcctctgccttatctcatttctcaacagttcattgctcaacaagaacgattcacctgggtttgcaagaatctaaacctctctaggggaagcccactgggtttaaagatgttagtgtttagataatacaggtaacattataaatgacagatctcaattttatagtagtgggaaagatacatgctaagaaagcaaataagctctattatattcggttggaacctaatgggaatcattccactatacaattcagtactgattattcttcttacattattaatcattccatttatcctagaaaattgtttttaatttgaatcagagaaaactgttgaggttcctcttggagtctagaacatccttaaatgtctaacaacaagggctacctctgagtaccttttagtattagttttctgtatatgatatatattatcttatactgaaaaaaaattcctttcagattggggtgttagaagtgcaccaggtcactctgaccttattactgtctttggtattgtcttaaataaatcaagaatcattgacctaattgttaaatttaaaaataggtagttagcaataggtggaaagagaaatgatgtgaaagataaatgatgattcgtggagccctactcacacattaacccccaaattcaaaagtaagaatgcaaaagtctagagggggtaacagtctgcatcatcatcacaacctaaatggagaaagctgtgcagaggaaacttaagcataaaaattgaattcgtttctgacataccttagactgaaaaactgttggttcatccagaagtgtattcatattaccagaaaatgagtttgtctatggggatacatgaacttcatatactaaggagcctaactccaaagcctgcgttctcatcccagtctgatattcacctaagtttccggacccttttccttagctgtaaaatggaagcggttggactgatggtgtctgaggttctttcccacactgaaattctaaatattgacacttagcagtcatagggctgataatacacacagttactgacttagcctaaacaacctggtgcatcgaaatgtattcacctttcttttgtaaagagaccatcttctatcttctttccacctttctctgttttatgaaaccaactgttgacatacaaaccatgattgaaggagaacctgtccaacatgttttatgtacacaaatccctatgttgctataagaaaagtgaaagtaactgttttcttcttggtgctatgacagtgtgagactcaggttgtctgtagagaatgaaaggagcagtggcccgcgtgattgtggcatttaaggagcagtggcccatgtgactgtggcattttcggcacttttcattactttctgcttgaccggaagttgaggcttagctatgtttccatcttcagtttctgaagactagttatatattccttactagaaatatattcataatatataaaagaaatatatctgtgattttaaaattttgctaccaaagaatgcatgttctgtgtgccctgaaaatgttaccagtgttaataaatggatacttatcaaaaaagaaaaaag

SEQ ID NO: 50766 - DNA, 1047 bp, Homo sapiens
agcggggcggttaactgccaccaagtggtggttgtatgccatagctctgtaacatgaacagtgtttccaataaactgtccaccgcaaaacccgttaaaaaatgagtgagctccatgagctgaggagctagcagattgccgggattacaaagacaacgagacaggaccctttccttagcagggtttacaatctctcttttaagagcctgtgccgatggaggtgccaaccgcttatatgatatcaccgaaggagagagagaaagattcctctgacagtatcctccaagacctgacatggacaatgtgtgaaaaagcgctcaacctccaacttgaaactctcctcgaggcccccagccaccagtcatctcatcaggacaccgaaagacacccattactgtggagcttccaagggtcttggcaactcttttatcggaaacgagagctttttgcctgaattcatcaatggagactttgattctattaggcctgaagtcagagaatactatgctactaagggatgtgagctcatttcaactcctgatcaagaccacactgactttactaagtgccttaaaatgctccaaaagaagatagaagaaaaagacttaaaggttgatgtgatcgtgacactgggaggccttgctgggcgttttgaccagattatggcatctgtgaataccttgttccaagcgactcacatcactccttttccaattataataatccaagaggaatcgctgatctacctgctccaaccagtgagtcaaaagtgaatataatgtgagccctttccttcacaaagcttctaccacttgagtagactagaagaaaacattggccctgcttgggtcttcgaactgtgagtggaattgaacatgtgcgctttcttgtggccactttagttttgccccaggtcactgaccagcaaaaatgtgaaggagaatcctgaaagttttcattttattgtgtctaaaaaacaagagaaagtgttgtaactctaaattgactaagaattaaattgagcacttttgcgttttgaacagctgaa

SEQ ID NO: 50767 - DNA, 649 bp, Homo sapiens
cgagcgccgagcggtcgatcgccgtagctcccgcagcctgcgatctccagtctgtggctcctaccagccattgtaggccaataatccgttatggagcatgcctttaccccgttggagcccctgctttccactgggaatttgaagtactgccttgtaattcttaatcagcctttggacaactattttcgtcatctttggaacaaagctcttttaagagcctgtgccgatggaggtgccaaccgcttatatgatatcaccgaaggagagagagaaagattcctctgacagtatcctccaagacctgacatggacaatgtgtgaaaaagcgctcaagtatgtgttgtaaaaaaagggtctaggccagttacttcagataagagcataatgcccatgaggccaagcttatgtattgggcctgtagcctgcttgctggcaaataatctggtgccaagtattctctcatggcaggtgtagcttgtgaacgtaattgtaaccacaactgtgaaaggatctcaacactgtgccttccaagtgatctttgatcataagatctgtcgataatgcttgtgaagaaatatagactctcatattgattatttttactgaattggagtggacactaataaagataacagagcactttaaaaaa

SEQ ID NO: 50768 - DNA, 1566 bp, Homo sapiens
cgagcgccgagcggtcgatcgccgtagctcccgcagcctgcgatctccagtctgtggctcctaccagccattgtaggccaataatccgttatggagcatgcctttaccccgttggagcccctgctttccactgggaatttgaagtactgccttgtaattcttaatcagcctttggacaactattttcgtcatctttggaacaaagctcttttaagagcctgtgccgatggaggtgccaaccgcttatatgatatcaccgaaggagagagagaaagctttttgcctgaattcatcaatggagactttgattctattaggcctgaagtcagagaatactatgctactaagggatgtgagctcatttcaactcctgatcaagaccacactgactttactaagtgccttaaaatgctccaaaagaagatagaagaaaaagacttaaaggttgatgtgatcgtgacactgggaggccttgctgggcgttttgaccagattatggcatctgtgaataccttgttccaagcgactcacatcactccttttccaattataataatccaagaggaatcgctgatctacctgctccaaccaggaaagcacaggttgcatgtagacactggaatggagggtgattggtgtggccttattcctgttggacagccttgtatgcaggttacaaccacaggcctcaagtggaacctcacaaatgatgtgcttgcttttggaacattggtcagtacttccaatacctacgacgggtctggtgttgtgactgtggaaactgaccacccactcctctggaccatggccatcaaaagctaacctgttgactggcatccataagtgtgcctctgccttatctcatttctcaacagttcattgctcaacaagaacgattcacctgggtttgcaagaatctaaacctctctaggggaagcccactgggtttaaagatgttagtgtttagataatacaggtaacattataaatgacagatctcaattttatagtagtgggaaagatacatgctaagaaagcaaataagctctattaaatgtattcacctttcttttgtaaagagaccatcttctatcttctttccacctttctctgttttatgaaaccaactgttgacatacaaaccatgattgaaggagaacctgtccaacatgttttatgtacacaaatccctatgttgctataagaaaagtgaaagtaactgttttcttcttggtgctatgacagtgtgagactcaggttgtctgtagagaatgaaaggagcagtggcccgcgtgattgtggcatttaaggagcagtggcccatgtgactgtggcattttcggcacttttcattactttctgcttgaccggaagttgaggcttagctatgtttccatcttcagtttctgaagactagttatatattccttactagaaatatattcataatatataaaagaaatatatctgtgattttaaaattttgctaccaaagaatgcatgttctgtgtgccctgaaaatgttaccagtgttaataaatggatacttatcaaaaaagaaaaaag

SEQ ID NO: 50769 - DNA, 2597 bp, Homo sapiens
agcggggcggttaactgccaccaagtggtggttgtatgccatagctctgtaacatgaacagtgtttccaataaactgtccaccgcaaaacccgttaaaaaatgagtgagctccatgagctgaggagctagcagattgccgggattacaaagacaacgagacaggaccctttccttagcagggtttacaatctctcttttaagagcctgtgccgatggaggtgccaaccgcttatatgatatcaccgaaggagagagagaaagattcctctgacagtatcctccaagacctgacatggacaatgtgtgaaaaagcgctcaacctccaacttgaaactctcctcgaggcccccagccaccagtcatctcatcaggacaccgaaagacacccattactgtggagcttccaagggtcttggcaactcttttatcggaaacgagagctttttgcctgaattcatcaatggagactttgattctattaggcctgaagtcagagaatactatgctactaagggatgtgagctcatttcaactcctgatcaagaccacactgactttactaagtgccttaaaatgctccaaaagaagatagaagaaaaagacttaaaggttgatgtgatcgtgacactgggaggccttgctgggcgttttgaccagattatggcatctgtgaataccttgttccaagcgactcacatcactccttttccaattataataatccaagaggaatcgctgatctacctgctccaaccaggaaagcacaggttgcatgtagacactggaatggagggtgattggtgtggccttattcctgttggacagccttgtatgcaggttacaaccacaggcctcaagtggaacctcacaaatgatgtgcttgcttttggaacattggtcagtacttccaatacctacgacgggtctggtgttgtgactgtggaaactgaccacccactcctctggaccatggccatcaaaagctaacctgttgactggcatccataagtgtgcctctgccttatctcatttctcaacagttcattgctcaacaagaacgattcacctgggtttgcaagaatctaaacctctctaggggaagcccactgggtttaaagatgttagtgtttagataatacaggtaacattataaatgacagatctcaattttatagtagtgggaaagatacatgctaagaaagcaaataagctctattatattcggttggaacctaatgggaatcattccactatacaattcagtactgattattcttcttacattattaatcattccatttatcctagaaaattgtttttaatttgaatcagagaaaactgttgaggttcctcttggagtctagaacatccttaaatgtctaacaacaagggctacctctgagtaccttttagtattagttttctgtatatgatatatattatcttatactgaaaaaaaattcctttcagattggggtgttagaagtgcaccaggtcactctgaccttattactgtctttggtattgtcttaaataaatcaagaatcattgacctaattgttaaatttaaaaataggtagttagcaataggtggaaagagaaatgatgtgaaagataaatgatgattcgtggagccctactcacacattaacccccaaattcaaaagtaagaatgcaaaagtctagagggggtaacagtctgcatcatcatcacaacctaaatggagaaagctgtgcagaggaaacttaagcataaaaattgaattcgtttctgacataccttagactgaaaaactgttggttcatccagaagtgtattcatattaccagaaaatgagtttgtctatggggatacatgaacttcatatactaaggagcctaactccaaagcctgcgttctcatcccagtctgatattcacctaagtttccggacccttttccttagctgtaaaatggaagcggttggactgatggtgtctgaggttctttcccacactgaaattctaaatattgacacttagcagtcatagggctgataatacacacagttactgacttagcctaaacaacctggtgcatcgaaatgtattcacctttcttttgtaaagagaccatcttctatcttctttccacctttctctgttttatgaaaccaactgttgacatacaaaccatgattgaaggagaacctgtccaacatgttttatgtacacaaatccctatgttgctataagaaaagtgaaagtaactgttttcttcttggtgctatgacagtgtgagactcaggttgtctgtagagaatgaaaggagcagtggcccgcgtgattgtggcatttaaggagcagtggcccatgtgactgtggcattttcggcacttttcattactttctgcttgaccggaagttgaggcttagctatgtttccatcttcagtttctgaagactagttatatattccttactagaaatatattcataatatataaaagaaatatatctgtgattttaaaattttgctaccaaagaatgcatgttctgtgtgccctgaaaatgttaccagtgttaataaatggatacttatcaaaaaagaaaaaag

SEQ ID NO: 50770 - DNA, 462 bp, Homo sapiens
attagcctttccttaatatttgttccttggggaaagtaaaataaatgtgctcttaggggaattaaaagattagttgctacattactccttcagccttccagttctaaatgtagatttctaaaattggaaggcctgtgtttgtcctgactgaatttgcctttcagagtataaagtaaaataaccttttcttcctcatgcccacaagttctctgagggacagtgccaatagctaggataagccatcccagggaatgggatattgatctgtaggactaatggacgtaggataagtgcagtggggatacaggatgtattttcaagtgccagagaaaatacgaagagccaagtgggttggcatattatctttaaggaacgttacactctttctacctctgcttgcatttttgcgttcctcttttctttccttgcacccttgttttatctttatacagttaaaaaaaa

SEQ ID NO: 50771 - DNA, 425 bp, Homo sapiens
  misc_feature (417)..(417): n is a, c, g, or t
  misc_feature (419)..(419): n is a, c, g, or t
  misc_feature (421)..(421): n is a, c, g, or t
  misc_feature (423)..(423): n is a, c, g, or t
  misc_feature (425)..(425): n is a, c, g, or t
aaacattaactcataactcacggaaacccaatgaagtcggtgctggtggcacctccattttacagatgatgaaaccgaggagaggagggaggttgaataacttggcccaaggtcacttgctgaaaagtggcagagctaggattcactgcctctggttcactgccttgaaaggaaggaaagtctccccactcccaccactggggaactcttctttaactttctccacagtatcattggtccgataaatgagaggcaaggagagaaacaaagatggatgtatgtataaacttaggcaagcatggagagccatggtgatctggttaagtgttagttcttgagctgaattgcactggttagtgtcctggattttgaatgtactaaccctggaaaataaaattagaataataataagtgtananananan

SEQ ID NO: 50772 - DNA, 5942 bp, Homo sapiens
  misc_feature (1079)..(1079): n is a, c, g, or t
cacgaggcggcacgaggaatgacttgtgccctaaacaacctcctgcacagtctgcagcttcctgagtcctgttctgaaataaaacatgaggcttttaagaatcatgtgttcaatgtagacaatgcaaaatttgtagttaaatttgacctcagtgccctgactacaattggaaatgccaaaaactcactaatagggatgtgggcgctatctccaactgtctttgcacttctgagtaagaatctgatgattgtgcacagtgacctggctgttcacttccctgccattcagtatgctgtgctctacacattgtatcctcattgtaccaggcatgatcactttatctttagtagcctcagttcttcctctccttctttgtttgatggagctgtgattggcactgtaactatggccacaaagaaacatttctcaattatattaaatcttctgggaatgttacttaagaaagataaccaggacacgaggaaactgttaatgacttgggctttggaagtagctgttgtaatgaagaagtccgaaacatatgcacctttattctgtcttccgtctttccataaattttgcaaaggccttttagccgacactctcgttgaagatgtgaatatctgtctgcaggcatgcagcagtctacatgctctatcctcttccttgccagatgatcttttacagagatgtgttgatgtttgccgtgtccaactagtgcaccgtggaacttgtattcgacaagcatttggaaaactgttgaaatcaattcctttaggtgttttcctaagcgataacaatcacacagaaattcaagaaatttctttagcattaagaagtcacatgagtaaagcaccaagtaatacattccacccccaagatttctctgatgttattagttttattttgtatgggaactctcatagaacagggaaggacaattggttggaaagactgttctatagctgccagagactggataagcgtgaccagtcaacaattccacgcaatctcctgaagacagatgctatcctttggcagtgggccatatgggaagctgcacaattcactgttctttntaagctgagaaccccactgggcagagctcaagacaccttccagacaattgaaggtatcattcgaagtctcgcaggtcacacattaaaccctgatcaggatgttagtcagtggacaactgcagacagtgatgaaggccatggtaacaaccaacttagacttgttcttcttctgcagtatctggaaaatctggagaaattaatgtataatgcatacgagggatgtgctaatgccttaacttcacctcccaaggtcattagaacttttttgtataccaatcgccaaacttgtcaggactggctaacgcggattcgactctccatcatgagggtaggattgttggcaggccagcctgcagtgacagtgagacatggctttgacttgcttacagagatgaaaacaaccagcctatctcaggggaatgaattggaagtaagcattatgatggtggtagaagcactatgtgaacttcattgtcctgaagctatacagggaattgctgtctggtcatcatctattgttggaaaacatcttctgtggattaactcagtggctcaacaggctgaagggaggtttgaaaaggcctctgtggagtaccaggaacacctgtgtgccatgacaggtgttgattgctgcatctccagctttgacaaatcggtgctcaccttagccagtgctgggtgtaagagtgccagcctgaaacattgtctgaatggtgaatccagaaaaagtgtgctgtccaaaccgactgactcttcccctgaggttataaattatttaggaaacaaagcatgtgagtgctacatctcaactgccgattgggctgctgtgcaggaatggcagaacgctatccatgacttgaaaaagagtaccagtagcacttccctcaacctgaaagctgacttcaactatataaaatcattaagcagctttgagtctggaaaatttgtcgaatgtaccgagcaattagaattgttaccaggagaaaatatcaatctacttgctggaggatcaaaagaaaaaatagacatgaaaaaactgcttcgtaacatgtgaagtccagatccaagggaacctcagaaatccattgaagttccattgttaagaagttctgtttgtttggcaactgctttaaacccgatagaacaagatcagaagtggcagtctataactgaaaatgtggtaaagtacttgaagcaaacatcccgcatcgctattggacctctgagactttctactttaacagtttcacagtctttgccagttctaagtaccttgcagctgtattgctcgtctgctttggagaccacagtttctaacagactttcaacagaggactgtcttattccactcttcggcgaagctttacgttcatgtaaacagcatgacgtgaggccgtggatgcaggcattaaggtatactgtgtaccagaatcagttgttggagaaaattaaaggtatgatctcgtgaaatcttgagagaaactgaatgacgaatgaaactattgttcctgtttcacacagaagaaaactgaggttggcactcatcatgagcccctgttctcattctgcaaatggtgaagctctctattgtcctgaccccacagttcctgtcccatgaccagggccagctcaccaaggagctgcagcagcatgtaaagtcagtgacatgcccatgcgagtacctgaggaaggttatcaatactctggctgaccatcatcatcgtgggactgactttggtggaagtccttggttacatgtcattattgcgtttccgacaagttataaagttgtcattaccctctggatagtttacctttgggtgtctctcctgaagactatcttctggtctcgaaatggacatgatggatccacggatgtacagcagagagcctggaggtccaaccgccgtagacaggaagggctgaggtccatttgtatgcacacaaagaaaagagtttcttcctttcgaggaaataaaattggcctgaaagacgtcattactctacggagacatgtggaaacaaaagttagagctaaaatccgtaagaggaaggtgacaacgaaaatcaaccatcatgacaaaatcaatggaaagaggaagaccgccagaaaacagaaaatgtttcaacgtgcgcaagagttgcggcggcgagcagaggactaccacaaatgcaaaatcccccttctgcaagaaaggctctttgcaactgggtcagaatggcggcagcggagcatcgtcattcttcaggattgccctactggccctacctcacagctgaaactttaaaaaacaggatgggccaccagccacctcctccaactcaacaacattctataactgataactccctgagcctcaagacacctcccgagtgtctgctcactccccttccaccctcagcggatgataatctcaagacacctcccgagtgtgtgctcactccccttccaccctcagcggatgataatctcaagacacctcccgagtgtgtgctcactccccttccaccctcagcggatgataatctcaagacacctcctgagtgtctcctcactccccttccaccctcagcggatgataatctcaagacacctcccgagtgtctgctcactccccttccaccctcagctctaccctcagctccaccctcagcagatgataatctcaagacacgtgccgagtgtctgctccatccccttccaccctcagcggatgataatctcaagacaccttccgagcgtcagctcactccccttccaccctcagctccaccctcagcagatgataatatcaagacacctgccgagcgtctgcgggggccgcttccaccctcagcggatgataatctcaagacaccttccgagcgtcagctcactccccttccaccctcagctccaccctcagcagatgataatatcaagacacctgccgagcgtctgcgggggccgcttccaccctcagcggatgataatctcaagacaccttccgagcgtcagctcactccccttccaccctcagctccaccctcagcagatgataatatcaagacacctgccgagcgtctgcgggggccgcttccaccctcagcggatgataatctcaagacaccttccgagcgtcagctcactccccttccaccctcagctccaccctcagcagatgataatatcaagacacctgccgagcgtctgcgggggccgcttccaccctcagcggatgataatctcaagacaccttccgagcgtcagctcactccccttccaccctcagctccaccctcagcagatgataacatcaagacacctgccttccaccctcagcggatgataatctcaagacaccttccgagcgtcagctcactccccttccaccctcagctccaccctcagcagatgataatatcaagatacctgctgagcgtctgcggattccgcttccaccatcagccgatgataatctcaagacaccttccgagcgtcagctcactccccttccaccctcagctccaccctcagcagatgataatatcaagacacctgccgagcgtctgcgggggccgcttccaccctcagcggatgataatctcaagacaccttccgagcatcagctcactccccttccaccctcagctccaccctcagcagatgataatatcaagacacctgccgagcgtctgcgggggccgcttccaccctcagcggatgataatctcaagacaccttccgagcgtcagctcactccccttccaccctcagctccaccctcagcagatgataatatcaagacacctgccgagcgtctgcgggggccgcttccaccctcagcggatgataatctcaagacaccttccgagcgtcagctcactccccttccacactcagctccaccctcagcagatgataatatcaagacacctgccgagcgtctgcggggagcgtctgcgggggccgcttccaccctcagcggatgataatctcaagacaccttccgagcgtcagctcactccccttccaccctcagctccaccctcagcagatgataatatcaagacacctgctgagcgtctgcgggggccgcttccaccctcagcggatgataatctcaagacaccttccgagcgtcagctcactccccttccaccctcagctccaccctcagcagatgataatatcaagacacctgccgagcgtctgcgggggccgcttccaccctcagcggatgataatctcaagacaccttccgagcgtcagctcactccccttccaccctcagctccaccctcagcagatgataatatcaagacacctgccgagcgtctgcgggggccgcttccaccctcagccgatgataatctcaagacacctcccttagctactcaggaggctgaggcagaaaaaccacgcaaacccaagaggcagagggcggctgagatggaaccacctcccgaacccaagaggcggagggtcggtgacgtggaaccgtcacgcaaacccaagaggcggagggccgctgacgtggaaccatcatcacccgaacccaagaggcggagggtcggtgatgtggaaccgtcacgcaaacccaagaggcggagggccgctgacgtggaaccatcatcacccgaacccaagaggcggagggtcggtgacgtggaaccgtcacgcaaacccaagaggcggagggccgctgacgtggaaccatcattacccgaacccaagaggcggaggttgagctgagaagaggccagtgcactcaagcctgagcaataagaataaaaccgagtagaacaaaataaaaaattcaaaaaacaaaacaaaacccacactccaaaaactaacaaagaataaataaataatataaaaat

SEQ ID NO: 50773 - DNA, 5733 bp, Homo sapiens
  misc_feature (870)..(870): n is a, c, g, or t
cattaaatgtctttccagtgatgtatagtgcccttaaggtattgcaatgatggtttttagtctgcagggtacatattttatgcttatgttaaattgattcttatgtattttactcagatactattgtaaattggaatgttttaaaaattacatgtttctgattactcacgggtagtatatagcgattagactaaccctaatcgcaaagaaacatttctcaattatattaaatcttctgggaatgttacttaagaaagataaccaggacacgaggaaactgttaatgacttgggctttggaagtagctgttgtaatgaagaagtccgaaacatatgcacctttattctgtcttccgtctttccataaattttgcaaaggccttttagccgacactctcgttgaagatgtgaatatctgtctgcaggcatgcagcagtctacatgctctatcctcttccttgccagatgatcttttacagagatgtgttgatgtttgccgtgtccaactagtgcaccgtggaacttgtattcgacaagcatttggaaaactgttgaaatcaattcctttaggtgttttcctaagcgataacaatcacacagaaattcaagaaatttctttagcattaagaagtcacatgagtaaagcaccaagtaatacattccacccccaagatttctctgatgttattagttttattttgtatgggaactctcatagaacagggaaggacaattggttggaaagactgttctatagctgccagagactggataagcgtgaccagtcaacaattccacgcaatctcctgaagacagatgctatcctttggcagtgggccatatgggaagctgcacaattcactgttctttntaagctgagaaccccactgggcagagctcaagacaccttccagacaattgaaggtatcattcgaagtctcgcaggtcacacattaaaccctgatcaggatgttagtcagtggacaactgcagacagtgatgaaggccatggtaacaaccaacttagacttgttcttcttctgcagtatctggaaaatctggagaaattaatgtataatgcatacgagggatgtgctaatgccttaacttcacctcccaaggtcattagaacttttttgtataccaatcgccaaacttgtcaggactggctaacgcggattcgactctccatcatgagggtaggattgttggcaggccagcctgcagtgacagtgagacatggctttgacttgcttacagagatgaaaacaaccagcctatctcaggggaatgaattggaagtaagcattatgatggtggtagaagcactatgtgaacttcattgtcctgaagctatacagggaattgctgtctggtcatcatctattgttggaaaacatcttctgtggattaactcagtggctcaacaggctgaagggaggtttgaaaaggcctctgtggagtaccaggaacacctgtgtgccatgacaggtgttgattgctgcatctccagctttgacaaatcggtgctcaccttagccagtgctgggtgtaagagtgccagcctgaaacattgtctgaatggtgaatccagaaaaagtgtgctgtccaaaccgactgactcttcccctgaggttataaattatttaggaaacaaagcatgtgagtgctacatctcaactgccgattgggctgctgtgcaggaatggcagaacgctatccatgacttgaaaaagagtaccagtagcacttccctcaacctgaaagctgacttcaactatataaaatcattaagcagctttgagtctggaaaatttgtcgaatgtaccgagcaattagaattgttaccaggagaaaatatcaatctacttgctggaggatcaaaagaaaaaatagacatgaaaaaactgcttcgtaacatgtgaagtccagatccaagggaacctcagaaatccattgaagttccattgttaagaagttctgtttgtttggcaactgctttaaacccgatagaacaagatcagaagtggcagtctataactgaaaatgtggtaaagtacttgaagcaaacatcccgcatcgctattggacctctgagactttctactttaacagtttcacagtctttgccagttctaagtaccttgcagctgtattgctcgtctgctttggagaccacagtttctaacagactttcaacagaggactgtcttattccactcttcggcgaagctttacgttcatgtaaacagcatgacgtgaggccgtggatgcaggcattaaggtatactgtgtaccagaatcagttgttggagaaaattaaaggtatgatctcgtgaaatcttgagagaaactgaatgacgaatgaaactattgttcctgtttcacacagaagaaaactgaggttggcactcatcatgagcccctgttctcattctgcaaatggtgaagctctctattgtcctgaccccacagttcctgtcccatgaccagggccagctcaccaaggagctgcagcagcatgtaaagtcagtgacatgcccatgcgagtacctgaggaaggttatcaatactctggctgaccatcatcatcgtgggactgactttggtggaagtccttggttacatgtcattattgcgtttccgacaagttataaagttgtcattaccctctggatagtttacctttgggtgtctctcctgaagactatcttctggtctcgaaatggacatgatggatccacggatgtacagcagagagcctggaggtccaaccgccgtagacaggaagggctgaggtccatttgtatgcacacaaagaaaagagtttcttcctttcgaggaaataaaattggcctgaaagacgtcattactctacggagacatgtggaaacaaaagttagagctaaaatccgtaagaggaaggtgacaacgaaaatcaaccatcatgacaaaatcaatggaaagaggaagaccgccagaaaacagaaaatgtttcaacgtgcgcaagagttgcggcggcgagcagaggactaccacaaatgcaaaatcccccttctgcaagaaaggctctttgcaactgggtcagaatggcggcagcggagcatcgtcattcttcaggattgccctactggccctacctcacagctgaaactttaaaaaacaggatgggccaccagccacctcctccaactcaacaacattctataactgataactccctgagcctcaagacacctcccgagtgtctgctcactccccttccaccctcagcggatgataatctcaagacacctcccgagtgtgtgctcactccccttccaccctcagcggatgataatctcaagacacctcccgagtgtgtgctcactccccttccaccctcagcggatgataatctcaagacacctcctgagtgtctcctcactccccttccaccctcagcggatgataatctcaagacacctcccgagtgtctgctcactccccttccaccctcagctctaccctcagctccaccctcagcagatgataatctcaagacacgtgccgagtgtctgctccatccccttccaccctcagcggatgataatctcaagacaccttccgagcgtcagctcactccccttccaccctcagctccaccctcagcagatgataatatcaagacacctgccgagcgtctgcgggggccgcttccaccctcagcggatgataatctcaagacaccttccgagcgtcagctcactccccttccaccctcagctccaccctcagcagatgataatatcaagacacctgccgagcgtctgcgggggccgcttccaccctcagcggatgataatctcaagacaccttccgagcgtcagctcactccccttccaccctcagctccaccctcagcagatgataatatcaagacacctgccgagcgtctgcgggggccgcttccaccctcagcggatgataatctcaagacaccttccgagcgtcagctcactccccttccaccctcagctccaccctcagcagatgataatatcaagacacctgccgagcgtctgcgggggccgcttccaccctcagcggatgataatctcaagacaccttccgagcgtcagctcactccccttccaccctcagctccaccctcagcagatgataacatcaagacacctgccttccaccctcagcggatgataatctcaagacaccttccgagcgtcagctcactccccttccaccctcagctccaccctcagcagatgataatatcaagatacctgctgagcgtctgcggattccgcttccaccatcagccgatgataatctcaagacaccttccgagcgtcagctcactccccttccaccctcagctccaccctcagcagatgataatatcaagacacctgccgagcgtctgcgggggccgcttccaccctcagcggatgataatctcaagacaccttccgagcatcagctcactccccttccaccctcagctccaccctcagcagatgataatatcaagacacctgccgagcgtctgcgggggccgcttccaccctcagcggatgataatctcaagacaccttccgagcgtcagctcactccccttccaccctcagctccaccctcagcagatgataatatcaagacacctgccgagcgtctgcgggggccgcttccaccctcagcggatgataatctcaagacaccttccgagcgtcagctcactccccttccacactcagctccaccctcagcagatgataatatcaagacacctgccgagcgtctgcggggagcgtctgcgggggccgcttccaccctcagcggatgataatctcaagacaccttccgagcgtcagctcactccccttccaccctcagctccaccctcagcagatgataatatcaagacacctgctgagcgtctgcgggggccgcttccaccctcagcggatgataatctcaagacaccttccgagcgtcagctcactccccttccaccctcagctccaccctcagcagatgataatatcaagacacctgccgagcgtctgcgggggccgcttccaccctcagcggatgataatctcaagacaccttccgagcgtcagctcactccccttccaccctcagctccaccctcagcagatgataatatcaagacacctgccgagcgtctgcgggggccgcttccaccctcagccgatgataatctcaagacacctcccttagctactcaggaggctgaggcagaaaaaccacgcaaacccaagaggcagagggcggctgagatggaaccacctcccgaacccaagaggcggagggtcggtgacgtggaaccgtcacgcaaacccaagaggcggagggccgctgacgtggaaccatcatcacccgaacccaagaggcggagggtcggtgatgtggaaccgtcacgcaaacccaagaggcggagggccgctgacgtggaaccatcatcacccgaacccaagaggcggagggtcggtgacgtggaaccgtcacgcaaacccaagaggcggagggccgctgacgtggaaccatcattacccgaacccaagaggcggaggttgagctgagaagaggccagtgcactcaagcctgagcaataagaataaaaccgagtagaacaaaataaaaaattcaaaaaacaaaacaaaacccacactccaaaaactaacaaagaataaataaataatataaaaat

SEQ ID NO: 50774 - DNA, 2399 bp, Homo sapiens
  misc_feature (870)..(870): n is a, c, g, or t
cattaaatgtctttccagtgatgtatagtgcccttaaggtattgcaatgatggtttttagtctgcagggtacatattttatgcttatgttaaattgattcttatgtattttactcagatactattgtaaattggaatgttttaaaaattacatgtttctgattactcacgggtagtatatagcgattagactaaccctaatcgcaaagaaacatttctcaattatattaaatcttctgggaatgttacttaagaaagataaccaggacacgaggaaactgttaatgacttgggctttggaagtagctgttgtaatgaagaagtccgaaacatatgcacctttattctgtcttccgtctttccataaattttgcaaaggccttttagccgacactctcgttgaagatgtgaatatctgtctgcaggcatgcagcagtctacatgctctatcctcttccttgccagatgatcttttacagagatgtgttgatgtttgccgtgtccaactagtgcaccgtggaacttgtattcgacaagcatttggaaaactgttgaaatcaattcctttaggtgttttcctaagcgataacaatcacacagaaattcaagaaatttctttagcattaagaagtcacatgagtaaagcaccaagtaatacattccacccccaagatttctctgatgttattagttttattttgtatgggaactctcatagaacagggaaggacaattggttggaaagactgttctatagctgccagagactggataagcgtgaccagtcaacaattccacgcaatctcctgaagacagatgctatcctttggcagtgggccatatgggaagctgcacaattcactgttctttntaagctgagaaccccactgggcagagctcaagacaccttccagacaattgaaggtatcattcgaagtctcgcaggtcacacattaaaccctgatcaggatgttagtcagtggacaactgcagacagtgatgaaggccatggtaacaaccaacttagacttgttcttcttctgcagtatctggaaaatctggagaaattaatgtataatgcatacgagggatgtgctaatgccttaacttcacctcccaaggtcattagaacttttttgtataccaatcgccaaacttgtcaggactggctaacgcggattcgactctccatcatgagggtaggattgttggcaggccagcctgcagtgacagtgagacatggctttgacttgcttacagagatgaaaacaaccagcctatctcaggggaatgaattggaagtaagcattatgatggtggtagaagcactatgtgaacttcattgtcctgaagctatacagggaattgctgtctggtcatcatctattgttggaaaacatcttctgtggattaactcagtggctcaacaggctgaagggaggtttgaaaaggcctctgtggagtaccaggaacacctgtgtgccatgacaggtgttgattgctgcatctccagctttgacaaatcggtgctcaccttagccagtgctgggtgtaagagtgccagcctgaaacattgtctgaatggtgaatccagaaaaagtgtgctgtccaaaccgactgactcttcccctgaggttataaattatttaggaaacaaagcatgtgagtgctacatctcaactgccgattgggctgctgtgcaggaatggcagaacgctatccatgacttgaaaaagagtaccagtagcacttccctcaacctgaaagctgacttcaactatataaaatcattaagcagctttgagtctggaaaatttgtcgaatgtaccgagcaattagaattgttaccaggagaaaatatcaatctacttgctggaggatcaaaagaaaaaatagacatgaaaaaactgcttcgtaacatgtgaagtccagatccaagggaacctcagaaatccattgaagttccattgttaagaagttctgtttgtttggcaactgctttaaacccgatagaacaagatcagaagtggcagtctataactgaaaatgtggtaaagtacttgaagcaaacatcccgcatcgctattggacctctgagactttctactttaacagtttcacagtctttgccagttctaagtaccttgcagctgtattgctcgtctgctttggagaccacagtttctaacagactttcaacagaggactgtcttattccactcttcggcgaagctttacgttcatgtaaacagcatgacgtgaggccgtggatgcaggcattaaggtatactgtgtaccagaatcagttgttggagaaaattaaagttaagtggttttcctttttttttttttgtaagagaaaattaaaggtggtttttttttttaaattttgctttattg

SEQ ID NO: 50775 - DNA, 3784 bp, Homo sapiens
gccctttcttttacgtttccgacaaaacagtgtctgtgggcagttagaatcttcagtttctgtgagcgtccgcttcgtctgggcacttccggtactcccattcagttccggtccctgtcttttacgtttccggcaaaacatcagtgtctgtgggtagttggaatcttcagttcctgtgagcgtcggcgtcttctgggcctgtggagtttcttggacaggggccgcggggctccaggacggcgcccttagcgacaccatggcccgaaatgcagaaaaggccatgacggccttagcaagatttcgccaggctcagctggaagagggaaaagtgaaggaacgaagaccctttctggcctcagaatgtactgaactgcctaaagctgagaagtggagacgacagatcattggagagatctctaaaaaagtggctcagattcagaatgctggtttaggtgaatttcgaattcgtgacctgaatgatgaaattaacaagctgctaagggagaaaggacactgggaggtccggataaaggagctgggaggtcctgattatggaaaagttggccctaaaatgctggatcatgaaggaaaagaagtcccaggaaaccgaggttacaagtactttggagcagcaaaagatttgcctggtgttagagagctgtttgaaaaagaacctcttcctcctcccagaaagacacgtgctgagctcatgaaggcaatcgattttgagtactatggttacctagatgaagatgatggtgttattgtgcctttggaacaggaatatgaaaagaaactcagagccgagttagtggaaaagtggaaagcagagagagaggctcggctggcaagaggagaaaaggaagaggaggaggaagaggaggaagagatcaacatctatgcagtcaccgaggaggagtcggacgaggaaggcagccaggagaaaggaggggacgacagccagcagaagttcattgctcacgtccctgttccctcgcagcaagagattgaggaggcactggtgcgaaggaagaaaatggaactcctccagaagtatgcaagcgagaccctgcaggcccaaagtgaagaagccagaaggctcctggggtattaggacccagctggggctctccttggagttcttccatcccccagtggtacctcaggacccagggctgcagacacaggctggtgctgcaagggctcctgccccattctcagccttccttccctctccttgtctcatgttgaccggagggtaggggtctgtccctggtcttcctggtaggttttgtacacatattttgctactgtgtggatccatttatttttattgtggagtgtatacaacaggttgcgaactggctgcctgtgtcttattttgacttgcactgccattttgaggggagaagaatcaattagtggcaaacatttaaaaatgcaattttttgcagaccaaagtataattttaaaaaatgcaaattttctaaaagacacatctcttgaaaaatgagatgatgtggccaggcgcagtggctcacgcctgtaaccccagcactttgggaggccgaggcgggcgggtcacgaggtcaagagatggagaccatcctggccaacatggtgaaaccccatgtctactaaaaatacaaaaaaattagctgggcgtactggcatgcacctgtagtcccagctgcttgggaggctgaggcaggagaatcacttgaacccgagaggtggaggttgaagtgagccaagatcgtgccattgcactccagcctggcgacagagtgagactctgtcccacaaaaaaaaaaaaaaaaagatgcacgcaacccacaagtcaatgaccaggtccctctgtgttggttgctgctctgggctctccgttagcccccctccacctgctccactcgctcctgcctgggtggcaggaatttgagtttgctattcctgttttataacctgttctgcagaaacctatttttattaaagatttttataagaaagggaaacctccatgtcttcagcttgttccctgggccaacggctctgaggtgacagtggcattaggatgtgaccagtcactaaggggcactgccttcctgcaggggagtccctgaagccccagccccaagtgtggcaaagacaggaccagatcccaggagtctaggtgggagtgagccgacccaccatggcgtccgtggccacagctgtagacagggctccttgcagtgggctgcaccgtggcctgctgaaagcacacagtggacacgagctgagtccagagcttcctctgaactggggcttagctctccagtggggaaccatggtcagcggctgtagcccctgggcaagatggtgcctggcttcctgccctctgcagggtcatgggagtgtctgggaactcagggtcagggccagatggctgttcctggggcctggggctccagctcaggctgtttgggaataggaggaactcttggcttggagaagcccatcacacagcgggaggcctgggatggttggtctgcggggagcagctcagactgggggtggcagagccgtgtgtggctgtgtgtggccaagtcgggagagtggccagtgctgggccctctctaaggagcccgagggccacaaggactgtggaaaaggtctgagtgagggagtcgggagctagtggctaagggacttgcttgaggacgctccgtgcggccacaaggagaggcccaggcaggaccaggtcaggaggaggctggggcagaggccctggcaggaggtgggtgggcttggtggggatgggagtagccagggtgtaggtgaggatggggaaggggcccccctgcctcctggcttccctgagggctgggctggccaatcccagccctcagtcaagcccggaggcaaatgtgtgcagggaggagaggtgtccaggttgaagctttgggagcccttggaggcagcaaggcagactcgcctctgggacccagcacccagcttgggcctgcaggtggggactcaggagtgaatatcgtgggggctttgagcaagaccctctgggcccagcctcaccttccatactttgaagtcaaggagtggacctgtgctgtctcagtttgctctggggtctgggcagtcctgtggtttgggcagaggcctcagagggccctagggacagactgacccaggtctgagcctcttgggagcgtgcggatggccggcctcagacaggcctggttgtgggtttgtcttccaaggggcacacgcgcactctggtgcttcctggcattcagaagagaatggggaatccagacatcaggccttccttctccctgggaaggatggcaggtgcttggagccaggcctgtcttgagagccagggctctgggtcttcctcctccagtgccctgttccacgccttcagtgcacaaagcactcccctcctgggatctcttcagggatccccgggatgcaaactggccagggattagaattccacatttgagcaaacagactgagagtggagaagcacccagctggacatcctctaggtgttcctggcagaggcccttgctacttgtctgtgcccaaaggccctagagggtcctagatgtgggacaaggtctcagcagggctccagtcccaggcctggaaacagctgggggtgggggaagctggctgggtgggtgtggttatcttttcccagcttgtggctccgaggtgacagaaccaatctcaggaggctttgtttggttaataaaatctactgaatggtttattttagctt

SEQ ID NO: 50776 - DNA, 1809 bp, Homo sapiens
gccctttcttttacgtttccgacaaaacagtgtctgtgggcagttagaatcttcagtttctgtgagcgtccgcttcgtctgggcacttccggtactcccattcagttccggtccctgtcttttacgtttccggcaaaacatcagtgtctgtgggtagttggaatcttcagttcctgtgagcgtcggcgtcttctgggcctgtggagtttcttggacaggggccgcggggctccaggacggcgcccttagcgacaccatggcccgaaatgcagaaaaggccatgacggccttagcaagatttcgccaggctcagctggaagagggaaaagtgaaggaacgaagaccctttctggcctcagaatgtactgaactgcctaaagctgagaagtggagacgacagatcattggagagatctctaaaaaagtggctcagattcagaatgctggtttaggtgaatttcgaattcgtgacctgaatgatgaaattaacaagctgctaagggagaaaggacactgggaggtccggataaaggagctgggaggtcctgattatggaaaagttggccctaaaatgctggatcatgaaggaaaagaagtcccaggaaaccgaggttacaagtactttggagcagcaaaagatttgcctggtgttagagagctgtttgaaaaagaacctcttcctcctcccagaaagacacgtgctgagctcatgaaggcaatcgattttgagtactatggttacctagatgaagatgatggtgttattgtgcctttggaacaggaatatgaaaagaaactcagagccgagttagtggaaaagtggaaagcagagagagaggctcggctggcaagaggagaaaaggaagaggaggaggaagaggaggaagagatcaacatctatgcagtcaccgaggaggagtcggacgaggaaggcagccaggagaaaggaggggacgacagccagcagaagttcattgctcacgtccctgttccctcgcagcaagagattgaggaggcactggtgcgaaggaagaaaatggaactcctccagaagtatgcaagcgagaccctgcaggcccaaagtgaagaagccagaaggctcctggggtattaggacccagctggggctctccttggagttcttccatcccccagtggtacctcaggacccagggctgcagacacaggctggtgctgcaagggctcctgccccattctcagccttccttccctctccttgtctcatgttgaccggagggtaggggtctgtccctggtcttcctggtaggttttgtacacatattttgctactgtgtggatccatttatttttattgtggagtgtatacaacaggttgcgaactggctgcctgtgtcttattttgacttgcactgccattttgaggggagaagaatcaattagtggcaaacatttaaaaatgcaattttttgcagaccaaagtataattttaaaaaatgcaaattttctaaaagacacatctcttgaaaaatgagatgatgtggccaggcgcagtggctcacgcctgtaaccccagcactttgggaggccgaggcgggcgggtcacgaggtcaagagatggagaccatcctggccaacatggtgaaaccccatgtctactaaaaatacaaaaaaattagctgggcgtactggcatgcacctgtagtcccagctgcttgggaggctgaggcaggagaatcacttgaacccgagaggtggaggttgaagtgagccaagatcgtgccccataacagaacctccagggcctgcacaataagcttctttttttcc

SEQ ID NO: 50777 - DNA, 3628 bp, Homo sapiens
aagataggctaggtacgaggctgggtggggcgtcttctgggcctgtggagtttcttggacaggggccgcggggctccaggacggcgcccttagcgacaccatggcccgaaatgcagaaaaggccatgacggccttagcaagatttcgccaggctcagctggaagagggaaaagtgaaggaacgaagaccctttctggcctcagaatgtactgaactgcctaaagctgagaagtggagacgacagatcattggagagatctctaaaaaagtggctcagattcagaatgctggtttaggtgaatttcgaattcgtgacctgaatgatgaaattaacaagctgctaagggagaaaggacactgggaggtccggataaaggagctgggaggtcctgattatggaaaagttggccctaaaatgctggatcatgaaggaaaagaagtcccaggaaaccgaggttacaagtactttggagcagcaaaagatttgcctggtgttagagagctgtttgaaaaagaacctcttcctcctcccagaaagacacgtgctgagctcatgaaggcaatcgattttgagtactatggttacctagatgaagatgatggtgttattgtgcctttggaacaggaatatgaaaagaaactcagagccgagttagtggaaaagtggaaagcagagagagaggctcggctggcaagaggagaaaaggaagaggaggaggaagaggaggaagagatcaacatctatgcagtcaccgaggaggagtcggacgaggaaggcagccaggagaaaggaggggacgacagccagcagaagttcattgctcacgtccctgttccctcgcagcaagagattgaggaggcactggtgcgaaggaagaaaatggaactcctccagaagtatgcaagcgagaccctgcaggcccaaagtgaagaagccagaaggctcctggggtattaggacccagctggggctctccttggagttcttccatcccccagtggtacctcaggacccagggctgcagacacaggctggtgctgcaagggctcctgccccattctcagccttccttccctctccttgtctcatgttgaccggagggtaggggtctgtccctggtcttcctggtaggttttgtacacatattttgctactgtgtggatccatttatttttattgtggagtgtatacaacaggttgcgaactggctgcctgtgtcttattttgacttgcactgccattttgaggggagaagaatcaattagtggcaaacatttaaaaatgcaattttttgcagaccaaagtataattttaaaaaatgcaaattttctaaaagacacatctcttgaaaaatgagatgatgtggccaggcgcagtggctcacgcctgtaaccccagcactttgggaggccgaggcgggcgggtcacgaggtcaagagatggagaccatcctggccaacatggtgaaaccccatgtctactaaaaatacaaaaaaattagctgggcgtactggcatgcacctgtagtcccagctgcttgggaggctgaggcaggagaatcacttgaacccgagaggtggaggttgaagtgagccaagatcgtgccattgcactccagcctggcgacagagtgagactctgtcccacaaaaaaaaaaaaaaaaagatgcacgcaacccacaagtcaatgaccaggtccctctgtgttggttgctgctctgggctctccgttagcccccctccacctgctccactcgctcctgcctgggtggcaggaatttgagtttgctattcctgttttataacctgttctgcagaaacctatttttattaaagatttttataagaaagggaaacctccatgtcttcagcttgttccctgggccaacggctctgaggtgacagtggcattaggatgtgaccagtcactaaggggcactgccttcctgcaggggagtccctgaagccccagccccaagtgtggcaaagacaggaccagatcccaggagtctaggtgggagtgagccgacccaccatggcgtccgtggccacagctgtagacagggctccttgcagtgggctgcaccgtggcctgctgaaagcacacagtggacacgagctgagtccagagcttcctctgaactggggcttagctctccagtggggaaccatggtcagcggctgtagcccctgggcaagatggtgcctggcttcctgccctctgcagggtcatgggagtgtctgggaactcagggtcagggccagatggctgttcctggggcctggggctccagctcaggctgtttgggaataggaggaactcttggcttggagaagcccatcacacagcgggaggcctgggatggttggtctgcggggagcagctcagactgggggtggcagagccgtgtgtggctgtgtgtggccaagtcgggagagtggccagtgctgggccctctctaaggagcccgagggccacaaggactgtggaaaaggtctgagtgagggagtcgggagctagtggctaagggacttgcttgaggacgctccgtgcggccacaaggagaggcccaggcaggaccaggtcaggaggaggctggggcagaggccctggcaggaggtgggtgggcttggtggggatgggagtagccagggtgtaggtgaggatggggaaggggcccccctgcctcctggcttccctgagggctgggctggccaatcccagccctcagtcaagcccggaggcaaatgtgtgcagggaggagaggtgtccaggttgaagctttgggagcccttggaggcagcaaggcagactcgcctctgggacccagcacccagcttgggcctgcaggtggggactcaggagtgaatatcgtgggggctttgagcaagaccctctgggcccagcctcaccttccatactttgaagtcaaggagtggacctgtgctgtctcagtttgctctggggtctgggcagtcctgtggtttgggcagaggcctcagagggccctagggacagactgacccaggtctgagcctcttgggagcgtgcggatggccggcctcagacaggcctggttgtgggtttgtcttccaaggggcacacgcgcactctggtgcttcctggcattcagaagagaatggggaatccagacatcaggccttccttctccctgggaaggatggcaggtgcttggagccaggcctgtcttgagagccagggctctgggtcttcctcctccagtgccctgttccacgccttcagtgcacaaagcactcccctcctgggatctcttcagggatccccgggatgcaaactggccagggattagaattccacatttgagcaaacagactgagagtggagaagcacccagctggacatcctctaggtgttcctggcagaggcccttgctacttgtctgtgcccaaaggccctagagggtcctagatgtgggacaaggtctcagcagggctccagtcccaggcctggaaacagctgggggtgggggaagctggctgggtgggtgtggttatcttttcccagcttgtggctccgaggtgacagaaccaatctcaggaggctttgtttggttaataaaatctactgaatggtttattttagctt

SEQ ID NO: 50778 - DNA, 3633 bp, Homo sapiens
ctaggtacgagcccctgggtgaatcggccgaggggcgtcttctgggcctgtggagtttcttggacaggggccgcggggctccaggacggcgcccttagcgacaccatggcccgaaatgcagaaaaggccatgacggccttagcaagatttcgccaggctcagctggaagagggaaaagtgaaggaacgaagaccctttctggcctcagaatgtactgaactgcctaaagctgagaagtggagacgacagatcattggagagatctctaaaaaagtggctcagattcagaatgctggtttaggtgaatttcgaattcgtgacctgaatgatgaaattaacaagctgctaagggagaaaggacactgggaggtccggataaaggagctgggaggtcctgattatggaaaagttggccctaaaatgctggatcatgaaggaaaagaagtcccaggaaaccgaggttacaagtactttggagcagcaaaagatttgcctggtgttagagagctgtttgaaaaagaacctcttcctcctcccagaaagacacgtgctgagctcatgaaggcaatcgattttgagtactatggttacctagatgaagatgatggtgttattgtgcctttggaacaggaatatgaaaagaaactcagagccgagttagtggaaaagtggaaagcagagagagaggctcggctggcaagaggagaaaaggaagaggaggaggaagaggaggaagagatcaacatctatgcagtcaccgaggaggagtcggacgaggaaggcagccaggagaaaggaggggacgacagccagcagaagttcattgctcacgtccctgttccctcgcagcaagagattgaggaggcactggtgcgaaggaagaaaatggaactcctccagaagtatgcaagcgagaccctgcaggcccaaagtgaagaagccagaaggctcctggggtattaggacccagctggggctctccttggagttcttccatcccccagtggtacctcaggacccagggctgcagacacaggctggtgctgcaagggctcctgccccattctcagccttccttccctctccttgtctcatgttgaccggagggtaggggtctgtccctggtcttcctggtaggttttgtacacatattttgctactgtgtggatccatttatttttattgtggagtgtatacaacaggttgcgaactggctgcctgtgtcttattttgacttgcactgccattttgaggggagaagaatcaattagtggcaaacatttaaaaatgcaattttttgcagaccaaagtataattttaaaaaatgcaaattttctaaaagacacatctcttgaaaaatgagatgatgtggccaggcgcagtggctcacgcctgtaaccccagcactttgggaggccgaggcgggcgggtcacgaggtcaagagatggagaccatcctggccaacatggtgaaaccccatgtctactaaaaatacaaaaaaattagctgggcgtactggcatgcacctgtagtcccagctgcttgggaggctgaggcaggagaatcacttgaacccgagaggtggaggttgaagtgagccaagatcgtgccattgcactccagcctggcgacagagtgagactctgtcccacaaaaaaaaaaaaaaaaagatgcacgcaacccacaagtcaatgaccaggtccctctgtgttggttgctgctctgggctctccgttagcccccctccacctgctccactcgctcctgcctgggtggcaggaatttgagtttgctattcctgttttataacctgttctgcagaaacctatttttattaaagatttttataagaaagggaaacctccatgtcttcagcttgttccctgggccaacggctctgaggtgacagtggcattaggatgtgaccagtcactaaggggcactgccttcctgcaggggagtccctgaagccccagccccaagtgtggcaaagacaggaccagatcccaggagtctaggtgggagtgagccgacccaccatggcgtccgtggccacagctgtagacagggctccttgcagtgggctgcaccgtggcctgctgaaagcacacagtggacacgagctgagtccagagcttcctctgaactggggcttagctctccagtggggaaccatggtcagcggctgtagcccctgggcaagatggtgcctggcttcctgccctctgcagggtcatgggagtgtctgggaactcagggtcagggccagatggctgttcctggggcctggggctccagctcaggctgtttgggaataggaggaactcttggcttggagaagcccatcacacagcgggaggcctgggatggttggtctgcggggagcagctcagactgggggtggcagagccgtgtgtggctgtgtgtggccaagtcgggagagtggccagtgctgggccctctctaaggagcccgagggccacaaggactgtggaaaaggtctgagtgagggagtcgggagctagtggctaagggacttgcttgaggacgctccgtgcggccacaaggagaggcccaggcaggaccaggtcaggaggaggctggggcagaggccctggcaggaggtgggtgggcttggtggggatgggagtagccagggtgtaggtgaggatggggaaggggcccccctgcctcctggcttccctgagggctgggctggccaatcccagccctcagtcaagcccggaggcaaatgtgtgcagggaggagaggtgtccaggttgaagctttgggagcccttggaggcagcaaggcagactcgcctctgggacccagcacccagcttgggcctgcaggtggggactcaggagtgaatatcgtgggggctttgagcaagaccctctgggcccagcctcaccttccatactttgaagtcaaggagtggacctgtgctgtctcagtttgctctggggtctgggcagtcctgtggtttgggcagaggcctcagagggccctagggacagactgacccaggtctgagcctcttgggagcgtgcggatggccggcctcagacaggcctggttgtgggtttgtcttccaaggggcacacgcgcactctggtgcttcctggcattcagaagagaatggggaatccagacatcaggccttccttctccctgggaaggatggcaggtgcttggagccaggcctgtcttgagagccagggctctgggtcttcctcctccagtgccctgttccacgccttcagtgcacaaagcactcccctcctgggatctcttcagggatccccgggatgcaaactggccagggattagaattccacatttgagcaaacagactgagagtggagaagcacccagctggacatcctctaggtgttcctggcagaggcccttgctacttgtctgtgcccaaaggccctagagggtcctagatgtgggacaaggtctcagcagggctccagtcccaggcctggaaacagctgggggtgggggaagctggctgggtgggtgtggttatcttttcccagcttgtggctccgaggtgacagaaccaatctcaggaggctttgtttggttaataaaatctactgaatggtttattttagctt

SEQ ID NO: 50779 - DNA, 3264 bp, Homo sapiens
gccctttcttttacgtttccgacaaaacagtgtctgtgggcagttagaatcttcagtttctgtgagcgtccgcttcgtctgggcacttccggtactcccattcagttccggtccctgtcttttacgtttccggcaaaacatcagtgtctgtgggtagttggaatcttcagttcctgtgagcgtcggcgtcttctgggcctgtggagtttcttggacaggggccgcggggctccaggacggcgcccttagcgacaccatggcccgaaatgcagaaaaggccatgacggccttagcaagatttcgccaggctcagctggaagagggaaaagtgaaggaacgaagaccctttctggcctcagaatgtactgaactgcctaaagctgagaagtggagacgacagatcattggagagatctctaaaaaagtggctcagattcagaatgctggtttaggtgaatttcgaattcgtgacctgaatgatgaaattaacaagctgctaagggagaaaggacactgggaggtccggataaaggagctgggaggtcctgattatggaaaagttggccctaaaatgctggatcatgaaggaaaagaagtcccaggaaaccgaggttacaagtactttggagcagcaaaagatttgcctggtgttagagagctgtttgaaaaagaacctcttcctcctcccagaaagacacgtgctgagctcatgaaggcaatcgattttgagtactatggttacctagatgaagatgatggtgttattgtgcctttggaacaggaatatgaaaagaaactcagagccgagttagtggaaaagtggaaagcagagagagaggctcggctggcaagaggagaaaaggaagaggaggaggaagaggaggaagagatcaacatctatgcagtcaccgaggaggagtcggacgaggaaggcagccaggagaaaggaggggacgacagccagcagaagttcattgctcacgtccctgttccctcgcagcaagagattgaggaggcactggtgcgaaggaagaaaatggaactcctccagaagtatgcaagcgagaccctgcaggcccaaagtgaagaagccagaaggctcctggggtattaggacccagctggggctctccttggagttcttccatcccccagtggtacctcaggacccagggctgcagacacaggcaggagaatcacttgaacccgagaggtggaggttgaagtgagccaagatcgtgccattgcactccagcctggcgacagagtgagactctgtcccacaaaaaaaaaaaaaaaaagatgcacgcaacccacaagtcaatgaccaggtccctctgtgttggttgctgctctgggctctccgttagcccccctccacctgctccactcgctcctgcctgggtggcaggaatttgagtttgctattcctgttttataacctgttctgcagaaacctatttttattaaagatttttataagaaagggaaacctccatgtcttcagcttgttccctgggccaacggctctgaggtgacagtggcattaggatgtgaccagtcactaaggggcactgccttcctgcaggggagtccctgaagccccagccccaagtgtggcaaagacaggaccagatcccaggagtctaggtgggagtgagccgacccaccatggcgtccgtggccacagctgtagacagggctccttgcagtgggctgcaccgtggcctgctgaaagcacacagtggacacgagctgagtccagagcttcctctgaactggggcttagctctccagtggggaaccatggtcagcggctgtagcccctgggcaagatggtgcctggcttcctgccctctgcagggtcatgggagtgtctgggaactcagggtcagggccagatggctgttcctggggcctggggctccagctcaggctgtttgggaataggaggaactcttggcttggagaagcccatcacacagcgggaggcctgggatggttggtctgcggggagcagctcagactgggggtggcagagccgtgtgtggctgtgtgtggccaagtcgggagagtggccagtgctgggccctctctaaggagcccgagggccacaaggactgtggaaaaggtctgagtgagggagtcgggagctagtggctaagggacttgcttgaggacgctccgtgcggccacaaggagaggcccaggcaggaccaggtcaggaggaggctggggcagaggccctggcaggaggtgggtgggcttggtggggatgggagtagccagggtgtaggtgaggatggggaaggggcccccctgcctcctggcttccctgagggctgggctggccaatcccagccctcagtcaagcccggaggcaaatgtgtgcagggaggagaggtgtccaggttgaagctttgggagcccttggaggcagcaaggcagactcgcctctgggacccagcacccagcttgggcctgcaggtggggactcaggagtgaatatcgtgggggctttgagcaagaccctctgggcccagcctcaccttccatactttgaagtcaaggagtggacctgtgctgtctcagtttgctctggggtctgggcagtcctgtggtttgggcagaggcctcagagggccctagggacagactgacccaggtctgagcctcttgggagcgtgcggatggccggcctcagacaggcctggttgtgggtttgtcttccaaggggcacacgcgcactctggtgcttcctggcattcagaagagaatggggaatccagacatcaggccttccttctccctgggaaggatggcaggtgcttggagccaggcctgtcttgagagccagggctctgggtcttcctcctccagtgccctgttccacgccttcagtgcacaaagcactcccctcctgggatctcttcagggatccccgggatgcaaactggccagggattagaattccacatttgagcaaacagactgagagtggagaagcacccagctggacatcctctaggtgttcctggcagaggcccttgctacttgtctgtgcccaaaggccctagagggtcctagatgtgggacaaggtctcagcagggctccagtcccaggcctggaaacagctgggggtgggggaagctggctgggtgggtgtggttatcttttcccagcttgtggctccgaggtgacagaaccaatctcaggaggctttgtttggttaataaaatctactgaatggtttattttagctt

SEQ ID NO: 50780 - DNA, 3662 bp, Homo sapiens
gccctttcttttacgtttccgacaaaacagtgtctgtgggcagttagaatcttcagtttctgtgagcgtccgcttcgtctgggcacttccggtactcccattcagttccggtccctgtcttttacgtttccggcaaaacatcagtgtctgtgggtagttggaatcttcagttcctgtgagcgtcggcgtcttctgggcctgtggagtttcttggacaggggccgcggggctccaggacggcgcccttagcgacaccatggcccgaaatgcagaaaaggccatgacggccttagcaagatttcgccaggctcagctggaagagggaaaagtgaaggaacgaagaccctttctggcctcagaatgtactgaactgcctaaagctgagaagtggagacgacagatcattggagagatctctaaaaaagtggctcagattcagaatgctggtttaggtgaatttcgaattcgtgacctgaatgatgaaattaacaagctgctaagggagaaaggacactgggaggtccggataaaggagctgggaggtcctgattatggaaaagttggccctaaaatgctggatcatgaaggaaaagaagtcccaggaaaccgaggttacaagtactttggagcagcaaaagatttgcctggtgttagagagctgtttgaaaaagaacctcttcctcctcccagaaagacacgtgctgagctcatgaaggcaatcgattttgagtactatggttacctagatgaagatgatggtgttattgtgcctttggaacaggaatatgaaaagaaactcggacgaggaaggcagccaggagaaaggaggggacgacagccagcagaagttcattgctcacgtccctgttccctcgcagcaagagattgaggaggcactggtgcgaaggaagaaaatggaactcctccagaagtatgcaagcgagaccctgcaggcccaaagtgaagaagccagaaggctcctggggtattaggacccagctggggctctccttggagttcttccatcccccagtggtacctcaggacccagggctgcagacacaggctggtgctgcaagggctcctgccccattctcagccttccttccctctccttgtctcatgttgaccggagggtaggggtctgtccctggtcttcctggtaggttttgtacacatattttgctactgtgtggatccatttatttttattgtggagtgtatacaacaggttgcgaactggctgcctgtgtcttattttgacttgcactgccattttgaggggagaagaatcaattagtggcaaacatttaaaaatgcaattttttgcagaccaaagtataattttaaaaaatgcaaattttctaaaagacacatctcttgaaaaatgagatgatgtggccaggcgcagtggctcacgcctgtaaccccagcactttgggaggccgaggcgggcgggtcacgaggtcaagagatggagaccatcctggccaacatggtgaaaccccatgtctactaaaaatacaaaaaaattagctgggcgtactggcatgcacctgtagtcccagctgcttgggaggctgaggcaggagaatcacttgaacccgagaggtggaggttgaagtgagccaagatcgtgccattgcactccagcctggcgacagagtgagactctgtcccacaaaaaaaaaaaaaaaaagatgcacgcaacccacaagtcaatgaccaggtccctctgtgttggttgctgctctgggctctccgttagcccccctccacctgctccactcgctcctgcctgggtggcaggaatttgagtttgctattcctgttttataacctgttctgcagaaacctatttttattaaagatttttataagaaagggaaacctccatgtcttcagcttgttccctgggccaacggctctgaggtgacagtggcattaggatgtgaccagtcactaaggggcactgccttcctgcaggggagtccctgaagccccagccccaagtgtggcaaagacaggaccagatcccaggagtctaggtgggagtgagccgacccaccatggcgtccgtggccacagctgtagacagggctccttgcagtgggctgcaccgtggcctgctgaaagcacacagtggacacgagctgagtccagagcttcctctgaactggggcttagctctccagtggggaaccatggtcagcggctgtagcccctgggcaagatggtgcctggcttcctgccctctgcagggtcatgggagtgtctgggaactcagggtcagggccagatggctgttcctggggcctggggctccagctcaggctgtttgggaataggaggaactcttggcttggagaagcccatcacacagcgggaggcctgggatggttggtctgcggggagcagctcagactgggggtggcagagccgtgtgtggctgtgtgtggccaagtcgggagagtggccagtgctgggccctctctaaggagcccgagggccacaaggactgtggaaaaggtctgagtgagggagtcgggagctagtggctaagggacttgcttgaggacgctccgtgcggccacaaggagaggcccaggcaggaccaggtcaggaggaggctggggcagaggccctggcaggaggtgggtgggcttggtggggatgggagtagccagggtgtaggtgaggatggggaaggggcccccctgcctcctggcttccctgagggctgggctggccaatcccagccctcagtcaagcccggaggcaaatgtgtgcagggaggagaggtgtccaggttgaagctttgggagcccttggaggcagcaaggcagactcgcctctgggacccagcacccagcttgggcctgcaggtggggactcaggagtgaatatcgtgggggctttgagcaagaccctctgggcccagcctcaccttccatactttgaagtcaaggagtggacctgtgctgtctcagtttgctctggggtctgggcagtcctgtggtttgggcagaggcctcagagggccctagggacagactgacccaggtctgagcctcttgggagcgtgcggatggccggcctcagacaggcctggttgtgggtttgtcttccaaggggcacacgcgcactctggtgcttcctggcattcagaagagaatggggaatccagacatcaggccttccttctccctgggaaggatggcaggtgcttggagccaggcctgtcttgagagccagggctctgggtcttcctcctccagtgccctgttccacgccttcagtgcacaaagcactcccctcctgggatctcttcagggatccccgggatgcaaactggccagggattagaattccacatttgagcaaacagactgagagtggagaagcacccagctggacatcctctaggtgttcctggcagaggcccttgctacttgtctgtgcccaaaggccctagagggtcctagatgtgggacaaggtctcagcagggctccagtcccaggcctggaaacagctgggggtgggggaagctggctgggtgggtgtggttatcttttcccagcttgtggctccgaggtgacagaaccaatctcaggaggctttgtttggttaataaaatctactgaatggtttattttagctt

SEQ ID NO: 50781 - DNA, 3525 bp, Homo sapiens
tcaccataaggctaagtagcagcctagggttttaatcaggccagagcggcgtcttctgggcctgtggagtttcttggacaggggccgcggggctccaggacggcgcccttagcgacaccatggcccgaaatgcagaaaaggccatgacggccttagcaagatttcgccaggctcagctggaagagggaaaagtgaaggaacgaagaccctttctggcctcagaatgtactgaactgcctaaagctgagaagtggagacgacagatcattggagagatctctaaaaaagtggctcagattcagaatgctggtttaggtgaatttcgaattcgtgacctgaatgatgaaattaacaagctgctaagggagaaaggacactgggaggtccggataaaggagctgggaggtcctgattatggaaaagttggccctaaaatgctggatcatgaaggaaaagaagtcccaggaaaccgaggttacaagtactttggagcagcaaaagatttgcctggtgttagagagctgtttgaaaaagaacctcttcctcctcccagaaagacacgtgctgagctcatgaaggcaatcgattttgagtactatggttacctagatgaagatgatggtgttattgtgcctttggaacaggaatatgaaaagaaactcggacgaggaaggcagccaggagaaaggaggggacgacagccagcagaagttcattgctcacgtccctgttccctcgcagcaagagattgaggaggcactggtgcgaaggaagaaaatggaactcctccagaagtatgcaagcgagaccctgcaggcccaaagtgaagaagccagaaggctcctggggtattaggacccagctggggctctccttggagttcttccatcccccagtggtacctcaggacccagggctgcagacacaggctggtgctgcaagggctcctgccccattctcagccttccttccctctccttgtctcatgttgaccggagggtaggggtctgtccctggtcttcctggtaggttttgtacacatattttgctactgtgtggatccatttatttttattgtggagtgtatacaacaggttgcgaactggctgcctgtgtcttattttgacttgcactgccattttgaggggagaagaatcaattagtggcaaacatttaaaaatgcaattttttgcagaccaaagtataattttaaaaaatgcaaattttctaaaagacacatctcttgaaaaatgagatgatgtggccaggcgcagtggctcacgcctgtaaccccagcactttgggaggccgaggcgggcgggtcacgaggtcaagagatggagaccatcctggccaacatggtgaaaccccatgtctactaaaaatacaaaaaaattagctgggcgtactggcatgcacctgtagtcccagctgcttgggaggctgaggcaggagaatcacttgaacccgagaggtggaggttgaagtgagccaagatcgtgccattgcactccagcctggcgacagagtgagactctgtcccacaaaaaaaaaaaaaaaaagatgcacgcaacccacaagtcaatgaccaggtccctctgtgttggttgctgctctgggctctccgttagcccccctccacctgctccactcgctcctgcctgggtggcaggaatttgagtttgctattcctgttttataacctgttctgcagaaacctatttttattaaagatttttataagaaagggaaacctccatgtcttcagcttgttccctgggccaacggctctgaggtgacagtggcattaggatgtgaccagtcactaaggggcactgccttcctgcaggggagtccctgaagccccagccccaagtgtggcaaagacaggaccagatcccaggagtctaggtgggagtgagccgacccaccatggcgtccgtggccacagctgtagacagggctccttgcagtgggctgcaccgtggcctgctgaaagcacacagtggacacgagctgagtccagagcttcctctgaactggggcttagctctccagtggggaaccatggtcagcggctgtagcccctgggcaagatggtgcctggcttcctgccctctgcagggtcatgggagtgtctgggaactcagggtcagggccagatggctgttcctggggcctggggctccagctcaggctgtttgggaataggaggaactcttggcttggagaagcccatcacacagcgggaggcctgggatggttggtctgcggggagcagctcagactgggggtggcagagccgtgtgtggctgtgtgtggccaagtcgggagagtggccagtgctgggccctctctaaggagcccgagggccacaaggactgtggaaaaggtctgagtgagggagtcgggagctagtggctaagggacttgcttgaggacgctccgtgcggccacaaggagaggcccaggcaggaccaggtcaggaggaggctggggcagaggccctggcaggaggtgggtgggcttggtggggatgggagtagccagggtgtaggtgaggatggggaaggggcccccctgcctcctggcttccctgagggctgggctggccaatcccagccctcagtcaagcccggaggcaaatgtgtgcagggaggagaggtgtccaggttgaagctttgggagcccttggaggcagcaaggcagactcgcctctgggacccagcacccagcttgggcctgcaggtggggactcaggagtgaatatcgtgggggctttgagcaagaccctctgggcccagcctcaccttccatactttgaagtcaaggagtggacctgtgctgtctcagtttgctctggggtctgggcagtcctgtggtttgggcagaggcctcagagggccctagggacagactgacccaggtctgagcctcttgggagcgtgcggatggccggcctcagacaggcctggttgtgggtttgtcttccaaggggcacacgcgcactctggtgcttcctggcattcagaagagaatggggaatccagacatcaggccttccttctccctgggaaggatggcaggtgcttggagccaggcctgtcttgagagccagggctctgggtcttcctcctccagtgccctgttccacgccttcagtgcacaaagcactcccctcctgggatctcttcagggatccccgggatgcaaactggccagggattagaattccacatttgagcaaacagactgagagtggagaagcacccagctggacatcctctaggtgttcctggcagaggcccttgctacttgtctgtgcccaaaggccctagagggtcctagatgtgggacaaggtctcagcagggctccagtcccaggcctggaaacagctgggggtgggggaagctggctgggtgggtgtggttatcttttcccagcttgtggctccgaggtgacagaaccaatctcaggaggctttgtttggttaataaaatctactgaatggtttattttagctt

SEQ ID NO: 50782 - DNA, 3539 bp, Homo sapiens
gccctttcttttacgtttccgacaaaacagtgtctgtgggcagttagaatcttcagtttctgtgagcgtccgcttcgtctgggcacttccggtactcccattcagttccggtccctgtcttttacgtttccggcaaaacatcagtgtctgtgggtagttggaatcttcagttcctgtgagcgtcggcgtcttctgggcctgtggagtttcttggacaggggccgcggggctccaggacggcgcccttagcgacaccatggcccgaaatgcagaaaaggccatgacggccttagcaagatttcgccaggctcagctggaagagggaaaagtgaaggaacgaagaccctttctggcctcagaatgtactgaactgcctaaagctgagaagtggagacgacagatcattggagagatctctaaaaaagtggctcagattcagaatgctggtttaggtgaatttcgaattcgtgacctgaatgatgaaattaacaagctgctaagggagaaaggacactgggaggtccggataaaggagctgggaggtcctgattatggaaaagttggccctaaaatgctggatcatgaaggaaaagaagtcccaggaaaccgaggttacaagtactttggagcagcaaaagatttgcctggtgttagagagctgtttgaaaaagaactcggacgaggaaggcagccaggagaaaggaggggacgacagccagcagaagttcattgctcacgtccctgttccctcgcagcaagagattgaggaggcactggtgcgaaggaagaaaatggaactcctccagaagtatgcaagcgagaccctgcaggcccaaagtgaagaagccagaaggctcctggggtattaggacccagctggggctctccttggagttcttccatcccccagtggtacctcaggacccagggctgcagacacaggctggtgctgcaagggctcctgccccattctcagccttccttccctctccttgtctcatgttgaccggagggtaggggtctgtccctggtcttcctggtaggttttgtacacatattttgctactgtgtggatccatttatttttattgtggagtgtatacaacaggttgcgaactggctgcctgtgtcttattttgacttgcactgccattttgaggggagaagaatcaattagtggcaaacatttaaaaatgcaattttttgcagaccaaagtataattttaaaaaatgcaaattttctaaaagacacatctcttgaaaaatgagatgatgtggccaggcgcagtggctcacgcctgtaaccccagcactttgggaggccgaggcgggcgggtcacgaggtcaagagatggagaccatcctggccaacatggtgaaaccccatgtctactaaaaatacaaaaaaattagctgggcgtactggcatgcacctgtagtcccagctgcttgggaggctgaggcaggagaatcacttgaacccgagaggtggaggttgaagtgagccaagatcgtgccattgcactccagcctggcgacagagtgagactctgtcccacaaaaaaaaaaaaaaaaagatgcacgcaacccacaagtcaatgaccaggtccctctgtgttggttgctgctctgggctctccgttagcccccctccacctgctccactcgctcctgcctgggtggcaggaatttgagtttgctattcctgttttataacctgttctgcagaaacctatttttattaaagatttttataagaaagggaaacctccatgtcttcagcttgttccctgggccaacggctctgaggtgacagtggcattaggatgtgaccagtcactaaggggcactgccttcctgcaggggagtccctgaagccccagccccaagtgtggcaaagacaggaccagatcccaggagtctaggtgggagtgagccgacccaccatggcgtccgtggccacagctgtagacagggctccttgcagtgggctgcaccgtggcctgctgaaagcacacagtggacacgagctgagtccagagcttcctctgaactggggcttagctctccagtggggaaccatggtcagcggctgtagcccctgggcaagatggtgcctggcttcctgccctctgcagggtcatgggagtgtctgggaactcagggtcagggccagatggctgttcctggggcctggggctccagctcaggctgtttgggaataggaggaactcttggcttggagaagcccatcacacagcgggaggcctgggatggttggtctgcggggagcagctcagactgggggtggcagagccgtgtgtggctgtgtgtggccaagtcgggagagtggccagtgctgggccctctctaaggagcccgagggccacaaggactgtggaaaaggtctgagtgagggagtcgggagctagtggctaagggacttgcttgaggacgctccgtgcggccacaaggagaggcccaggcaggaccaggtcaggaggaggctggggcagaggccctggcaggaggtgggtgggcttggtggggatgggagtagccagggtgtaggtgaggatggggaaggggcccccctgcctcctggcttccctgagggctgggctggccaatcccagccctcagtcaagcccggaggcaaatgtgtgcagggaggagaggtgtccaggttgaagctttgggagcccttggaggcagcaaggcagactcgcctctgggacccagcacccagcttgggcctgcaggtggggactcaggagtgaatatcgtgggggctttgagcaagaccctctgggcccagcctcaccttccatactttgaagtcaaggagtggacctgtgctgtctcagtttgctctggggtctgggcagtcctgtggtttgggcagaggcctcagagggccctagggacagactgacccaggtctgagcctcttgggagcgtgcggatggccggcctcagacaggcctggttgtgggtttgtcttccaaggggcacacgcgcactctggtgcttcctggcattcagaagagaatggggaatccagacatcaggccttccttctccctgggaaggatggcaggtgcttggagccaggcctgtcttgagagccagggctctgggtcttcctcctccagtgccctgttccacgccttcagtgcacaaagcactcccctcctgggatctcttcagggatccccgggatgcaaactggccagggattagaattccacatttgagcaaacagactgagagtggagaagcacccagctggacatcctctaggtgttcctggcagaggcccttgctacttgtctgtgcccaaaggccctagagggtcctagatgtgggacaaggtctcagcagggctccagtcccaggcctggaaacagctgggggtgggggaagctggctgggtgggtgtggttatcttttcccagcttgtggctccgaggtgacagaaccaatctcaggaggctttgtttggttaataaaatctactgaatggtttattttagctt

SEQ ID NO: 50783 - DNA, 2751 bp, Homo sapiens
cggacgcgtgggtcgacccacgcgtccggcgagaccctgcaggcccaaagtgaagaagccagaaggctcctggggtattaggacccagctggggctctccttggagttcttccatcccccagtggtacctcaggacccagggctgcagacacaggctggtgctgcaagggctcctgccccattctcagccttccttccctctccttgtctcatgttgaccggagggtaggggtctgtccctggtcttcctggtaggttttgtacacatattttgctactgtgtggatccatttatttttattgtggagtgtatacaacaggttgcgaactggctgcctgtgtcttattttgacttgcactgccattttgaggggagaagaatcaattagtggcaaacatttaaaaatgcaattttttgcagaccaaagtataattttaaaaaatgcaaattttctaaaagacacatctcttgaaaaatgagatgatgtggccaggcgcagtggctcacgcctgtaaccccagcactttgggaggccgaggcgggcgggtcacgaggtcaagagatggagaccatcctggccaacatggtgaaaccccatgtctactaaaaatacaaaaaaattagctgggcgtactggcatgcacctgtagtcccagctgcttgggaggctgaggcaggagaatcacttgaacccgagaggtggaggttgaagtgagccaagatcgtgccattgcactccagcctggcgacagagtgagactctgtcccacaaaaaaaaaaaaaaaaagatgcacgcaacccacaagtcaatgaccaggtccctctgtgttggttgctgctctgggctctccgttagcccccctccacctgctccactcgctcctgcctgggtggcaggaatttgagtttgctattcctgttttataacctgttctgcagaaacctatttttattaaagatttttataagaaagggaaacctccatgtcttcagcttgttccctgggccaacggctctgaggtgacagtggcattaggatgtgaccagtcactaaggggcactgccttcctgcaggggagtccctgaagccccagccccaagtgtggcaaagacaggaccagatcccaggagtctaggtgggagtgagccgacccaccatggcgtccgtggccacagctgtagacagggctccttgcagtgggctgcaccgtggcctgctgaaagcacacagtggacacgagctgagtccagagcttcctctgaactggggcttagctctccagtggggaaccatggtcagcggctgtagcccctgggcaagatggtgcctggcttcctgccctctgcagggtcatgggagtgtctgggaactcagggtcagggccagatggctgttcctggggcctggggctccagctcaggctgtttgggaataggaggaactcttggcttggagaagcccatcacacagcgggaggcctgggatggttggtctgcggggagcagctcagactgggggtggcagagccgtgtgtggctgtgtgtggccaagtcgggagagtggccagtgctgggccctctctaaggagcccgagggccacaaggactgtggaaaaggtctgagtgagggagtcgggagctagtggctaagggacttgcttgaggacgctccgtgcggccacaaggagaggcccaggcaggaccaggtcaggaggaggctggggcagaggccctggcaggaggtgggtgggcttggtggggatgggagtagccagggtgtaggtgaggatggggaaggggcccccctgcctcctggcttccctgagggctgggctggccaatcccagccctcagtcaagcccggaggcaaatgtgtgcagggaggagaggtgtccaggttgaagctttgggagcccttggaggcagcaaggcagactcgcctctgggacccagcacccagcttgggcctgcaggtggggactcaggagtgaatatcgtgggggctttgagcaagaccctctgggcccagcctcaccttccatactttgaagtcaaggagtggacctgtgctgtctcagtttgctctggggtctgggcagtcctgtggtttgggcagaggcctcagagggccctagggacagactgacccaggtctgagcctcttgggagcgtgcggatggccggcctcagacaggcctggttgtgggtttgtcttccaaggggcacacgcgcactctggtgcttcctggcattcagaagagaatggggaatccagacatcaggccttccttctccctgggaaggatggcaggtgcttggagccaggcctgtcttgagagccagggctctgggtcttcctcctccagtgccctgttccacgccttcagtgcacaaagcactcccctcctgggatctcttcagggatccccgggatgcaaactggccagggattagaattccacatttgagcaaacagactgagagtggagaagcacccagctggacatcctctaggtgttcctggcagaggcccttgctacttgtctgtgcccaaaggccctagagggtcctagatgtgggacaaggtctcagcagggctccagtcccaggcctggaaacagctgggggtgggggaagctggctgggtgggtgtggttatcttttcccagcttgtggctccgaggtgacagaaccaatctcaggaggctttgtttggttaataaaatctactgaatggtttattttagctt

SEQ ID NO: 50784 - DNA, 2764 bp, Homo sapiens
gccctttcttttacgtttccgacaaaacagtgtctgtgggcagttagaatcttcagtttctgtgagcgtccgcttcgtctgggcacttccggtactcccattcagttccggtccctgtcttttacgtttccggcaaaacatcagtgtctgtgggtagttggaatcttcagttcctgtgagcgtcggcgtcttctgggcctgtggagtttcttggacaggggccgcggggctccaggacggcgcccttagcgacaccatggcccgaaatgcagaaaaggccatgacggccttagcaagatttcgccaggctcagctggaagagggaaaagtgaaggaacgaagaccctttctggcctcagaatgtactgaactgcctaaagctgagaagtggagacgacagatcattggagagatctctaaaaaagtggctcagattcagaatgctggtttaggtgaatttcgaattcgtgacctgaatgatgaaattaacaagctgctaagggagaaaggacactgggaggtccggataaaggagctgggaggtcctgattatggaaaagttggccctaaaatgctggatcatgaaggaaaagaagtcccaggaaaccccatgtctactaaaaatacaaaaaaattagctgggcgtactggcatgcacctgtagtcccagctgcttgggaggctgaggcaggagaatcacttgaacccgagaggtggaggttgaagtgagccaagatcgtgccattgcactccagcctggcgacagagtgagactctgtcccacaaaaaaaaaaaaaaaaagatgcacgcaacccacaagtcaatgaccaggtccctctgtgttggttgctgctctgggctctccgttagcccccctccacctgctccactcgctcctgcctgggtggcaggaatttgagtttgctattcctgttttataacctgttctgcagaaacctatttttattaaagatttttataagaaagggaaacctccatgtcttcagcttgttccctgggccaacggctctgaggtgacagtggcattaggatgtgaccagtcactaaggggcactgccttcctgcaggggagtccctgaagccccagccccaagtgtggcaaagacaggaccagatcccaggagtctaggtgggagtgagccgacccaccatggcgtccgtggccacagctgtagacagggctccttgcagtgggctgcaccgtggcctgctgaaagcacacagtggacacgagctgagtccagagcttcctctgaactggggcttagctctccagtggggaaccatggtcagcggctgtagcccctgggcaagatggtgcctggcttcctgccctctgcagggtcatgggagtgtctgggaactcagggtcagggccagatggctgttcctggggcctggggctccagctcaggctgtttgggaataggaggaactcttggcttggagaagcccatcacacagcgggaggcctgggatggttggtctgcggggagcagctcagactgggggtggcagagccgtgtgtggctgtgtgtggccaagtcgggagagtggccagtgctgggccctctctaaggagcccgagggccacaaggactgtggaaaaggtctgagtgagggagtcgggagctagtggctaagggacttgcttgaggacgctccgtgcggccacaaggagaggcccaggcaggaccaggtcaggaggaggctggggcagaggccctggcaggaggtgggtgggcttggtggggatgggagtagccagggtgtaggtgaggatggggaaggggcccccctgcctcctggcttccctgagggctgggctggccaatcccagccctcagtcaagcccggaggcaaatgtgtgcagggaggagaggtgtccaggttgaagctttgggagcccttggaggcagcaaggcagactcgcctctgggacccagcacccagcttgggcctgcaggtggggactcaggagtgaatatcgtgggggctttgagcaagaccctctgggcccagcctcaccttccatactttgaagtcaaggagtggacctgtgctgtctcagtttgctctggggtctgggcagtcctgtggtttgggcagaggcctcagagggccctagggacagactgacccaggtctgagcctcttgggagcgtgcggatggccggcctcagacaggcctggttgtgggtttgtcttccaaggggcacacgcgcactctggtgcttcctggcattcagaagagaatggggaatccagacatcaggccttccttctccctgggaaggatggcaggtgcttggagccaggcctgtcttgagagccagggctctgggtcttcctcctccagtgccctgttccacgccttcagtgcacaaagcactcccctcctgggatctcttcagggatccccgggatgcaaactggccagggattagaattccacatttgagcaaacagactgagagtggagaagcacccagctggacatcctctaggtgttcctggcagaggcccttgctacttgtctgtgcccaaaggccctagagggtcctagatgtgggacaaggtctcagcagggctccagtcccaggcctggaaacagctgggggtgggggaagctggctgggtgggtgtggttatcttttcccagcttgtggctccgaggtgacagaaccaatctcaggaggctttgtttggttaataaaatctactgaatggtttattttagctt

SEQ ID NO: 50785 - DNA, 4472 bp, Homo sapiens
  misc_feature (1479)..(1479): n is a, c, g, or t
  misc_feature (3296)..(3297): n is a, c, g, or t
cacggagctgaggaccggccggagctttgcggagggcccggcttggcgggtccgggggggagccgaacccgcggggcaccgggtccgggcggggccgagccgggccggggcgggagccagccggggtggggcggggccgaggccgaggcaggcggtcggcagtgctgggggttcaggtgttgcggcggctccacgtagccaggcggcccgtgggctggagcgggcggagctcggcccgcggcttgcgtgagctcaggccggtcccagcgtccagagcgccggcccttcggcttcttctaggccatggcagggccgggcccaggcccgggggacccggacgagcagtacgatttcctgttcaagctggtgctggtgggcgacgcaagcgtgggcaagacgtgcgtggtgcagcgcttcaagaccggcgccttctcggagcgccagggaagcaccatcggcgtcgacttcaccatgaagacgctggagatccaggcaagcgggtcactgcagatctgggacacggccggccaggagcggttccgcaccatcacccagagctactaccgcagtgccaatggggccatccttgcctacgacatcaccaagaggagctccttcctgtcggtgcctcactggattgaggatgtgaggaagtatgcgggctccaacattgtgcagctgctgattcgggaacaagtcagacctcagcgagcttcgggaggtctccttggctgaggcacagagcctggctgagcactatgacatcctgtgtgccattgagacgtctgccaaggactcgagcaacgtggaggaggccttcctgagggtggccacggagctcatcatgcggcacgggggccccttgttcagcgagaagagccccgaccacatccagctgaacagcaaggacatcggagaaggctggggctgcgggtgctgaccaggggccgggccggcagactgggggttccccacctccttgctctccccagcctgccaagcccagccctccagagccagccctcctgggtaccggcaactacagcagccgggtgaagctctggagctctgcatcctgtggcctggctgcgggatggaggctctccttgaggaaggggaagcaggataccctggcgggccaccctgccagccagcagctggccctccaccatcttcacattccaagactggcctgaacccgccggtgtgggccacagtgggaggggccagcagtcctccctgtcccatgcctgctggctctgaccgtttcctctcatgggtttgctttacctgtggcagcaggttgctgctttccagggatgtgtccagtgccctgggttcttcccggtcatcctggggctctgcacagagcagcagagctagagccatgagacccacagacttggtgcctgagcgcagctccagggaagccccagccccttccaggcggggaacctgcttcctgccttcactgccccngcagcactcacagacatctccctggggtctggctcactgccttatcaggacctctgagttttctgactttctgtgtagcttctcattttcatcagcacagcatggggtcacggcccacagctaggtggggtcacggcccacagctaggtggggactgtctgctggctcagggcccagtgttttgccactcaggttgcaaaattagctaatccttcagtgccagcactcagaagtctggcaggtgggggaatgagatgagaaagtggacatttaaggtccaagtagaagcttgcatccttgaggctcagggatgagagggcaccgcaaggcacccagccttaccccacaagcaggaatcctgccagccgagcgtgggtcccagtctatggaatcgagtctcccagacaaaaaaggagaggccctggcggtccttggcctggcccattttattccctggacccttaactgcctcaccctgagctgggcaccaaagttagaaggcaaaagtggggtagggggatgtgggaagcagcattgtcctctgggcatgtggctcagaggtatcacagtgacaaaagagccagggctagggctggaggggccaggtgatcttccttagccaatcccagtccgtctgtgtcagcccagctctgcctcgcagccccctcagcatgggtgcccccagaagtaagcagctcttggacccacgagcagggctgcgtcggtttgtggtctagctcccagggccaggccaggcatggctcagtgcagtccctgggccagtgagaggcctcccccatgcctccctgccctctgcactaagcactttccaggcaggcctggccatagggcaagagcaggccttacagcagtgccacggtgacccaagaggcagggttggggcctggacaggggttcctctgctgagactgagacaagcagggcttgatgctggtggtggagccagcatctcacctgccaggcttccttttgggcagggaggctacctgtggaatggctgagcctggttctgcaggggaggaaggctgccaggagctgaggggctggcacctgcattgaggggagtctgggtgcatcagattggggggcgccagaggcgaggctgcctggctccctttctcagcagctttgcttgtggcaggggtgagagtggagctgagtggggtctgggctctgcccctgcgcctccactgcagtgcctgggctccccttgcagggcagacagtgcctggcactgaggggtgcccccagaccccgctgggactggatgtgccgtgggcagtgccttcctccagcctcacaacctttctgctggggctgaagtttctggggtcacatggtcagaaggggctgagctggtctttcactgcaggcccactctgaaagagaaatcccatgaagcctgtccttgcagagcccctctgtttttgggggaacagggagcattcacagggtcttgggaacaaaggcctgggcctccccgtttgaatttcagccccagttccagggcaagtcccagccacccaagcatacttaccagtactgcccaccaccacccactgcccacctctaagaagcccggctctcctactctgcttccaggctggggcctcacaggtggggctgttaccttcctcagggcttagggagggagggaggacatggacagggccttccaccctggctccttcacagggatggtagctgaccggtgatgggttcatttgtcaccttggactgtgagccacttccacttctcgccccccaggcaggagcaccctcactccaagggcttnncctggaaaggcaggctcacctgggactcaacgttccttcccccgccgccactgtgcccccccgtccctccaccccagaagccctgacctcatttgggcaccttgctgtcctctgggcttctcctctgcccaggtcaccctgtggcaggcctgggccctcaggatgtttcaaaggctccacagctccaccgctccacctggcttcactccagcaccctgtccctggagcacctctgtcctgtctgggccaacctggtctccctgccccatgccctcccctggctcttagcaacctgcccttttattcatgccatttggggtcacagatgcctagctggacacagctcccagaactggctccaccctggggccttgcccctagtaccccctggcaggagcaacccaccccatggtcgaggttcccctacccctggatcctggactgaagccatttcctacagagaagcgttcccaccccctctcaggcacaaaagccggtgtccagggactcaagacctgtacctggggttgcaggggctcctgccctgctgtatcccaccaggagggggccccactgcccttccggcccttaaaactgggctgggagagaagacggggaagtgtgtgagacaaaacaaagccggcttgtttcctccccttggcaggctaagctctcccggcagcccgggctctggggcggaaggagaacagtgtcatctcttcctttgttgataaattgccaaagagtgggaacaggtggggtcaggggccagagtgcaggggagggggcaatggtggaggtggcggggggaagcagagggaggtgggctgaggcctcggtggggccagtgcgacgctggcttaaggagctggaggggttcctaatacacatttaattcagtttctcttccctaagaggctgccggagttggggcctcctccagcagagaccctcggacccctgcagggcctggacttggggtgaacagggcttcagtcagcgcaagtattccatttgcatttggtaatttttcatgccacctatttatgaatatataaatctttataccaaatctattttttaaaacatggaaaagttgcctttatggaaacttggcagagccagagtgtacacattcctaaaccattaaacagatttctataacaaaaaactgc

SEQ ID NO: 50786 - DNA, 602 bp, Homo sapiens
tatggctttttttacttaatcttgtgggtcaagtgtctttctataagtatagaactttcttagtttttttttcttttaaatagttgcagagtagtgtgttttatagagttgccagcatttatctagctgggcgcctactgatggactttcgtttgttctgtttgtagtcggacgaggaaggcagccaggagaaaggaggggacgacagccagcagaagttcattgctcacgtccctgttccctcgcagcaagaggtaggaccacagctaagagctgcctgggcgccgggggcttctctaaagcagacttcacagagcactgtagtgggttttcgttgtccttcctacccatccgggcagctcagggtcctgaccacatgacacctgtcattgtgttcagggtgtggggtccaaaaagggcaggaccctctgctctaggccattctatcgttcaaatgtttccaatgggagggagttaggactcttggagactattctgcgtatttaaatcagactccttgatggacttctcccacggggacttcctcctggctgggtctggcaggggttgaggggctttgctgaggagtgagccctgcactc

SEQ ID NO: 50787 - DNA, 2875 bp, Homo sapiens
gccctttcttttacgtttccgacaaaacagtgtctgtgggcagttagaatcttcagtttctgtgagcgtccgcttcgtctgggcacttccggtactcccattcagttccggtccctgtcttttacgtttccggcaaaacatcagtgtctgtgggtagttggaatcttcagttcctgtgagcgtcggcgtcttctgggcctgtggagtttcttggacaggggccgcggggctccaggacggcgcccttagcgacaccatggcccgaaatgcagaaaaggccatgacggccttagcaagatttcgccaggctcagctggaagagggaaaagtgaaggaacgaagaccctttctggcctcagaatgtactgaactgcctaaagctgagaagtggagacgacagatcattggagagatctctaaaaaagtggctcagattcagaatgctggtttaggtgaatttcgaattcgtgacctgaatgatgaaattaacaagctgctaagggagaaaggacactgggaggtccggataaaggagctgggaggtcctgattatggaaaagttggccctaaaatgctggatcatgaaggaaaagaagtcccaggaaaccgaggttacaagtactttggagcagcaaaagatttgcctggtgttagagagctgtttgaaaaagaacctcttcctcctcccagaaagacacgtgctgagctcatgaaggcaatcgattttgagtactatggttacctagatgaagatgatggtgttattgtgcctttggaacaggaatatgaaaagaaactcagagccgagttagtggaaaagtggaaagcagagagagaggctcggctggcaagaggagaaaaggaagaggaggaggaagaggaggaagagatcaacatctatgcagtcaccgaggaggagtcggacgaggaaggcagccaggagaaaggaggggacgacagccagcagaagttcattgctcacgtccctgttccctcgcagcaagagattgaggaggcactggtgcgaaggaagaaaatggaactcctccagaagtatgcaagcgagaccctgcaggcccaaagtgaagaagccagaaggctcctggggtattaggacccagctggggctctccttggagttcttccatcccccagtggtacctcaggacccagggctgcagacacaggctggtgctgcaagggctcctgccccattctcagccttccttccctctccttgtctcatgttgaccggagggtaggggtctgtccctggtcttcctggtaggttttgtacacatattttgctactgtgtggatccatttatttttattgtggagtgtatacaacaggttgcgaactggctgcctgtgtcttattttgacttgcactgccattttgaggggagaagaatcaattagtggcaaacatttaaaaatgcaattttttgcagaccaaagtataattttaaaaaatgcaaattttctaaaagacacatctcttgaaaaatgagatgatgtggccaggcgcagtggctcacgcctgtaaccccagcactttgggaggccgaggcgggcgggtcacgaggtcaagagatggagaccatcctggccaacatggtgaaaccccatgtctactaaaaatacaaaaaaattagctgggcgtactggcatgcacctgtagtcccagctgcttgggaggctgaggcaggagaatcacttgaacccgagaggtggaggttgaagtgagccaagatcgtgccattgcactccagcctggcgacagagtgagactctgtcccacaaaaaaaaaaagtagtagccgtttctgtgagaaggcccgaaatgcagaaataggccatgacggcctttagctatgatttcgccaggctcagctggaatgagggaaaagtgacaggaacgaagacccttttctggcctcagaattgtactgaacttgccttaaagctgagaagtggagacgacagatcatgggagagatctctaaaaaagtggctcagatttcagaatgctggtttaggtgaatttcgaatttcgtgacctgaattgatgaaattaacaagctgctaagggagaaaggacactgggaggtccggataaaggagctgggaggtcctgattatggaaacagttggccctaaaatgctggatcatgaaggaaaagaagtcccaggaaaccgaggttacaagtactttggagcagcaaaacgatttgcctggtgttagagagctgtttgaaaaagaacctcttcctcctcccagaaaagacacgtgctgagctcatgaaggcaatcgatttggagtactatggttacctagattgacgatgatggcgtactggtgccttgggaaccggcactttgcccagaaacctcagagccgagtagggggcaaaggggaaaagcagagcacgagagggctccggtggcaggaggcagaaagggcacgacggaggaggaacagggaggacagagattcacttctatggcgtcaccggagggagaagtcggactacgaagggcagcacgtagcacacggagggcacacaaggccccacagaggttcttggccacccgtcccggtaccctcgcacaagaaaatttgaggacagcacttggtgccgaagggacacaaacgggggacgcctcccgaaatttttctactgcaaccccagtgggccaaaaggtagataaactccacgagtgctcggggatatataaagccccaagaggggggcacattgagaattatctacagccaggagtatacaaagaacacgagatgaataacagatgttggatgagcgacactcacactagacacacggacgcacttctcatatgcagagaaaggt

SEQ ID NO: 50788 - DNA, 5075 bp, Homo sapiens
  misc_feature (2082)..(2082): n is a, c, g, or t
  misc_feature (3899)..(3900): n is a, c, g, or t
gccctttcttttacgtttccgacaaaacagtgtctgtgggcagttagaatcttcagtttctgtgagcgtccgcttcgtctgggcacttccggtactcccattcagttccggtccctgtcttttacgtttccggcaaaacatcagtgtctgtgggtagttggaatcttcagttcctgtgagcgtcggcgtcttctgggcctgtggagtttcttggacaggggccgcggggctccaggacggcgcccttagcgacaccatggcccgaaatgcagaaaaggccatgacggccttagcaagatttcgccaggctcagctggaagagggaaaagtgaaggaacgaagaccctttctggcctcagaatgtactgaactgcctaaagctgagaagtggagacgacagatcattggagagatctctaaaaaagtggctcagattcagaatgctggtttaggtgaatttcgaattcgtgacctgaatgatgaaattaacaagctgctaagggagaaaggacactgggaggtccggataaaggagctgggaggtcctgattatggaaaagttggccctaaaatgctggatcatgaaggaaaagaagtcccaggaaaccgaggttacaagtactttggagcagcaaaagatttgcctggtgttagagagctgtttgaaaaagaacctcttcctcctcccagaaagacacgtgctgagctcatgaaggcaatcgattttgagtactatggttacctagatgaagatgatggtgttattgtgcctttggaacaggaatatgaaaagaaactcagagccgagttagtggaaaagtggaaagcagagagagaggctcggctggcaagaggagaaaaggaagaggaggaggaagaggaggaagagatcaacatctatgcagtcaccgaggaggagtcggacgaggaaggcagccaggagaaaggaggggacgacagccagcagaagttcattgctcacgtccctgttccctcgcagcaagagattgaggaggcactggtgcgaaggaagaaaatggaactcctccagaagtatgcaagcgagaccctgcaggcccaaagtgaagaagccagaaggctcctgggctgcagatctgggacacggccggccaggagcggttccgcaccatcacccagagctactaccgcagtgccaatggggccatccttgcctacgacatcaccaagaggagctccttcctgtcggtgcctcactggattgaggatgtgaggaagtatgcgggctccaacattgtgcagctgctgattcgggaacaagtcagacctcagcgagcttcgggaggtctccttggctgaggcacagagcctggctgagcactatgacatcctgtgtgccattgagacgtctgccaaggactcgagcaacgtggaggaggccttcctgagggtggccacggagctcatcatgcggcacgggggccccttgttcagcgagaagagccccgaccacatccagctgaacagcaaggacatcggagaaggctggggctgcgggtgctgaccaggggccgggccggcagactgggggttccccacctccttgctctccccagcctgccaagcccagccctccagagccagccctcctgggtaccggcaactacagcagccgggtgaagctctggagctctgcatcctgtggcctggctgcgggatggaggctctccttgaggaaggggaagcaggataccctggcgggccaccctgccagccagcagctggccctccaccatcttcacattccaagactggcctgaacccgccggtgtgggccacagtgggaggggccagcagtcctccctgtcccatgcctgctggctctgaccgtttcctctcatgggtttgctttacctgtggcagcaggttgctgctttccagggatgtgtccagtgccctgggttcttcccggtcatcctggggctctgcacagagcagcagagctagagccatgagacccacagacttggtgcctgagcgcagctccagggaagccccagccccttccaggcggggaacctgcttcctgccttcactgccccngcagcactcacagacatctccctggggtctggctcactgccttatcaggacctctgagttttctgactttctgtgtagcttctcattttcatcagcacagcatggggtcacggcccacagctaggtggggtcacggcccacagctaggtggggactgtctgctggctcagggcccagtgttttgccactcaggttgcaaaattagctaatccttcagtgccagcactcagaagtctggcaggtgggggaatgagatgagaaagtggacatttaaggtccaagtagaagcttgcatccttgaggctcagggatgagagggcaccgcaaggcacccagccttaccccacaagcaggaatcctgccagccgagcgtgggtcccagtctatggaatcgagtctcccagacaaaaaaggagaggccctggcggtccttggcctggcccattttattccctggacccttaactgcctcaccctgagctgggcaccaaagttagaaggcaaaagtggggtagggggatgtgggaagcagcattgtcctctgggcatgtggctcagaggtatcacagtgacaaaagagccagggctagggctggaggggccaggtgatcttccttagccaatcccagtccgtctgtgtcagcccagctctgcctcgcagccccctcagcatgggtgcccccagaagtaagcagctcttggacccacgagcagggctgcgtcggtttgtggtctagctcccagggccaggccaggcatggctcagtgcagtccctgggccagtgagaggcctcccccatgcctccctgccctctgcactaagcactttccaggcaggcctggccatagggcaagagcaggccttacagcagtgccacggtgacccaagaggcagggttggggcctggacaggggttcctctgctgagactgagacaagcagggcttgatgctggtggtggagccagcatctcacctgccaggcttccttttgggcagggaggctacctgtggaatggctgagcctggttctgcaggggaggaaggctgccaggagctgaggggctggcacctgcattgaggggagtctgggtgcatcagattggggggcgccagaggcgaggctgcctggctccctttctcagcagctttgcttgtggcaggggtgagagtggagctgagtggggtctgggctctgcccctgcgcctccactgcagtgcctgggctccccttgcagggcagacagtgcctggcactgaggggtgcccccagaccccgctgggactggatgtgccgtgggcagtgccttcctccagcctcacaacctttctgctggggctgaagtttctggggtcacatggtcagaaggggctgagctggtctttcactgcaggcccactctgaaagagaaatcccatgaagcctgtccttgcagagcccctctgtttttgggggaacagggagcattcacagggtcttgggaacaaaggcctgggcctccccgtttgaatttcagccccagttccagggcaagtcccagccacccaagcatacttaccagtactgcccaccaccacccactgcccacctctaagaagcccggctctcctactctgcttccaggctggggcctcacaggtggggctgttaccttcctcagggcttagggagggagggaggacatggacagggccttccaccctggctccttcacagggatggtagctgaccggtgatgggttcatttgtcaccttggactgtgagccacttccacttctcgccccccaggcaggagcaccctcactccaagggcttnncctggaaaggcaggctcacctgggactcaacgttccttcccccgccgccactgtgcccccccgtccctccaccccagaagccctgacctcatttgggcaccttgctgtcctctgggcttctcctctgcccaggtcaccctgtggcaggcctgggccctcaggatgtttcaaaggctccacagctccaccgctccacctggcttcactccagcaccctgtccctggagcacctctgtcctgtctgggccaacctggtctccctgccccatgccctcccctggctcttagcaacctgcccttttattcatgccatttggggtcacagatgcctagctggacacagctcccagaactggctccaccctggggccttgcccctagtaccccctggcaggagcaacccaccccatggtcgaggttcccctacccctggatcctggactgaagccatttcctacagagaagcgttcccaccccctctcaggcacaaaagccggtgtccagggactcaagacctgtacctggggttgcaggggctcctgccctgctgtatcccaccaggagggggccccactgcccttccggcccttaaaactgggctgggagagaagacggggaagtgtgtgagacaaaacaaagccggcttgtttcctccccttggcaggctaagctctcccggcagcccgggctctggggcggaaggagaacagtgtcatctcttcctttgttgataaattgccaaagagtgggaacaggtggggtcaggggccagagtgcaggggagggggcaatggtggaggtggcggggggaagcagagggaggtgggctgaggcctcggtggggccagtgcgacgctggcttaaggagctggaggggttcctaatacacatttaattcagtttctcttccctaagaggctgccggagttggggcctcctccagcagagaccctcggacccctgcagggcctggacttggggtgaacagggcttcagtcagcgcaagtattccatttgcatttggtaatttttcatgccacctatttatgaatatataaatctttataccaaatctattttttaaaacatggaaaagttgcctttatggaaacttggcagagccagagtgtacacattcctaaaccattaaacagatttctataacaaaaaactgc

SEQ ID NO: 50789 - DNA, 1552 bp, Homo sapiens
gccctttcttttacgtttccgacaaaacagtgtctgtgggcagttagaatcttcagtttctgtgagcgtccgcttcgtctgggcacttccggtactcccattcagttccggtccctgtcttttacgtttccggcaaaacatcagtgtctgtgggtagttggaatcttcagttcctgtgagcgtcggcgtcttctgggcctgtggagtttcttggacaggggccgcggggctccaggacggcgcccttagcgacaccatggcccgaaatgcagaaaaggccatgacggccttagcaagatttcgccaggctcagctggaagagggaaaagtgaaggaacgaagaccctttctggcctcagaatgtactgaactgcctaaagctgagaagtggagacgacagatcattggagagatctctaaaaaagtggctcagattcagaatgctggtttaggtgaatttcgaattcgtgacctgaatgatgaaattaacaagctgctaagggagaaaggacactgggaggtccggataaaggagctgggaggtcctgattatggaaaagttggccctaaaatgctggatcatgaaggaaaagaagtcccaggaaaccgaggttacaagtactttggagcagcaaaagatttgcctggtgttagagagctgtttgaaaaagaacctcttcctcctcccagaaagacacgtgctgagctcatgaaggcaatcgattttgagtactatggttacctagatgaagatgatggtgttattgtgcctttggaacaggaatatgaaaagaaactcagagccgagttagtggaaaagtggaaagcagagagagaggctcggctggcaagaggagaaaaggaagaggaggaggaagaggaggaagagatcaacatctatgcagtcaccgaggaggagtcggacgaggaaggcagccaggagaaaggaggggacgacagccagcagaagttcattgctcacgtccctgttccctcgcagcaagagattgaggaggcactggtgcgaaggaagaaaatggaactcctccagaagtatgcaagcgagaccctgcaggcccaaagtgaagaagccagaaggctcctggggtattaggacccagctggggctctccttggagttcttccatcccccagtggtacctcaggacccagggctgcagacacaggctggtgctgcaagggctcctgccccattctcagccttccttccctctccttgtctcatgttgaccggagggtaggggtctgtccctggtcttcctggtaggttttgtacacatattttgctactgtgtggatccatttatttttattgtggagtgtatacaacaggttgcgaactggctgcctgtgtcttattttgacttgcactgccattttgaggggagaagaatcaattagtggcaaacatttaaaaatgcaattttttgcagaccaaagtataattttaaaaaatgcaaattttctaaaagacacatctcttggatggccgggtcgtcgcttacgaggcaagaattgatacattctgcca

SEQ ID NO: 50790 - DNA, 3647 bp, Homo sapiens
tcaccataaggctaagtagcagcctagggttttaatcaggccagagcggcgtcttctgggcctgtggagtttcttggacaggggccgcggggctccaggacggcgcccttagcgacaccatggcccgaaatgcagaaaaggccatgacggccttagcaagatttcgccaggctcagctggaagagggaaaagtgaaggaacgaagaccctttctggcctcagaatgtactgaactgcctaaagctgagaagtggagacgacagatcattggagagatctctaaaaaagtggctcagattcagaatgctggtttaggtgaatttcgaattcgtgacctgaatgatgaaattaacaagctgctaagggagaaaggacactgggaggtccggataaaggagctgggaggtcctgattatggaaaagttggccctaaaatgctggatcatgaaggaaaagaagtcccaggaaaccgaggttacaagtactttggagcagcaaaagatttgcctggtgttagagagctgtttgaaaaagaacctcttcctcctcccagaaagacacgtgctgagctcatgaaggcaatcgattttgagtactatggttacctagatgaagatgatggtgttattgtgcctttggaacaggaatatgaaaagaaactcagagccgagttagtggaaaagtggaaagcagagagagaggctcggctggcaagaggagaaaaggaagaggaggaggaagaggaggaagagatcaacatctatgcagtcaccgaggaggagtcggacgaggaaggcagccaggagaaaggaggggacgacagccagcagaagttcattgctcacgtccctgttccctcgcagcaagagattgaggaggcactggtgcgaaggaagaaaatggaactcctccagaagtatgcaagcgagaccctgcaggcccaaagtgaagaagccagaaggctcctggggtattaggacccagctggggctctccttggagttcttccatcccccagtggtacctcaggacccagggctgcagacacaggctggtgctgcaagggctcctgccccattctcagccttccttccctctccttgtctcatgttgaccggagggtaggggtctgtccctggtcttcctggtaggttttgtacacatattttgctactgtgtggatccatttatttttattgtggagtgtatacaacaggttgcgaactggctgcctgtgtcttattttgacttgcactgccattttgaggggagaagaatcaattagtggcaaacatttaaaaatgcaattttttgcagaccaaagtataattttaaaaaatgcaaattttctaaaagacacatctcttgaaaaatgagatgatgtggccaggcgcagtggctcacgcctgtaaccccagcactttgggaggccgaggcgggcgggtcacgaggtcaagagatggagaccatcctggccaacatggtgaaaccccatgtctactaaaaatacaaaaaaattagctgggcgtactggcatgcacctgtagtcccagctgcttgggaggctgaggcaggagaatcacttgaacccgagaggtggaggttgaagtgagccaagatcgtgccattgcactccagcctggcgacagagtgagactctgtcccacaaaaaaaaaaaaaaaaagatgcacgcaacccacaagtcaatgaccaggtccctctgtgttggttgctgctctgggctctccgttagcccccctccacctgctccactcgctcctgcctgggtggcaggaatttgagtttgctattcctgttttataacctgttctgcagaaacctatttttattaaagatttttataagaaagggaaacctccatgtcttcagcttgttccctgggccaacggctctgaggtgacagtggcattaggatgtgaccagtcactaaggggcactgccttcctgcaggggagtccctgaagccccagccccaagtgtggcaaagacaggaccagatcccaggagtctaggtgggagtgagccgacccaccatggcgtccgtggccacagctgtagacagggctccttgcagtgggctgcaccgtggcctgctgaaagcacacagtggacacgagctgagtccagagcttcctctgaactggggcttagctctccagtggggaaccatggtcagcggctgtagcccctgggcaagatggtgcctggcttcctgccctctgcagggtcatgggagtgtctgggaactcagggtcagggccagatggctgttcctggggcctggggctccagctcaggctgtttgggaataggaggaactcttggcttggagaagcccatcacacagcgggaggcctgggatggttggtctgcggggagcagctcagactgggggtggcagagccgtgtgtggctgtgtgtggccaagtcgggagagtggccagtgctgggccctctctaaggagcccgagggccacaaggactgtggaaaaggtctgagtgagggagtcgggagctagtggctaagggacttgcttgaggacgctccgtgcggccacaaggagaggcccaggcaggaccaggtcaggaggaggctggggcagaggccctggcaggaggtgggtgggcttggtggggatgggagtagccagggtgtaggtgaggatggggaaggggcccccctgcctcctggcttccctgagggctgggctggccaatcccagccctcagtcaagcccggaggcaaatgtgtgcagggaggagaggtgtccaggttgaagctttgggagcccttggaggcagcaaggcagactcgcctctgggacccagcacccagcttgggcctgcaggtggggactcaggagtgaatatcgtgggggctttgagcaagaccctctgggcccagcctcaccttccatactttgaagtcaaggagtggacctgtgctgtctcagtttgctctggggtctgggcagtcctgtggtttgggcagaggcctcagagggccctagggacagactgacccaggtctgagcctcttgggagcgtgcggatggccggcctcagacaggcctggttgtgggtttgtcttccaaggggcacacgcgcactctggtgcttcctggcattcagaagagaatggggaatccagacatcaggccttccttctccctgggaaggatggcaggtgcttggagccaggcctgtcttgagagccagggctctgggtcttcctcctccagtgccctgttccacgccttcagtgcacaaagcactcccctcctgggatctcttcagggatccccgggatgcaaactggccagggattagaattccacatttgagcaaacagactgagagtggagaagcacccagctggacatcctctaggtgttcctggcagaggcccttgctacttgtctgtgcccaaaggccctagagggtcctagatgtgggacaaggtctcagcagggctccagtcccaggcctggaaacagctgggggtgggggaagctggctgggtgggtgtggttatcttttcccagcttgtggctccgaggtgacagaaccaatctcaggaggctttgtttggttaataaaatctactgaatggtttattttagctt

SEQ ID NO: 50791 - DNA, 4577 bp, Homo sapiens
  misc_feature (2082)..(2082): n is a, c, g, or t
  misc_feature (3899)..(3900): n is a, c, g, or t
gccctttcttttacgtttccgacaaaacagtgtctgtgggcagttagaatcttcagtttctgtgagcgtccgcttcgtctgggcacttccggtactcccattcagttccggtccctgtcttttacgtttccggcaaaacatcagtgtctgtgggtagttggaatcttcagttcctgtgagcgtcggcgtcttctgggcctgtggagtttcttggacaggggccgcggggctccaggacggcgcccttagcgacaccatggcccgaaatgcagaaaaggccatgacggccttagcaagatttcgccaggctcagctggaagagggaaaagtgaaggaacgaagaccctttctggcctcagaatgtactgaactgcctaaagctgagaagtggagacgacagatcattggagagatctctaaaaaagtggctcagattcagaatgctggtttaggtgaatttcgaattcgtgacctgaatgatgaaattaacaagctgctaagggagaaaggacactgggaggtccggataaaggagctgggaggtcctgattatggaaaagttggccctaaaatgctggatcatgaaggaaaagaagtcccaggaaaccgaggttacaagtactttggagcagcaaaagatttgcctggtgttagagagctgtttgaaaaagaacctcttcctcctcccagaaagacacgtgctgagctcatgaaggcaatcgattttgagtactatggttacctagatgaagatgatggtgttattgtgcctttggaacaggaatatgaaaagaaactcagagccgagttagtggaaaagtggaaagcagagagagaggctcggctggcaagaggagaaaaggaagaggaggaggaagaggaggaagagatcaacatctatgcagtcaccgaggaggagtcggacgaggaaggcagccaggagaaaggaggggacgacagccagcagaagttcattgctcacgtccctgttccctcgcagcaagagattgaggaggcactggtgcgaaggaagaaaatggaactcctccagaagtatgcaagcgagaccctgcaggcccaaagtgaagaagccagaaggctcctgggctgcagatctgggacacggccggccaggagcggttccgcaccatcacccagagctactaccgcagtgccaatggggccatccttgcctacgacatcaccaagaggagctccttcctgtcggtgcctcactggattgaggatgtgaggaagtatgcgggctccaacattgtgcagctgctgattcgggaacaagtcagacctcagcgagcttcgggaggtctccttggctgaggcacagagcctggctgagcactatgacatcctgtgtgccattgagacgtctgccaaggactcgagcaacgtggaggaggccttcctgagggtggccacggagctcatcatgcggcacgggggccccttgttcagcgagaagagccccgaccacatccagctgaacagcaaggacatcggagaaggctggggctgcgggtgctgaccaggggccgggccggcagactgggggttccccacctccttgctctccccagcctgccaagcccagccctccagagccagccctcctgggtaccggcaactacagcagccgggtgaagctctggagctctgcatcctgtggcctggctgcgggatggaggctctccttgaggaaggggaagcaggataccctggcgggccaccctgccagccagcagctggccctccaccatcttcacattccaagactggcctgaacccgccggtgtgggccacagtgggaggggccagcagtcctccctgtcccatgcctgctggctctgaccgtttcctctcatgggtttgctttacctgtggcagcaggttgctgctttccagggatgtgtccagtgccctgggttcttcccggtcatcctggggctctgcacagagcagcagagctagagccatgagacccacagacttggtgcctgagcgcagctccagggaagccccagccccttccaggcggggaacctgcttcctgccttcactgccccngcagcactcacagacatctccctggggtctggctcactgccttatcaggacctctgagttttctgactttctgtgtagcttctcattttcatcagcacagcatggggtcacggcccacagctaggtggggtcacggcccacagctaggtggggactgtctgctggctcagggcccagtgttttgccactcaggttgcaaaattagctaatccttcagtgccagcactcagaagtctggcaggtgggggaatgagatgagaaagtggacatttaaggtccaagtagaagcttgcatccttgaggctcagggatgagagggcaccgcaaggcacccagccttaccccacaagcaggaatcctgccagccgagcgtgggtcccagtctatggaatcgagtctcccagacaaaaaaggagaggccctggcggtccttggcctggcccattttattccctggacccttaactgcctcaccctgagctgggcaccaaagttagaaggcaaaagtggggtagggggatgtgggaagcagcattgtcctctgggcatgtggctcagaggtatcacagtgacaaaagagccagggctagggctggaggggccaggtgatcttccttagccaatcccagtccgtctgtgtcagcccagctctgcctcgcagccccctcagcatgggtgcccccagaagtaagcagctcttggacccacgagcagggctgcgtcggtttgtggtctagctcccagggccaggccaggcatggctcagtgcagtccctgggccagtgagaggcctcccccatgcctccctgccctctgcactaagcactttccaggcaggcctggccatagggcaagagcaggccttacagcagtgccacggtgacccaagaggcagggttggggcctggacaggggttcctctgctgagactgagacaagcagggcttgatgctggtggtggagccagcatctcacctgccaggcttccttttgggcagggaggctacctgtggaatggctgagcctggttctgcaggggaggaaggctgccaggagctgaggggctggcacctgcattgaggggagtctgggtgcatcagattggggggcgccagaggcgaggctgcctggctccctttctcagcagctttgcttgtggcaggggtgagagtggagctgagtggggtctgggctctgcccctgcgcctccactgcagtgcctgggctccccttgcagggcagacagtgcctggcactgaggggtgcccccagaccccgctgggactggatgtgccgtgggcagtgccttcctccagcctcacaacctttctgctggggctgaagtttctggggtcacatggtcagaaggggctgagctggtctttcactgcaggcccactctgaaagagaaatcccatgaagcctgtccttgcagagcccctctgtttttgggggaacagggagcattcacagggtcttgggaacaaaggcctgggcctccccgtttgaatttcagccccagttccagggcaagtcccagccacccaagcatacttaccagtactgcccaccaccacccactgcccacctctaagaagcccggctctcctactctgcttccaggctggggcctcacaggtggggctgttaccttcctcagggcttagggagggagggaggacatggacagggccttccaccctggctccttcacagggatggtagctgaccggtgatgggttcatttgtcaccttggactgtgagccacttccacttctcgccccccaggcaggagcaccctcactccaagggcttnncctggaaaggcaggctcacctgggactcaacgttccttcccccgccgccactgtgcccccccgtccctccaccccagaagccctgacctcatttgggcaccttgctgtcctctgggcttctcctctgcccaggtcaccctgtggcaggcctgggccctcaggatgtttcaaaggctccacagctccaccgctccacctggcttcactccagcaccctgtccctggagcacctctgtcctgtctgggccaacctggtctccctgccccatgccctcccctggctcttagcaacctgcccttttattcatgccatttggggtcacagatgcctagctggacacagctcccagtgcgacgctggcttaaggagctggaggggttcctaatacacatttaattcagtttctcttccctaagaggctgccggagttggggcctcctccagcagagaccctcggacccctgcagggcctggacttggggtgaacagggcttcagtcagcgcaagtattccatttgcatttggtaatttttcatgccacctatttatgaatatataaatctttataccaaatctattttttaaaacatggaaaagttgcctttatggaaacttggcagagccagagtgtacacattcctaaaccattaaacagatttctataacaaaaaactgc

SEQ ID NO: 50792 - DNA, 3850 bp, Homo sapiens
gccctttcttttacgtttccgacaaaacagtgtctgtgggcagttagaatcttcagtttctgtgagcgtccgcttcgtctgggcacttccggtactcccattcagttccggtccctgtcttttacgtttccggcaaaacatcagtgtctgtgggtagttggaatcttcagttcctgtgagcgtcggcgtcttctgggcctgtggagtttcttggacaggggccgcggggctccaggacggcgcccttagcgacaccatggcccgaaatgcagaaaaggccatgacggccttagcaagatttcgccaggctcagctggaagagggaaaagtgaaggaacgaagaccctttctggcctcagaatgtactgaactgcctaaagctgagaagtggagacgacagatcattggagagatctctaaaaaagtggctcagattcagaatgctggtttaggtgaatttcgaattcgtgacctgaatgatgaaattaacaagctgctaagggagaaaggacactgggaggtccggataaaggagctgggaggtcctgattatggaaaagttggccctaaaatgctggatcatgaaggaaaagaagtcccaggaaaccgaggttacaagtactttggagcagcaaaagatttgcctggtgttagagagctgtttgaaaaagaacgccaggtgcggtggctcatgcctgtaatcccagcactttgggaggctgaggcgggcggatcacaagctcttcctcctcccagaaagacacgtgctgagctcatgaaggcaatcgattttgagtactatggttacctagatgaagatgatggtgttattgtgcctttggaacaggaatatgaaaagaaactcagagccgagttagtggaaaagtggaaagcagagagagaggctcggctggcaagaggagaaaaggaagaggaggaggaagaggaggaagagatcaacatctatgcagtcaccgaggaggagtcggacgaggaaggcagccaggagaaaggaggggacgacagccagcagaagttcattgctcacgtccctgttccctcgcagcaagagattgaggaggcactggtgcgaaggaagaaaatggaactcctccagaagtatgcaagcgagaccctgcaggcccaaagtgaagaagccagaaggctcctggggtattaggacccagctggggctctccttggagttcttccatcccccagtggtacctcaggacccagggctgcagacacaggctggtgctgcaagggctcctgccccattctcagccttccttccctctccttgtctcatgttgaccggagggtaggggtctgtccctggtcttcctggtaggttttgtacacatattttgctactgtgtggatccatttatttttattgtggagtgtatacaacaggttgcgaactggctgcctgtgtcttattttgacttgcactgccattttgaggggagaagaatcaattagtggcaaacatttaaaaatgcaattttttgcagaccaaagtataattttaaaaaatgcaaattttctaaaagacacatctcttgaaaaatgagatgatgtggccaggcgcagtggctcacgcctgtaaccccagcactttgggaggccgaggcgggcgggtcacgaggtcaagagatggagaccatcctggccaacatggtgaaaccccatgtctactaaaaatacaaaaaaattagctgggcgtactggcatgcacctgtagtcccagctgcttgggaggctgaggcaggagaatcacttgaacccgagaggtggaggttgaagtgagccaagatcgtgccattgcactccagcctggcgacagagtgagactctgtcccacaaaaaaaaaaaaaaaaagatgcacgcaacccacaagtcaatgaccaggtccctctgtgttggttgctgctctgggctctccgttagcccccctccacctgctccactcgctcctgcctgggtggcaggaatttgagtttgctattcctgttttataacctgttctgcagaaacctatttttattaaagatttttataagaaagggaaacctccatgtcttcagcttgttccctgggccaacggctctgaggtgacagtggcattaggatgtgaccagtcactaaggggcactgccttcctgcaggggagtccctgaagccccagccccaagtgtggcaaagacaggaccagatcccaggagtctaggtgggagtgagccgacccaccatggcgtccgtggccacagctgtagacagggctccttgcagtgggctgcaccgtggcctgctgaaagcacacagtggacacgagctgagtccagagcttcctctgaactggggcttagctctccagtggggaaccatggtcagcggctgtagcccctgggcaagatggtgcctggcttcctgccctctgcagggtcatgggagtgtctgggaactcagggtcagggccagatggctgttcctggggcctggggctccagctcaggctgtttgggaataggaggaactcttggcttggagaagcccatcacacagcgggaggcctgggatggttggtctgcggggagcagctcagactgggggtggcagagccgtgtgtggctgtgtgtggccaagtcgggagagtggccagtgctgggccctctctaaggagcccgagggccacaaggactgtggaaaaggtctgagtgagggagtcgggagctagtggctaagggacttgcttgaggacgctccgtgcggccacaaggagaggcccaggcaggaccaggtcaggaggaggctggggcagaggccctggcaggaggtgggtgggcttggtggggatgggagtagccagggtgtaggtgaggatggggaaggggcccccctgcctcctggcttccctgagggctgggctggccaatcccagccctcagtcaagcccggaggcaaatgtgtgcagggaggagaggtgtccaggttgaagctttgggagcccttggaggcagcaaggcagactcgcctctgggacccagcacccagcttgggcctgcaggtggggactcaggagtgaatatcgtgggggctttgagcaagaccctctgggcccagcctcaccttccatactttgaagtcaaggagtggacctgtgctgtctcagtttgctctggggtctgggcagtcctgtggtttgggcagaggcctcagagggccctagggacagactgacccaggtctgagcctcttgggagcgtgcggatggccggcctcagacaggcctggttgtgggtttgtcttccaaggggcacacgcgcactctggtgcttcctggcattcagaagagaatggggaatccagacatcaggccttccttctccctgggaaggatggcaggtgcttggagccaggcctgtcttgagagccagggctctgggtcttcctcctccagtgccctgttccacgccttcagtgcacaaagcactcccctcctgggatctcttcagggatccccgggatgcaaactggccagggattagaattccacatttgagcaaacagactgagagtggagaagcacccagctggacatcctctaggtgttcctggcagaggcccttgctacttgtctgtgcccaaaggccctagagggtcctagatgtgggacaaggtctcagcagggctccagtcccaggcctggaaacagctgggggtgggggaagctggctgggtgggtgtggttatcttttcccagcttgtggctccgaggtgacagaaccaatctcaggaggctttgtttggttaataaaatctactgaatggtttattttagctt

SEQ ID NO: 50793 - DNA, 3750 bp, Homo sapiens
aagataggctaggtacgaggctgggtggggcgtcttctgggcctgtggagtttcttggacaggggccgcggggctccaggacggcgcccttagcgacaccatggcccgaaatgcagaaaaggccatgacggccttagcaagatttcgccaggctcagctggaagagggaaaagtgaaggaacgaagaccctttctggcctcagaatgtactgaactgcctaaagctgagaagtggagacgacagatcattggagagatctctaaaaaagtggctcagattcagaatgctggtttaggtgaatttcgaattcgtgacctgaatgatgaaattaacaagctgctaagggagaaaggacactgggaggtccggataaaggagctgggaggtcctgattatggatatatgtcctgccagagtgagcccttgcctgatctcttcagcagttgtgtggtggagattttatttttcctgtgaggcagcttaaaagcagctcattaatccacctagaaaagtggtctcagaaagttggccctaaaatgctggatcatgaaggaaaagaagtcccaggaaaccgaggttacaagtactttggagcagcaaaagatttgcctggtgttagagagctgtttgaaaaagaacctcttcctcctcccagaaagacacgtgctgagctcatgaaggcaatcgattttgagtactatggttacctagatgaagatgatggtgttattgtgcctttggaacaggaatatgaaaagaaactcagagccgagttagtggaaaagtggaaagcagagagagaggctcggctggcaagaggagaaaaggaagaggaggaggaagaggaggaagagatcaacatctatgcagtcaccgaggaggagtcggacgaggaaggcagccaggagaaaggaggggacgacagccagcagaagttcattgctcacgtccctgttccctcgcagcaagagattgaggaggcactggtgcgaaggaagaaaatggaactcctccagaagtatgcaagcgagaccctgcaggcccaaagtgaagaagccagaaggctcctggggtattaggacccagctggggctctccttggagttcttccatcccccagtggtacctcaggacccagggctgcagacacaggctggtgctgcaagggctcctgccccattctcagccttccttccctctccttgtctcatgttgaccggagggtaggggtctgtccctggtcttcctggtaggttttgtacacatattttgctactgtgtggatccatttatttttattgtggagtgtatacaacaggttgcgaactggctgcctgtgtcttattttgacttgcactgccattttgaggggagaagaatcaattagtggcaaacatttaaaaatgcaattttttgcagaccaaagtataattttaaaaaatgcaaattttctaaaagacacatctcttgaaaaatgagatgatgtggccaggcgcagtggctcacgcctgtaaccccagcactttgggaggccgaggcgggcgggtcacgaggtcaagagatggagaccatcctggccaacatggtgaaaccccatgtctactaaaaatacaaaaaaattagctgggcgtactggcatgcacctgtagtcccagctgcttgggaggctgaggcaggagaatcacttgaacccgagaggtggaggttgaagtgagccaagatcgtgccattgcactccagcctggcgacagagtgagactctgtcccacaaaaaaaaaaaaaaaaagatgcacgcaacccacaagtcaatgaccaggtccctctgtgttggttgctgctctgggctctccgttagcccccctccacctgctccactcgctcctgcctgggtggcaggaatttgagtttgctattcctgttttataacctgttctgcagaaacctatttttattaaagatttttataagaaagggaaacctccatgtcttcagcttgttccctgggccaacggctctgaggtgacagtggcattaggatgtgaccagtcactaaggggcactgccttcctgcaggggagtccctgaagccccagccccaagtgtggcaaagacaggaccagatcccaggagtctaggtgggagtgagccgacccaccatggcgtccgtggccacagctgtagacagggctccttgcagtgggctgcaccgtggcctgctgaaagcacacagtggacacgagctgagtccagagcttcctctgaactggggcttagctctccagtggggaaccatggtcagcggctgtagcccctgggcaagatggtgcctggcttcctgccctctgcagggtcatgggagtgtctgggaactcagggtcagggccagatggctgttcctggggcctggggctccagctcaggctgtttgggaataggaggaactcttggcttggagaagcccatcacacagcgggaggcctgggatggttggtctgcggggagcagctcagactgggggtggcagagccgtgtgtggctgtgtgtggccaagtcgggagagtggccagtgctgggccctctctaaggagcccgagggccacaaggactgtggaaaaggtctgagtgagggagtcgggagctagtggctaagggacttgcttgaggacgctccgtgcggccacaaggagaggcccaggcaggaccaggtcaggaggaggctggggcagaggccctggcaggaggtgggtgggcttggtggggatgggagtagccagggtgtaggtgaggatggggaaggggcccccctgcctcctggcttccctgagggctgggctggccaatcccagccctcagtcaagcccggaggcaaatgtgtgcagggaggagaggtgtccaggttgaagctttgggagcccttggaggcagcaaggcagactcgcctctgggacccagcacccagcttgggcctgcaggtggggactcaggagtgaatatcgtgggggctttgagcaagaccctctgggcccagcctcaccttccatactttgaagtcaaggagtggacctgtgctgtctcagtttgctctggggtctgggcagtcctgtggtttgggcagaggcctcagagggccctagggacagactgacccaggtctgagcctcttgggagcgtgcggatggccggcctcagacaggcctggttgtgggtttgtcttccaaggggcacacgcgcactctggtgcttcctggcattcagaagagaatggggaatccagacatcaggccttccttctccctgggaaggatggcaggtgcttggagccaggcctgtcttgagagccagggctctgggtcttcctcctccagtgccctgttccacgccttcagtgcacaaagcactcccctcctgggatctcttcagggatccccgggatgcaaactggccagggattagaattccacatttgagcaaacagactgagagtggagaagcacccagctggacatcctctaggtgttcctggcagaggcccttgctacttgtctgtgcccaaaggccctagagggtcctagatgtgggacaaggtctcagcagggctccagtcccaggcctggaaacagctgggggtgggggaagctggctgggtgggtgtggttatcttttcccagcttgtggctccgaggtgacagaaccaatctcaggaggctttgtttggttaataaaatctactgaatggtttattttagctt

SEQ ID NO: 50794 - DNA, 3187 bp, Homo sapiens
  misc_feature (123)..(123): n is a, c, g, or t
tgagaaagtggctgaagaaaagactcatcggcggacgactctctataatagcggttcaaactctcggaaggctgcgtttacttggtgagagtatccggaattcgatgacctgaatactgatgnaaataatgcaaacgactgaatagccggaaaaccggacactgggaggtccggataaaggagctgggaggtcctgattatggaaaagttggccctaaaatgctggatcatgaaggaaaagaagtcccaggaaaccgaggttacaagtactttggagcagcaaaagatttgcctggtgttagagagctgtttgaaaaagaactcggacgaggaaggcagccaggagaaaggaggggacgacagccagcagaagttcattgctcacgtccctgttccctcgcagcaagagattgaggaggcactggtgcgaaggaagaaaatggaactcctccagaagtatgcaagcgagaccctgcaggcccaaagtgaagaagccagaaggctcctggggtattaggacccagctggggctctccttggagttcttccatcccccagtggtacctcaggacccagggctgcagacacaggctggtgctgcaagggctcctgccccattctcagccttccttccctctccttgtctcatgttgaccggagggtaggggtctgtccctggtcttcctggtaggttttgtacacatattttgctactgtgtggatccatttatttttattgtggagtgtatacaacaggttgcgaactggctgcctgtgtcttattttgacttgcactgccattttgaggggagaagaatcaattagtggcaaacatttaaaaatgcaattttttgcagaccaaagtataattttaaaaaatgcaaattttctaaaagacacatctcttgaaaaatgagatgatgtggccaggcgcagtggctcacgcctgtaaccccagcactttgggaggccgaggcgggcgggtcacgaggtcaagagatggagaccatcctggccaacatggtgaaaccccatgtctactaaaaatacaaaaaaattagctgggcgtactggcatgcacctgtagtcccagctgcttgggaggctgaggcaggagaatcacttgaacccgagaggtggaggttgaagtgagccaagatcgtgccattgcactccagcctggcgacagagtgagactctgtcccacaaaaaaaaaaaaaaaaagatgcacgcaacccacaagtcaatgaccaggtccctctgtgttggttgctgctctgggctctccgttagcccccctccacctgctccactcgctcctgcctgggtggcaggaatttgagtttgctattcctgttttataacctgttctgcagaaacctatttttattaaagatttttataagaaagggaaacctccatgtcttcagcttgttccctgggccaacggctctgaggtgacagtggcattaggatgtgaccagtcactaaggggcactgccttcctgcaggggagtccctgaagccccagccccaagtgtggcaaagacaggaccagatcccaggagtctaggtgggagtgagccgacccaccatggcgtccgtggccacagctgtagacagggctccttgcagtgggctgcaccgtggcctgctgaaagcacacagtggacacgagctgagtccagagcttcctctgaactggggcttagctctccagtggggaaccatggtcagcggctgtagcccctgggcaagatggtgcctggcttcctgccctctgcagggtcatgggagtgtctgggaactcagggtcagggccagatggctgttcctggggcctggggctccagctcaggctgtttgggaataggaggaactcttggcttggagaagcccatcacacagcgggaggcctgggatggttggtctgcggggagcagctcagactgggggtggcagagccgtgtgtggctgtgtgtggccaagtcgggagagtggccagtgctgggccctctctaaggagcccgagggccacaaggactgtggaaaaggtctgagtgagggagtcgggagctagtggctaagggacttgcttgaggacgctccgtgcggccacaaggagaggcccaggcaggaccaggtcaggaggaggctggggcagaggccctggcaggaggtgggtgggcttggtggggatgggagtagccagggtgtaggtgaggatggggaaggggcccccctgcctcctggcttccctgagggctgggctggccaatcccagccctcagtcaagcccggaggcaaatgtgtgcagggaggagaggtgtccaggttgaagctttgggagcccttggaggcagcaaggcagactcgcctctgggacccagcacccagcttgggcctgcaggtggggactcaggagtgaatatcgtgggggctttgagcaagaccctctgggcccagcctcaccttccatactttgaagtcaaggagtggacctgtgctgtctcagtttgctctggggtctgggcagtcctgtggtttgggcagaggcctcagagggccctagggacagactgacccaggtctgagcctcttgggagcgtgcggatggccggcctcagacaggcctggttgtgggtttgtcttccaaggggcacacgcgcactctggtgcttcctggcattcagaagagaatggggaatccagacatcaggccttccttctccctgggaaggatggcaggtgcttggagccaggcctgtcttgagagccagggctctgggtcttcctcctccagtgccctgttccacgccttcagtgcacaaagcactcccctcctgggatctcttcagggatccccgggatgcaaactggccagggattagaattccacatttgagcaaacagactgagagtggagaagcacccagctggacatcctctaggtgttcctggcagaggcccttgctacttgtctgtgcccaaaggccctagagggtcctagatgtgggacaaggtctcagcagggctccagtcccaggcctggaaacagctgggggtgggggaagctggctgggtgggtgtggttatcttttcccagcttgtggctccgaggtgacagaaccaatctcaggaggctttgtttggttaataaaatctactgaatggtttattttagctt

SEQ ID NO: 50795 - DNA, 330 bp, Homo sapiens
aaaagagctttaacttcgataaatcaattattttgagttttaggctcatattttgtaccaattgtgttaatacaagttagaacttaaaaccaaacatttcaagtaaacatttctaaaatattagaaatatttctaataaaacatttatgtggttttgtcctcaattttccacaataagagtcaccaaaaaactttcaaataatattcacaaaattataaatgcaatcattttagacccctactgaaataccagtttatgagtgcctgtgtgtggattacgtacatgcacacacacggacacacataaactagcacatacacagaaacaca

SEQ ID NO: 50796 - DNA, 254 bp, Homo sapiens
ctgggctatgtgtggggcaactacatgtcagtatctttaggtttttccactagggctggtcagattctccggaagaatcctctagtctccttcctacaagttggaggcctggctgcctgtggtctggaagctaagtgggagaacaaggctgtagggggatcctcaattactgagtttattagatgtgttttcaaagaaggggactctactagtagtaaagtgtgaagacagggtgacagtgagaccctgtctgt

SEQ ID NO: 50797 - DNA, 416 bp, Homo sapiens
cacctgctttgaccctgcttttctattattacatcagtcagcatcttgtggtccctaacatgaggatgtggctggctcgtgggaaacagcaaaacactaagcctgacctctcccaaattgggaagaccagaggagaaagtgcaaaactgtccccatttggaatgcccattccttctagaaagcagttgggacagtgctcctctgcccttcataaacagactactgttgggtccctgattccagggctggcctgtgaaggattgccccaggtgtcccctttcacggttgttcacatttacagtgacttctgttgaacacccctctttaggggatgtttcttttgctcttattttcctgcatcttttccttaaggggaaggccccatcctttcccaggggccaggggttttatgacca

SEQ ID NO: 50798 - DNA, 321 bp, Homo sapiens
cttatccctatcactcaaggagttaaaagggttttagaagctctgtgccaagaactgcaggcagagaccaaatatttatttcttattgtgtcacactgttattatactgaacagttgtcagtcttttgtaaagaagagctttccttcttcgcatacccccacccctcttttaaaatgagtatcactatggacacatgatttttttttttgaacccagtgttttgtaatcctgttctgccattttctttgatgctcaaattgtcctgaatttggcctatgggtgttccttttaactagatcctgtgtccttttgacatggcc

SEQ ID NO: 50799 - DNA, 324 bp, Homo sapiens
cagctatgatttttttgacagatagacagggtgtgtgaggttgaggcttaagtggtttattggtaccagattttgaagtctttgattgactaagacatttgaagtttgttcttgctattgttattattattttgttttgagggagggtcttgctgtgtcacccaggctgaagtacagtggtacgatttcagctcaatgtaacctctacctcctgggcttaagcagtcctcccacctcagcctcctgagtagctgggactacaagcgcgtgccaccacgcctggataatttcttttttttttttttttgagacagagtctccttc

SEQ ID NO: 50800 - DNA, 718 bp, Homo sapiens
cttactgatatgtttgtatatgtctttaaggaactggtgtagagaagtagtaaccagtactgagggttaatatgctttcaattgtgggcaaatgctccagtgcatgtaattctacttattaaagttgtctttcagagctcgggttaagtgaactcaaaagttattttgaaatacagagaaatctgattaaacaggaccgtgaagtaacatagctagtgaacacttgctaaatgttcacaatgattgttttgaaccatttttgtttttttctaaccacactgaaaactaaagatactaatgtaaaatatttgtgctttaatgagaatgtattagagtcatttaaaaatattattgactcttgtataagtgatttttttaaaaaagatataagaaagaaggtgtggagaagtaaatatttttcactaatagcttcacctgcagaatcatggcatgcaaacactaagtgatcgagttgaacattttcagtgataccatgtagatattatgacttgatgtgttgagaagggcacttcacctctgttattctttccataaactcgtaactccagtcaaaatatcagaaagacagacagacacactgagagacatcctttaaaatacttgaacagcgctcagaactgtcatgaaaaacaaggaaagactaagaaatgattacagaccagaggagactaaggagatagggtgagtaaatgtaaag

SEQ ID NO: 50801 - DNA, 415 bp, Homo sapiens
aaatgtgctttgtgtactttccttgactgaggagtaatgtgggtaagagaaaggactctttgcttatttatggatttaggactctgtgctgatttatgtaagcacagttgcatttctgtgtaagcggaagacagataattctttctattaaaggggacgttcagtgtagctactgcagagcaccgtcaggacacaggcctcccaaccaatgcaggctcagccctccacagcccctcaggagggactcagtgcatctcaagggagttttatccttaaaaactagaagccatatggacatctactttgggaggatttggtgggcctcaggggcctctagcagcagaaggccctggcttcctgaacgcagacggtgcgttggcccaacatggtgcgttggcccaacacggtgcgttgg

SEQ ID NO: 50802 - DNA, 521 bp, Homo sapiens
aaaatatcccccccaaatgtaattctaatgattatactaaagtctctcatttgatgaattaaaacgtacttaaccattttcttcctgtaaagtttttaggatgattttaccactgcaaatttgcaacctgagaagtaaaaatataactttgtgaggtcaaagacagactagaatgttcaccgtattcggaaaatcagtaagatcacagaaaggctcatcagctgcctgatgcttgagtagctcactcaagtgcttgtcgttgaatgcaaaatcttgtcttaagtggacaggtgtgtgaatccttccaccgctatactctccttgcctgattgagtcaaggttgttactgtggtccctggaacagagtgtgcctcagtaaatcaaatataacaaaaggaaggaatgattttcagataggatagacagctaagatgaacaagacttttagaacatttccaatttgagcagtgaatctgccttgtggaagctcaaaatgtactttaagtgacagctgccgtgta

SEQ ID NO: 50803 - DNA, 310 bp, Homo sapiens
tgtatttttagtagagacggggtttcatcgtgttagccagcatggtctccatctcctgacctcgtgatccacccgccttggcctcccaaagtgctgggattacaggcgtgagccaccacacccggccgaatctttaattgaatacttgacttgggaggcaaatgcgtttttgttgtttttctttttttaaagaacacgctatcagaacagttctttgaaactaatgggagcaaaacagcatgtgtgggcagagagggagggtagtaagaacacacctcttgggaagagaagttgtacatggaaagaaatt

SEQ ID NO: 50804 - DNA, 331 bp, Homo sapiens
cgaagaattgttggagggagtaaattcaaaagatagaagatacggttgaagagagacaactaaattgaaagtggcagatcaaaccgaaggtaaaggtatttagtaatgacaccgcctagggtatgaccacatgcatgaataactcaagggtgtagaagatgactggcagagaggaggtctcagaaatgggaggccagatagtagaaggatcacttgtgtgcgtgagatcacaataacataatattgaaatctcaatagagatagtattagagataattataattaaaatcacagcggatctcaaagattggtctgcagactagcaaatgcc

SEQ ID NO: 50805 - DNA, 291 bp, Homo sapiens
atgaactaaaataaattaaaaagcactttattaacacattaaatattaagatctagaggcaggtctaacactctcctaatctgacaataatgaatatcaatgacatttcaaaatatctacaacaatatcacaactgtaatgcgattttaaaacatttgcctattggtgacaaagccaaggcattgctaatactgctgtggtttctttcaatcctaattataggaagtgctgaattgcagttcaaagttagtgaaaatggagacatttttcccatccaaatatatatacccg

SEQ ID NO: 50806 - DNA, 614 bp, Homo sapiens
aagtctttcataaaagttacaaattcaggaaccaggccattttctccctggatttcattttcaaccgaaaatgtcctgaggccaagcccatgcagtgagggcatctgagctgatgtggccatctacctgtggacaggtgtttccagccagctcagcaggctgggcccaggagggaggaaggggaacctgaccgcaggtatttcatcccaggtgcagacttctgctgggggcttaagcctcacttcctctgtgagaggagctgcagctcactcttgtccataaaaggccacgaggctcgcagagcggtgacatcagcccaacaggaagtacagaggaaggggcctgcttcaccagcagccactgctgggactgactcatcacccagctcccaagatcacacctcccgaggttccagcatggagcagctctctcgggctccacctgggagaggtccctgcaggaccccatcttcggctccactgggcttcttgagaaatgggtatgggccaagaaagaaaaacaggaaaaagggcagtttcaggttggacaacatgcccacgttgggtgagactgatgggataatctgagacaaatgggaccaaaactttccacca

SEQ ID NO: 50807 - DNA, 446 bp, Homo sapiens
cactgcaagtttcaaggaaaagtagttcatcaagaatgatcttttagttctgcaatcatcaaatgtttattgaagttcctgtgcaaatagacctgaggttctgtgacttagtcacagtcaaactaaaacaacccagcagatgccatgtggttgggtttgagaacacaaatcatgcagtggcatgctaacctgaagtcccaatagagtctacatcaattggggagcagtggcaatgatgaccaatatatccatgattcagacatgtattatgaatggtctgcgcagaatttatcaacaacaaaaactccatgaatcctctgtatggggagtttctgtctttctagaccagcacccaaagactgcacatgtcatcaaaccacagccaatgttccatggagaacactatctgtgagttgaggctgcattgtgcaaccaaagaggcacag

SEQ ID NO: 50808 - DNA, 1859 bp, Homo sapiens
  misc_feature (454)..(454): n is a, c, g, or t
tttattagctatatcaccttggagatcacttaatatttctgagtcttcatttcctcatgtataaaatgaggaaaatgacattaccaccttcatggggctctcaagaaaaacaaaatgaggtaacaattgtaaagagcccgattcacatgctaacatacacagtaactgtaagctgtgtttgtcgtcattgtttccccactatcagcaggagggaagagctccaggtaccctcctgtttgctccttcttgtggcacctctcacctggagtaatgtggaggggacccacattagaatgccccttccctgaccctatgataaggttcaagccctaccctcttttggggtatatctgggaagggtgctcacccagcttctagccttccttcaactccacctggacattggagccagagctgtgcagcacagtgagtcttaggggtgatttggttgcanggagaaactgcctgctcagaccagctaaagagaagtttattgctaggttactgggatgtccctgtgcctactttttctctagggcagctggtgtctcctcttacttgcctctatggactggttttctgcctcaggaggtcaccctagtccaagtcgaaaacattcctcagtttgcttgtctaacgtcaattaacaagttcctctgtgccctaattacaaattcccctgaagaaaagcagattggccccagtaggtcagaggtcaaccatggtccttgcagtggggagtctgggctgtgggtgggtgggcatgtttcatctcactgatggggtagacaggtcacaaaaaggacacctggacaagtcagtcacacccacaggtgacataattttctggccttctggcaggagggaaagccctctcctcccatagcctgctctgccaggcatgtgcagactgaggctgttaggtcttctggagtttgccagaatagacagccttctgcatcacaggccatgcatgcctcataaaatcctcacatggttccagatctctggattacacaaactgatgttacctgaacaggaagagtagtcatatataggtgataggggagatgattttaggtgtacagtgacacaatgttttatactgataattatatgctgtatttggaaaacttataactaaggatcaaacccacaatttcacaatcattacatagaaaatttactttcattatagatgtaagtaataatgagtttcttataaaaatttacatagtatggacttgattttttttttaaagtgaaggtgggataattgaatgatgaaagttaagaagccctgactggtgttgcatacaccagggttcttacctgtgaacctgtgggaagacttcaggaggcctgtgaagcccttgaagttgtagacaacattttggatttacttaccggtctgccgttgtttgtggaggagggagagtgagtcatcgcttggtttagaaatttagtgttggaactttctgggggttatttattaaaggttccaatttccttccccagagattttgatgtagcagtggaaatggaatccacgaatgtgcatttcacatgcatttagatgaggagtgcaggtggttctcagacctcacattgaggaacactgcttatcaagagtttcaggagaccccaacgttgagaattcagttctgagccatcccaacttcttaggattgttgtgcggtggttaaaactttcttgttaagagtttttgagatctttggacgaaaggtttctggataaatttatatcacaaattagtaagggtttcatagtaaggtggctttcttttccctgatcagtcattttgtggttgggtttgatctttttagtccaagatgctt

SEQ ID NO: 50809 - DNA, 354 bp, Homo sapiens
aatagtattattagacccacttagggccaataaaagctcataggttgtcaaaactgttttgtcactttggttgcaaggggcagaatttgattcttaaaatattggaattttatattcttattataaatttgggggaaataaaagataaggagttgccataaatatgtgagggcccacaacatcagtgtatttcttgttgtttaaaatctttctttaggctaggtgtagtggctgatgcctgtaatcctagcacgttggaaggcaagacgagaagatcacttgagcccaagagttcgagaacagcctgagcaacatagcgagaccctgtctcaggggaaaaaaaaaaaaaagcct

SEQ ID NO: 50810 - DNA, 456 bp, Homo sapiens
atgtgtaaggatgtctattacagcattatgtattttaattttgcagcaaaaaaaaaaaaaaaacttggggaaaaaaagaaatgtctgtgtagggtactggctaaattggtaaactgatatgaaataaaatgctgctattaagaaaggtgatggatacatatgaactcacattttaaaatgtctgagatttattgtagagggaaaaagtggaagtctgtatggataatattattttattgatgagaaaaaaattagatacatatacaaatgcatgtatattcatagcattttctggaaggatatataatatactgttcagctaatatataatttaaggattatgagtattataaattgaaattaatattattacaaattaatacaaattaagatttgttgatgtatacatagtattatggtaaaatgagtataattaaattattcaaaagtttgctt

SEQ ID NO: 50811 - DNA, 434 bp, Homo sapiens
ggtagcagggctattgcttcctgttaaactctacctgccaaaaggtaagcactgaaaggcgctggcaggccaagtaaggccacagtcatagtgcagtggctgtgttgaaacttccagggtaggctgctgcagagaaccttgctttctgcccagccttgtgtgctggatgcagtagaatgggcataaggggtgtgtgctctttccagaataccgcactgttagagaatttggaggctatggtcacagaagttaaatatgtgccgcaaagaactgctctgatatattatgggtttatctgatatctcttcaagggtcagggaccatgtcttattcatctttgaatcaccacaacttggcacagagcctgacatgtagtaggagcttaaaaatggtttcgttatttttttaaaaaaatagtgaatgaatttaggaat

SEQ ID NO: 50812 - DNA, 188 bp, Homo sapiens
ccagtccacggggtggctcaggaacggtgttcctggcagcgtggattgcaaatgcaaaggtcaggaggtgagaatgaacttggcaagcagaagatgagctcagcagccgcctgactgccaggcctggagagtgcccaggaggagtctgaatattatcctgaatgtgatgtcccaagcaggctcttccc

SEQ ID NO: 50813 - DNA, 467 bp, Homo sapiens
aggtgcaaacagtcacttgggatggacttatctcacgtgctaaatccagcagttaccaagagcaagaagtgtttgtggtgagaagctcgtaaggtcttgacccagcgagaacgtttccccgaatcaaatctccatgaacctaacacccgtttcccgcctcttgccaccagtgggatcttgctaacacagaaggcagccggggaggaggagagggcgtagtgaaagactgagccagtgtggagcctgttggcacctgcaacgcttactttaaatgctctctggacgggctcagtgaggatctgctgactgaggccaggcagcccgtgactcgcactaggagatcagctgctctctctaaaccagccggattcagctctggatgcttgattctcattccttcactgcaactattctgctgaggacaagtttctcaaggccctgccagtttggtcaacctgaccctctgg

SEQ ID NO: 50814 - DNA, 179 bp, Homo sapiens
cccaccatcaacttcctcgcttcctagccctctcttcccccaccacagtttccatagagtctccagggtggacacttggcagtgacagttactattgagggaatactctgacccttccttacctacggatacaggcttagggtttgtcccacctttatactctcttccaccaaatccca

SEQ ID NO: 50815 - DNA, 394 bp, Homo sapiens
tgaaattaagtggccacaatcagcccaagggaaaccagaagctctatttttttaagctctgatgtttgaagttaagaagattggagaagagatatatctggaaaaatcttcagattttataattaatagtttagcattcatgttttatattataattttatattttgctgaaaaacatctttctgaggctgaaactatgaatattttttcagcattcttttgcacctagatttagttcttcagtatcaattaatctgaaagtaattttggtctttccatttctcatattcatcttcagttgaagaggagcaaattcactgctttttagaaacctaatctcagatatcagacagatggaattaaataaacaagaaattttattccactactcttc

SEQ ID NO: 50816 - DNA, 547 bp, Homo sapiens
gaagatcaaagcagaggaagccacacaatgcagagaatcaacagtggagctatgcctagtgagaagcaaagagacactggatggcctgagagggaaagagactgagaaaagctgtcagcttttagttcctggttccagtcctttgtgacggccagcttgattagagagaaaaggtcatttggaaaatatagccatttttggaagactgagcagccaaggttcttaagtataggagattgggacaaaacaaaaaaaaggtttataacagttcactacttcatctacatcctcaagccaacacctatgaaaaagataatggtgtccgatgacaggcctctgctaacagtgtaaggctatctgtgaactcctcagtctacacatatcttcctcagcctctgggattccatttccacccaagaattaaattgatagaaagaaaaacagcaaaatatacacatatttttccactattaaatccaataatgatgacttaatttcagcaaaacatcatcaatcgcattaaattaatgttgctgttaatttgaat

SEQ ID NO: 50817 - DNA, 616 bp, Homo sapiens
taaatgatcatttggtccattaaaaaaaaagtagcaggctttccaaatgtaccaatattggtaaacttagaatccagccaggaaaatactaggaagacttgctgctaagtttcctttgcttaaatttttaatagttatatttaaatgtataaaatcaaatatatttaaatgttttaaagagttctttttaaaaatagtttatctaaatcttagcagcgtggattgatgaaaaacttagaggcatactattttttattatcattttttgataaatatattttcagaggcataatttggaggtagtattaattagtaaatcaactgtcaatgtcaaagaaataaatacagaaagagagagagagagagagaaatctaccaatattttaagttttaattggcaaaaattgtgaagtattaaaagtatcaaaaggtaaaataaaacataacgatgcttcctgtattaaaatatatagccctaggacaaaattttaattttacaatttgaactttaatcccaattgtagtctgtgatttatgataataattataacaatcattatcccctttaaaattatttattcaaaaagcctagtgttatagtgaacaaattataata

SEQ ID NO: 50818 - DNA, 1048 bp, Homo sapiens
gtcttactattatggccgaaaggaaatctgaggccaagaaatcgaatctcttttttcctaggaaaactctgagctccttttagtgagtgaaaggagaacagtactgccgtttgagtcctgtcgacattgtagccagcccctggcacagctggacgtgtttgaggggagtgatgcacgtcttttatagatacaggaaaatcttcgcatttgcaaattatttttataattgagacactggcaaggaatgaacatagatgtatttctgatttcacttcttgaaacatttcttttcatccataaaaatgatgcacaaaaaagatacttaacctgtagttaaatacagattacatacaaatgaaaccacagaagcaaacagatgtacaattcttctatcttttgagtatttttagatagactgtgtgactttaattgaccttagttgacctcggtctctggaccttcgttgctgcttctgtaaaatggaaataaaaataacatcacctcataagtagggatgtatgcagagcccttcacacgtggtaggcactccataaacagtggctgtcgctgttattttaggtctctcgggtattgaggcagaagaaaactttgaagaagactcacacaggccattaattaatggtggtgaaaatgaagacgaatatgagccgaattattcaatccaagatgatagttctgttgcccaagtcaaggcgataagcttctaccaggcatgttgccttcctggagtcataccgtactcactggcctacgcctgcttgaagttagtgaattactccttcttcttctggctccccttttatctgagtaacaacttcggctggaaggaggcggaagccgacaagctgtccatttggtacgacgttggagggatcataggtatgccggtgatacatcttttccataataaagagttagtcactagtgatcttttactgggttgtgaaatctggcctcatttaaagttttattacttattctacagccattttccctaaactgtcctactagtaaacagccaaactca

SEQ ID NO: 50819 - DNA, 414 bp, Homo sapiens
ctttttcataacatgtctaagtaggatagctctgttgacaagtaacaagatgaaaaacattttaaaagcaaacaaactctgtcaaagaagtgaaaacaaatttatcaactaaaggaatattttagcaaattcagatacacttacaaatagaattatttttgcatatactaattggaaagaagtagaaatttttcagcttggccttcattcagaaagtgtgtctttaatccccttacagtagctgtcatacatggctcatagattcatcactcattgaataaaatggtgccaagaacccttgatacaagtgaagatgatatgggcctgtcttctcagcttgcagtcagtaagaactatagccaagttctgaaagggttattgaaatagaatgtaacattgctatggaagggtcca

SEQ ID NO: 50820 - DNA, 436 bp, Homo sapiens
tgggctgatcatgaggtcagaagtttgagaggagcctagccaacatggtgaaaccctgtctctacaaaaatacaaaaattagccaggcgtggtggcgtgcatctgtaatcccagctactcaagaggatgaggccagagaatcacttcaacccggaggtggaggttgcagtgagctgagatggtgccattgcactccagcctgggcgacagagcgagactccgtctcaaaaaaaaaatttttgtttattatctccagtgtccagcattgtgtcctgtgtgtatttcaggtttgttgaattataaattcatgaataactaattatcccaattaattgtagggcaaagatcaaacctagaaattccctgaggaatgttcccatttggtcagtaggtggcagtcttgcctattttgagccggctacattcacttcgtgat

SEQ ID NO: 50821 - DNA, 469 bp, Homo sapiens
tgaaagataccagccttcctcatctcaaaatcttttatggaatcataatttctgtagaaatctgcgtatgccttctttcttggttcggccatagcaatcttgtagaaagctgcaaccaccagggataccatgaatgctccaataatatgaaatcacagacgcttaaccagaaggctatgcattggaggttttgtcaaagcaccagaagccatggtagttactgtccttgataggtgtgtaaacttcaacaccaacatccttcccagctgttggagaaatggacggtccccacctacattttatagacagtccattcataaaactctcctcctgccagggcacggactgatgtgaatccacctaatggccctaggcaataggtgcctttattgtcatccttgttttacgcatcagaaactgagagacagagaagctaagtgagctgcataaagccacagagctagtaatt

SEQ ID NO: 50822 - DNA, 1411 bp, Homo sapiens
gaataatttacactggtatgtttattttcaaaaggctggcaaaggggatcagaaatgggactttttactcaagggtcctgatatgagggaggcagggtagtgagagaaggtcactaattctttggccactcaaaacattaacaatgtgctaccttgactctgtaaatcattgatgacatctttaagttcacctgaaataacaaaaagttgggtctgtaagggaacctagtagcctgtgggcatgcttgccaagcactgaagtcctatctccccacttctcctacagataacgagctgcacggccaagagagtcacaattcaggcaacaggagcgacgggccaggaaagaacaccacccttcacaatgaatttgacacaattgtcttgccggtgctttatctcattatatttgtggcaagcatcttgctgaatggtttagcagtgtggatcttcttccacattaggaataaaaccagcttcatattctatctcaaaaacatagtggttgcagacctcataatgacgctgacatttccatttcgaatagtccatgatgcaggatttggaccttggtacttcaagtttattctctgcagatacacttcagttttgttttatgcaaacatgtatacttccatcgtgttccttgggctgataagcattgatcgctatctgaaggtggtcaagccatttggggactctcggatgtacagcataaccttcacgaaggttttatctgtttgtgtttgggtgatcatggctgttttgtctttgccaaacatcatcctgacaaatggtcagccaacagaggacaatatccatgactgctcaaaacttaaaagtcctttgggggtcaaatggcatacggcagtcacctatgtgaacagctgcttgtttgtggccgtgctggtgattctgatcggatgttacatagccatatccaggtacatccacaaatccagcaggcaattcataagtcagtcaagccgaaagcgaaaacataaccagagcatcagggttgttgtggctgtgttttttacctgctttctaccatatcacttgtgcagaattccttttacttttagtcacttagacaggcttttagatgaatctgcacaaaaaatcctatattactgcaaagaaattacacttttcttgtctgcgtgtaatgtttgcctggatccaataatttactttttcatgtgtaggtcattttcaagaaggctgttcaaaaaatcaaatatcagaaccaggagtgaaagcatcagatcactgcaaagtgtgagaagatcggaagttcgcatatattatgattacactgatgtgtaggccttttattgtttgttggaatcgatatgtacaaagtgtaaataaatgtttcttttcattatccttaaaaaaaaaatcaaaa

SEQ ID NO: 50823 - DNA, 1520 bp, Homo sapiens
ttacattagcaagagagcaagttgttccagtagtcgcctggcaggagaatttgaaagggtgccccaaaggacaatctctaaaggggtaagggagatacctaccttgtctggtaggggagatgtttcgttttcatgctttaccagaaaatccacttccctgccgaccttagtttcaaagcttattcttaattagagacaagaaacctgtttcaacttgaagacaccgtatgaggtgaatggacagccagccaccacaatgaaagaaatcaaaccaggaataacctatgctgaacccacgcctcaatcgtccccaagtgtttcctgacacgcatctttgcttacagtgcatcacaactgaagaatggggttcaacttgacgcttgcaaaattaccaaataacgagctgcacggccaagagagtcacaattcaggcaacaggagcgacgggccaggaaagaacaccacccttcacaatgaatttgacacaattgtcttgccggtgctttatctcattatatttgtggcaagcatcttgctgaatggtttagcagtgtggatcttcttccacattaggaataaaaccagcttcatattctatctcaaaaacatagtggttgcagacctcataatgacgctgacatttccatttcgaatagtccatgatgcaggatttggaccttggtacttcaagtttattctctgcagatacacttcagttttgttttatgcaaacatgtatacttccatcgtgttccttgggctgataagcattgatcgctatctgaaggtggtcaagccatttggggactctcggatgtacagcataaccttcacgaaggttttatctgtttgtgtttgggtgatcatggctgttttgtctttgccaaacatcatcctgacaaatggtcagccaacagaggacaatatccatgactgctcaaaacttaaaagtcctttgggggtcaaatggcatacggcagtcacctatgtgaacagctgcttgtttgtggccgtgctggtgattctgatcggatgttacatagccatatccaggtacatccacaaatccagcaggcaattcataagtcagtcaagccgaaagcgaaaacataaccagagcatcagggttgttgtggctgtgttttttacctgctttctaccatatcacttgtgcagaattccttttacttttagtcacttagacaggcttttagatgaatctgcacaaaaaatcctatattactgcaaagaaattacacttttcttgtctgcgtgtaatgtttgcctggatccaataatttactttttcatgtgtaggtcattttcaagaaggctgttcaaaaaatcaaatatcagaaccaggagtgaaagcatcagatcactgcaaagtgtgagaagatcggaagttcgcatatattatgattacactgatgtgtaggccttttattgtttgttggaatcgatatgtacaaagtgtaaataaatgtttcttttcattatccttaaaaaaaaaatcaaaa

SEQ ID NO: 50824 - DNA, 466 bp, Homo sapiens
aggtgatccacccacctcggcctcctaaagtgctgggattacaggcgtgagccaccgcctgtaaattttgtccttttaagtggagctcccatgaaggcagtcaaaagaccccagtttttaaaagaggatttcacttccctttgaccctcctaggcagataagaacagggagaaattcttgcgtacccaccccagacttgccagaagcctcgtggcccaagaagtagccccgtgccctggctgcccctgaggcctcctcacacccaggagcatttgatagcttgcccacccctgttctgtgtctcctaccactccctccatgccagcggcacgtttcattatggtttcccacatccaaacctcatagcaaatgtaattgtggtgataataggtagtctagccagcaacactaagtattaaaaatgactcaatgttattttggtatttaactttgtaaaagaaaaagg

SEQ ID NO: 50825 - DNA, 176 bp, Homo sapiens
aaacaaaagagtgagtaatagtttaaaacagtgatgaagtatatcaaataaggactaaaaagtgttcattagatttggtaactagaatggtcattggtgaatttcattgggaatagttttttgtggagtagtatagtgagaagctatgttgtcttaggttgggaaataaatgtggg

SEQ ID NO: 50826 - DNA, 652 bp, Homo sapiens
gtcttgctttctttaggtaaagttttacagtaacctcctttgtagtcctttgaagatgaggatttgagaaatcccaactcctaaagtaggggagagacagcagcagaatatgacccacagccagacccaaaggggctagcccgacccctgtatatattgtacctctctctctgcccacctctcccccacttctccccactgccccattctctcttatcctgcctattcctctcccctatttctctgtctctctctctctcacatacacacacactcactcacaagcagtacagtcactaagttggctaggtaatatccaaagcattctgattgtcctactttttgtaaattgaacttatttaagatattttagaagagatgagtcacgtcttcctttgacccttcacccataacacacataccattctcacaggaggccacatggtgcagtagagtcagactttgattcaaagcccaactctgtcacgtgacagtaggcttgagtttcctcatctgtaaaaagggaagatttcctacttcataaagtggttggagaaattaaagaaatagtatatgaagccttgcacataaaaagcatttgatatatattaatgcccttttgcacaagaggtcaagaattgcttgggttcta

SEQ ID NO: 50827 - DNA, 517 bp, Homo sapiens
ggtcccttctccctcttccctccagggaaatatgggaactgtgagaggcagcaggcaagttatgggcagaggcagatacaatgagttcatgtgggaaatttctggtcagactagctctctctctcacatacacacacactcactcacaagcagtacagtcactaagttggctaggtaatatccaaagcattctgattgtcctactttttgtaaattgaacttatttaagatattttagaagagatgagtcacgtcttcctttgacccttcacccataacacacataccattctcacaggaggccacatggtgcagtagagtcagactttgattcaaagcccaactctgtcacgtgacagtaggcttgagtttcctcatctgtaaaaagggaagatttcctacttcataaagtggttggagaaattaaagaaatagtatatgaagccttgcacataaaaagcatttgatatatattaatgcccttttgcacaagaggtcaagaattgcttgggttcta

SEQ ID NO: 50828 - DNA, 180 bp, Homo sapiens
gggaccagagcaaggcctgggcctcatttttgggaggggatttatggtggggtaggacaaggaagaggaaaagagcgggtgcctcggaggtaatttaggagaaaacgaaggaagaggctgggaaatgccaaagagagggattggggaataagaccccaaagatcgtctgaaagcaccttt

SEQ ID NO: 50829 - DNA, 686 bp, Homo sapiens
atagcctcagaggtgctccttgagctgtttttaagagggatgaggccgaacttcagaattcctttttcatttctgtcctccctaccaccgtcttctcatcaccaaacacacagaataggagaggagagggaaagaatccctatgtaatgccaaacttgtaacagcctggctcggtttctagtgttggtgtcctgggccaactggttctgaggtcgcggggggagtctccaccctgcccctcggacagcacgaagccttctgtgacgctgcaggcatgcgaatgtcttggggaggtcccggcccctcagaaactggcaagtccagtttcaggcagaggcacaggccacactcaagaccttggatggaattcagggtatttggtccccgagtcacttgatttttaaaagatggtttccaaatgaaagtttatgtgcctataaacactgctaagagtgcagccttccagaaacataattagtgggtggaaaacaaaaatgctgtctgcctaggatttcagaaggcctgtaatcgattggtggagagagtgagacaggggactgttttctccacttcccatggcaacttaccgatattgggaagggtcattcatttgcacgtttgacttcaccagagcttgtggcccctgtactttagcatctgtgttaaaatcttccaggtagatgaaa

SEQ ID NO: 50830 - DNA, 388 bp, Homo sapiens
gcaccagggttaactcctgataaacccatcataagctgaaaatgctgtaagttgaaaatgcatttatctctcttcagccaggaaggaagggaggaagggagggaggaaggcaggaagggaggaagggaggaagggaagaaggaaggaaggaagaaaggaaggaagggagggagggagaaaggaaggaaggaaagaagggcacttaatacaacctaccaaacatcacagcttggcctaacctaccttaggttaggtagcctacttttgcttaggttagtttacctaacctaccaaacatcatagcttggcctaacctaccttaaacacatttggaacacttacataagtctacaattgggcaaaataatctaacacaaagcctgtttta

SEQ ID NO: 50831 - DNA, 524 bp, Homo sapiens
ttcttttaaattattgaattttttgccttgtggggtttcttaaccacaaaacctatctattaggattaatggaggctattttttctttaccaattgctatataactacttaagacttcatgtaatcagctgagatgctacaaatgtattgcctgtcaactccagtaaaaaagcgggcagttaattaaagggatgtcttgctgttaaacaaacttgcagtcaattgcttgtaagtaacatttagtttgatatgtagtcaaagggcaggaaaataagtgtttaggcaggactggctttttgcaacgtaaaaaggagaagtgattatattgggggtcaagatgagtaacctttcaactgggcatattttccttcttaaaaagtatattcacatatcagaggaaaggtgaaagacatataagggccttaaggttggtcagttttgagatcttttccacttacagtaactaagtcctcatcttcttgcatcccttgaagacactgttttaccctaatataaagcctggc

SEQ ID NO: 50832 - DNA, 353 bp, Homo sapiens
gaacaagagccccaggtgcccaccctcctcagagacagttctgtgcgaaggatagaccaaaccaagcaagcagacaaataaatcacagtaattgtatgaggaggaaaatcagcaaggaaaccagcagtcagtgtgcggagagctgttccccagatggagtcaaggaagtcttcctgcagaggtgacgtgattgagacgggagttggggaaggtgcactggaagctgggtgggtctcagagggcagcctggtggtttattcggcctggttgtgtgtgccaggcacggccgagggcactaaaggaagggtgcctcactgcagaggaggaggaagctccagtgccggcaggctcct

SEQ ID NO: 50833 - DNA, 444 bp, Homo sapiens
tatgagtataggcttgagcacttcagttctagaaataaacctagtaggtaaacagcttcctgcgattaaatggctagctctggagtggaagaagcttctggtattcagggaacaccttactggtacattctgcattcatcgtggtataattagggacacatcacaagctctccactttgacttttggagtggttatttattacttggtgttcaggaagagggaaggccagatgagaatggaccccctccccacacaacttgtctgtccaagccactgacacagtaactgttcctcaacctcactgctgattgagagtagagctagctaacaccaaaccctcgctcttcctctaggtcagatgctgggcttgtggcaacagttccaacaacaagctgactactatatacaaatgattcatttccagccttctgctttcctttaaa

SEQ ID NO: 50834 - DNA, 2287 bp, Homo sapiens
ccctgcacttgggagccggtagcactcctatcactgcttctcaacccgtgagctaccagctgtgtcatgagctgcagacagttctcctcgtcctacttgagccgcagcggcgggggtggcgggggcggcctgggcagcgggggcagcataaggtcttcctacagccgcttcagctcctcagggggccgtggaggagggggccgattcagctcttctagtggctatggtgggggaagctctcgtgtctgtgggaggggaggcggtggcagttttggctacagctacggcggaggatctgggggtggttttagtgccagtagtttaggcggtggctttgggggtggttccagaggttttggtggtgcttctggaggaggctatagtagttctgggggttttggaggtggctttggtggtggttctggaggtggctttggtggtggctatgggagtgggtttggggggttagggggctttggaggtggtgctggaggaggtgatggtggtattctgactgctaatgagaagagcaccatgcaggaactcaattctcggctggcctcttacttggataaggtgcaggctctagaggaggccaacaacgacctggagaataagatccaggattggtacgacaagaagggacctgctgctatccagaagaactactccccttattataacactattgatgatctcaaggaccagattgtggacctgacagtgggcaacaacaaaactctcctggacattgacaacactcgcatgacactggatgacttcaggataaagtttgagatggagcaaaacctgcggcaaggagtggatgctgacatcaatggcctgcggcaggtgctggacaatctgaccatggagaagtctgacctggagatgcagtatgagactctgcaggaggagctgatggccctcaagaagaatcataaggaggagatgagtcagctgactgggcagaacagtggagatgtcaatgtggagataaacgttgctcctggcaaagatctcaccaagaccctcaatgacatgcgtcaggagtatgagcagctcattgctaagaacagaaaggacatcgagaatcaatatgagactcagataacccagatcgagcatgaggtatccagtagtggtcaggaggtgcagtccagtgccaaggaggtgacccagctccggcacggtgtccaggagttggagattgagctgcagtctcagctcagcaagaaagcagctctggagaagagcttggaagacacgaagaaccgctactgtggccagctgcagatgatccaggagcagatcagtaacttggaggcccagatcactgacgtccggcaagagatcgagtgccagaatcaggaatacagccttctgctcagcattaagatgcggctggagaaggaaatcgagacctaccacaacctccttgagggaggccaggaagactttgaatcctccggagctggaaaaattggccttggaggtcgaggaggaagtggaggcagttatggaagaggatccaggggaggaagtggaggcagctatggtggaggaggaagtggaggtggctatggtggaggaagtgggtccaggggaggaagtggaggcagctacggtggaggaagtggttctggaggaggtagtggaggtggctatggtggaggaagtggaggtggccatagcggaggaagtggaggtggtcatagtggaggaagtgggggcaactatggaggaggaagtggctctggaggaggaagtgggggtggctatggtggaggaagtgggtccaggggaggaagtggaggcagccatggtggaggaagtggttttggaggtgaaagtggaggcagctacggaggcggtgaagaagcgagtggaagtggtggcggctacggaggaggaagcggaaaatcatcccattcctagtcttcttcctcaaaatctggtgaccaagatgagacaaaaggcttcctttcgcgatactagagcctctgtaaacttctcctgcccagcccccagctgagcatccccagatgggcagactcccgatgaagcctgcttattggatcctgacatcaggaatagctggcaacaagcccctgtgcccgtttgggactgaactgacttggcatatgtgctctggctttccattggcttccaaccctgcttggctttggatgccttcagggttcccgagacagacctctttcctctctctggcctgggagctctcacaccctgcacgatcttgactataataaagcttccctactgc

SEQ ID NO: 50835 - DNA, 391 bp, Homo sapiens
gtcaggtaattttgagtgcatactagataatgtgaatttaccctgttgggtgctaaatatttgctttgctaaataaatattcttgagactattgggggattcagttaagttacttaaaaccaattcgattctcttgagtatttatgctttgcttatgcagtgttcactttgtctctggctaattttttgtgggtaccaaagtaaggcccttcttacttgtcacgtgtgttttggcacagttacttctaagcatttcaggcaatttttccctcacctcaggtgaatttctcttacatgtatctgaatctatactcagatctgtaaggtatgatgagaaatttgcacatccgcaatgtcttttctctgcacagctttttgttcgttggcatgt

SEQ ID NO: 50836 - DNA, 1378 bp, Homo sapiens
  misc_feature (72)..(72): n is a, c, g, or t
  misc_feature (77)..(77): n is a, c, g, or t
  misc_feature (258)..(258): n is a, c, g, or t
  misc_feature (261)..(261): n is a, c, g, or t
gaaaaattgaggcgttttctttctctcaatggagaattccctggtaaattaggaccagtcaggggggcgttngttgnaaaatctacaatatgctctttgaatatgattgcagggcctttcttcaaggtgtttgattcaagtagctctgccctgcgtattggctagctgcaaattgagagaggggggaacaattctctactttgatgcatcatctcaggcctctttttaccaggtgaattttctcttaataaaacaaanaanatttttgtggattgcccatctcttttgactctgcagactctgtaaccaatttttgtatgttaatcaggccaatctgtggagtaggcttagactgcagcctgggcaatatagcaagacctcgtctctgtaaaaagaaagaaagtaataaagactaattgagcccaaaatgtttcactatttcaaaaaagatatttaaattgttgctctttcattccataaaaaggatctgatctctctcccacttttctgacctgagttagagcttcccaaacctgtcatgtatgggttttagccaatttcttttagatcactaaaaaaactcacccaatatgtcaaataatggatttatcatagccagtacatgttctcaaggcaagtttaaacattattttgaagctattgataattttttaaaataaagaaatattcactgatttttttcactgtaaagcacgggagggctgctttaacaacagtataagaatcagcctgaagccttgttactgctacaacaaattcattttagactcctcggatgtcttccacagtaatttattcttttagcaaacctgatactgataactgtttctttgctttgatttcttgatgaattattttggtatgtttgttgatttttaaagcaaacacggataatgcactcagagtacattttttgtaaagatttttgcaatagaagaaaagtgaagtttttgtggggatgtggattttattgcttactactttatagtaatcaaaagtttgaaaatatcaacttacagtctttaccagtttactaagggaaacttttttccctatttaaaacatgatcttagtcaacaattttatttataattatcagctaaattacatttagtataatactcaaatggaaaaatcagtagtttatacctttataaatacagtttagtaagccaaggaatcagggaaataatcctttaaaataatgtactaatagttaagatgtttcaggtgttttttctgattaaatttgctactatatttggaagactttaaaactatattaaaatgtgacttgcattacaaatttctgtgtcttaccagtatatttgtaaatatattattcattttccttttc

SEQ ID NO: 50837 - DNA, 1231 bp, Homo sapiens
taaatatcatggtgtcccttagcatatactactctcattgctggcagtgagacaggccattcatgatcttaagagttgccatttttaatgtatattattagttacaagcactttatatagcagaaaattgtttttgagaataagctagtgttgatattttaatatttttagcttactgctcgtgtttttgtttttgttttcgagactgcagcctgggcaatatagcaagacctcgtctctgtaaaaagaaagaaagtaataaagactaattgagcccaaaatgtttcactatttcaaaaaagatatttaaattgttgctctttcattccataaaaaggatctgatctctctcccacttttctgacctgagttagagcttcccaaacctgtcatgtatgggttttagccaatttcttttagatcactaaaaaaactcacccaatatgtcaaataatggatttatcatagccagtacatgttctcaaggcaagtttaaacattattttgaagctattgataattttttaaaataaagaaatattcactgatttttttcactgtaaagcacgggagggctgctttaacaacagtataagaatcagcctgaagccttgttactgctacaacaaattcattttagactcctcggatgtcttccacagtaatttattcttttagcaaacctgatactgataactgtttctttgctttgatttcttgatgaattattttggtatgtttgttgatttttaaagcaaacacggataatgcactcagagtacattttttgtaaagatttttgcaatagaagaaaagtgaagtttttgtggggatgtggattttattgcttactactttatagtaatcaaaagtttgaaaatatcaacttacagtctttaccagtttactaagggaaacttttttccctatttaaaacatgatcttagtcaacaattttatttataattatcagctaaattacatttagtataatactcaaatggaaaaatcagtagtttatacctttataaatacagtttagtaagccaaggaatcagggaaataatcctttaaaataatgtactaatagttaagatgtttcaggtgttttttctgattaaatttgctactatatttggaagactttaaaactatattaaaatgtgacttgcattacaaatttctgtgtcttaccagtatatttgtaaatatattattcattttccttttc

SEQ ID NO: 50838 - DNA, 671 bp, Homo sapiens
ttataataattctttttcatgttgaaatcatgttttgaaaacattaaaaacattggatttaataaaaggtagatacaccccatagaaatgaagctggatgaagaaggaaaataagtcagcagaaacactttgaatcaaaatattctgaataaaatcagaatattctatgatcttttcatttttatgccatttctagaaattttaaaaatgttggcaatggtgctatgtataatatactgcactagattgaaaagaggtagccactgtaattgaaaagattgctacacatttgaatggaccaaatgtgttttaagaccaaattcaagtaaaaaggatgtgtctcttctgaactgaagctcattaaatgtttcaccggccttcctgcaaaaatggattttcaaaactttggaaaggatagcatttaagctgaatttgacctgtattgaccattttggaaatcagccaagcaattcgcttgaagatacttgaagcacttgaaatatggaattgctggaaaaagaataagacagcccaatagctaccattgcccagggtgatactttggtaacaggactgatggcttgtataacaatctgacatgctgataggagttggggagtgggggcagccattgggaagggcaaagggaaccctaagagtagttttttctc

SEQ ID NO: 50839 - DNA, 1669 bp, Homo sapiens
cccgcgggggcgcggccagcgccagagtagatacctgtcccgcccgccgcggccagcagcctcggaggaagccaggcaaagagggccggcggagaccaggtccgcgccggaggaagccgcgcccggccgaggccccggaccctgcgccccgagctccacggcaccatggccccgaagctgctgctcctcctctgcctgttctcgggcttgcacgcgcggtccagaaaggtggaagaggatgaatatgaagattcatcatcaaaccaaaagtgggtcttggctccaaaatcccaagacaccgacgtgactcttattctcaacaagttgctaagagaatatgataaaaagctgaggccagatattggaataaaaccgaccgtaattgacgttgacatttatgttaacagcattggtcctgtgtcatcaataaacatggaataccaaattgacatattttttgctcagacctggacagatagtcgccttcgattcaacagcacaatgaaaattcttactctgaacagcaacatggtggggttaatctggatcccagacaccatcttccgcaattctaaaaccgcagaggctcactggatcaccacacccaatcagctcctccggatttggaatgacgggaaaatcctttacactttgaggctcaccatcaatgctgagtgccagctgcagctgcacaacttccccatggacgaacactcctgcccgctgattttctccagctatggctatcccaaagaagaaatgatttatagatggagaaaaaattcagtggaggcagctgaccagaaatcatggcggctttatcagtttgacttcatgggcctcagaaacaccacagaaatcgtgacaacgtctgcaggtgattatgttgtcatgactatatattttgaattgagtagaagaatgggatacttcaccattcagacatacattccctgtatactgactgtggttttatcctgggtgtcattttggatcaaaaaagatgctacgccagcaagaacagcattaggcatcaccacggtgctgaccatgaccaccctgagcaccatcgccaggaagtccttgccacgcgtgtcctacgtgaccgccatggacctttttgtgactgtgtgcttcctgtttgtcttcgccgcgctgatggagtatgccaccctcaactactattccagctgtagaaaaccaaccaccacgaagaagacaacatcgttactacatccagattcctcaagatggattcctgagcgaataagcctacaagccccttccaactattccctcctggacatgaggccaccaccacctgcgatgatcactttaaacaattccgtttactggcaggaatttgaagatacctgtgtctatgagtgtctggatggcaaagactgtcagagcttcttctgctgctatgaagaatgtaaatcaggatcctggaggaaagggcgtattcacatagacatcttggagctggactcgtactcccgggtctttttccccacgtccttcctgctctttaacctggtctactgggttggatacctgtatctctaagtgttgctcagagtgaagagtgaagagcatttggtacacacttgaccttctgtcgtccccagaccagtagtgaccaatcgggagtagcaaggaaggacac

SEQ ID NO: 50840 - DNA, 1257 bp, Homo sapiens
tccccagaagctggggtgaggggtacagaagaggatggctgctgggtatgcaacctagagtcagtcagtcacaaacatggcaggaaaataagctgtctgaataccaaattgacatattttttgctcagacctggacagatagtcgccttcgattcaacagcacaatgaaaattcttactctgaacagcaacatggtggggttaatctggatcccagacaccatcttccgcaattctaaaaccgcagaggctcactggatcaccacacccaatcagctcctccggatttggaatgacgggaaaatcctttacactttgaggctcaccatcaatgctgagtgccagctgcagctgcacaacttccccatggacgaacactcctgcccgctgattttctccagctatggctatcccaaagaagaaatgatttatagatggagaaaaaattcagtggaggcagctgaccagaaatcatggcggctttatcagtttgacttcatgggcctcagaaacaccacagaaatcgtgacaacgtctgcaggtgattatgttgtcatgactatatattttgaattgagtagaagaatgggatacttcaccattcagacatacattccctgtatactgactgtggttttatcctgggtgtcattttggatcaaaaaagatgctacgccagcaagaacagcattaggcatcaccacggtgctgaccatgaccaccctgagcaccatcgccaggaagtccttgccacgcgtgtcctacgtgaccgccatggacctttttgtgactgtgtgcttcctgtttgtcttcgccgcgctgatggagtatgccaccctcaactactattccagctgtagaaaaccaaccaccacgaagaagacaacatcgttactacatccagattcctcaagatggattcctgagcgaataagcctacaagccccttccaagccatcctgctgccctgcctgtggcctccaagggttgccctttagatctctggtgagccatccccgcatcagcagagccttctgcctccccgtctaagtcagaatcttcctgtgtggctgccttaccttgcaaatggccagacttctcctctgtgtctccggtagctcccagttccatccacatagcaagggactacacagaggcatgaagcaacgagtggatgaatgtctggctgatcactgtcaaagcacacgtgtaggaaacctttattgcaattgtttgttaataaagccagatctttcaa

SEQ ID NO: 50841 - DNA, 1594 bp, Homo sapiens
cccgcgggggcgcggccagcgccagagtagatacctgtcccgcccgccgcggccagcagcctcggaggaagccaggcaaagagggccggcggagaccaggtccgcgccggaggaagccgcgcccggccgaggccccggaccctgcgccccgagctccacggcaccatggccccgaagctgctgctcctcctctgcctgttctcgggcttgcacgcgcggtccagaaaggtggaagaggatgaatatgaagattcatcatcaaaccaaaagtgggtcttggctccaaaatcccaagacaccgacgtgactcttattctcaacaagttgctaagagaatatgataaaaagctgaggccagatattggaataaaaccgaccgtaattgacgttgacatttatgttaacagcattggtcctgtgtcatcaataaacatggaataccaaattgacatattttttgctcagacctggacagatagtcgccttcgattcaacagcacaatgaaaattcttactctgaacagcaacatggtggggttaatctggatcccagacaccatcttccgcaattctaaaaccgcagaggctcactggatcaccacacccaatcagctcctccggatttggaatgacgggaaaatcctttacactttgaggctcaccatcaatgctgagtgccagctgcagctgcacaacttccccatggacgaacactcctgcccgctgattttctccagctatggctatcccaaagaagaaatgatttatagatggagaaaaaattcagtggaggcagctgaccagaaatcatggcggctttatcagtttgacttcatgggcctcagaaacaccacagaaatcgtgacaacgtctgcaggtgattatgttgtcatgactatatattttgaattgagtagaagaatgggatacttcaccattcagacatacattccctgtatactgactgtggttttatcctgggtgtcattttggatcaaaaaagatgctacgccagcaagaacagcattaggcatcaccacggtgctgaccatgaccaccctgagcaccatcgccaggaagtccttgccacgcgtgtcctacgtgaccgccatggacctttttgtgactgtgtgcttcctgtttgtcttcgccgcgctgatggagtatgccaccctcaactactattccagctgtagaaaaccaaccaccacgaagaagacaacatcgttactacatccagattcctcaagatggattcctgagcgaataagcctacaagccccttccaagccatcctgctgccctgcctgtggcctccaagggttgccctttagatctctggtgagccatccccgcatcagcagagccttctgcctccccgtctaagtcagaatcttcctgtgtggctgccttaccttgcaaatggccagacttctcctctgtgtctccggtagctcccagttccatccacatagcaagggactacacagaggcatgaagcaacgagtggatgaatgtctggctgatcactgtcaaagcacacgtgtaggaaacctttattgcaattgtttgttaataaagccagatctttcaa

SEQ ID NO: 50842 - DNA, 593 bp, Homo sapiens
tctctctgcagaccttccaaatcagaaactccgaaggtggggcatagcaagctttgtttaacctcacctccacatgattctgatgcactctaatatttgggaaacactgctacagaactgctagattagtaggagaaaagatattaatgtatattaattctggatatcagctctcaccgataacatttgcattttaatagatatcttccatgctgaagcaaacatagtaaaatattagtataaaaagtgcagggaccaaagattatcatagactaagtggcttataaacaaaataattttatgtcttacagttgcagaggatgagaagttcaaaatcaaggcactggtaggttctgtgtctgatgaatgcccacttcctggttcataggagctgtctttttgctgtgtcctcaaacggtgaaaggaagctagtgagctttctgaggtttcttttgtaagggggctttttaacccttcataagggctccaccctcatgacctaatcacttcccaaaggcccaacctattaccatcacttgggttaggatttcaacacatgaattttgagaaataaaaactttcaatctattgca

SEQ ID NO: 50843 - DNA, 371 bp, Homo sapiens
cacttttttccctagatattactctaggaaaatttacaacctgaagcaaggagaaataagatttctcttctaaatgctgaatttgaaagttgcagaggatgagaagttcaaaatcaaggcactggtaggttctgtgtctgatgaatgcccacttcctggttcataggagctgtctttttgctgtgtcctcaaacggtgaaaggaagctagtgagctttctgaggtttcttttgtaagggggctttttaacccttcataagggctccaccctcatgacctaatcacttcccaaaggcccaacctattaccatcacttgggttaggatttcaacacatgaattttgagaaataaaaactttcaatctattgca

SEQ ID NO: 50844 - DNA, 569 bp, Homo sapiens
taaggatttcattctttgttacaatctccatatctctcatagttcagagataatagaaattgtttttaatattcattcattcattcaagaaatgtttatttaatactcattatgggataggccctgaggaataacatagataacataccttatattttaaaaagctagtagctcattttaatttcatttcagaataactttgtagctgcaaaataagactagtttaagctataaagtcaattagcacaccagtgagttttggggtaggctagatggtaaacttcatctttccaacatacttagctttatttaacttgatgtttctgaagtgttttgacctattcagccatcacccctactgaacccactttcagaaataatagttaagtatttgctaggttttcattaactggaactgaacattattaggttaattatatgatatttatagggcagaaatggtgcatatcattgtattttatggcttatcctaactagttgggtgatactgtcttaatttgcctaaggtagttctggtttactcttgtcgctccagtgtgattattata

SEQ ID NO: 50845 - DNA, 1156 bp, Homo sapiens
acacaaaaattatgtcctaagggacaagtgacaagagcccaggaggctgaggaaaactacctcataaaacgggagttggccaccatcaaacagcagagtgatgaggccagtgctaagctggagcaagctgaaaataccatcaggaagctccagcaccaacaacaatgggtaaggagtctggtagtgcttttctcatctttctcatcccccttcctttcaatcattttttttttcatagcacagattttgtgctgttgttttaaataattttgttttagactttgaacttttaaattatacaattttatgttctgtgatatttaggggtcttattgtggcctaaggactcctgttctaattttttttctgtctacatagttttgttagaaataggtaatattttctttccttacactgtgttttaagtaatgggaaataagcagtgtatgtcagaattgcttttaagtttttagaaatctgttttcataataggtatcattttgctaacagtaatttttaaatcccaacttcagctagtttttgttcattgtacagatgaaacattatccagcatgcagaatatatgcagttatctcatttaaagcttcgacagtgtggcaatttgtgtcttacgaaatactattgcttagacttcctacatcaagacattgaattatgggttaaggtgtatgcctatatttcaaagggagagaagttgcaaagatgaaaaagattaaccctttaaaaattatcttaattaacctagggtgtatttctaattatcttaatcaacctagggtgcgtactaaacagctactaattgtacatctagcctcaggtatcttttgcagcttagacattttccattggcaaattcagacaagggcgatcttaatcaggaatatgagggtaaaagaaaagccaactgtttatctttgaaaacatattatttcttgtttcagttttccatcctcaagtaggcgctagattgtaataagtaagcagaagaagttgtgttaatcctggaactctatgcagatctggaaggcaaatagagtgactgcaaagtaggacgttctttttattcaataaaattaagaaacagcatcgtcatctcggtacaaaaaaatcagaaaaccagaagcaaaaagaaaaa

SEQ ID NO: 50846 - DNA, 238 bp, Homo sapiens
caggagcattatgatctttaggagggtgggcttggttcctctgtacaataatgggtcataaaactgagtggtcaagatcatcccggtgagggcagtccgtgtgttgccatagttgctgtaccggttaagaatgcacctggctgcaatttcctgaaaacctgacgtatagtggcttaaacaaagagtggtttattttccttctgtcatagcaatctgggggaggccactgtggctttgg

SEQ ID NO: 50847 - DNA, 824 bp, Homo sapiens
ctaaaaaggccttctttcagttccttcaccagctgcatttgctgggcacagtgccccagcaggtgcagctggtgaaggaactgaaagaaggcctttgtagcccagaaagcaaagtggagaatggtgggaaatgaagctaaaaaggtgaagagctgggcgcggtggctcacacctgtaatcacagcacttttggaggctgaggctggaagattgcttgagccaaggagttcaagatcagcctgggtaacacgagaccttgtctctatgcaaaatcaaaaaagtaagctgggtgtggtgactggaggtgctaacctaggaagaattggtgtgatcagcaacagagagaggcaccctggatctttcgacgtggttcacgtgaagagatgccaatggcaacagctttgccactgcgactttccaacatatcggacattggcaagggcaaacgaaccatggatgtctcttccccgaggaaacgggtatccgcctcaccattgcctgaagagagagaccaccagactggcggccaaaccagagcacgaggcgtgacaacgggtcccagggtgaccacggccgactcaagcacgcaactcacacacactggcccacgcataccacgcaacaaaacacaacacacgacaccgcaccgacaacaacacccccaggaggggccccctgctcacggtacacaaagacacgggagcaacgggccccctctacacaacccgcacaaaaacacaaggcccgcaccgacaaacagagaacacaacggagccaacagcacgcgacacgcgcgcacgagcaccccaatctgagagacaacc

SEQ ID NO: 50848 - DNA, 437 bp, Homo sapiens
aaaagatccgatggagactagaaggcttttctgaggatgaaaccctcgagctagaatctgaaggatgggtaaaagtttgctgggcacagtgccccagcaggtgcagctggtgaaggaactgaaagaaggcctttgtagcccagaaagcaaagtggagaatggtgggaaatgaagctaaaaaggtgaagagctgggcgcggtggctcacacctgtaatcacagcacttttggaggctgaggctggaagattgcttgagccaaggagttcaagatcagcctgggtaacacgagaccttgtctctatgcaaaatcaaaaaagtaagctgggtgtggtgacccatgccagtgatcccagctacttgggaggctgaggtggggggcttaaagctgcagtgagtcatgatggtgccactgcagtccatcctgggtgacagagt

SEQ ID NO: 50849 - DNA, 510 bp, Homo sapiens
ctcttagcacattcaatcaatgctaactattattatcacaggtaacatgtgaataacagaattgagctaccatttttcagccaacccccaaccctccgctcttctctcttctctaagtttaattgtaaaacacagttcatttaaaaaacaaacaaacaaacaaacaaacaaaaacaaaaaacttttgacaagcatatgtttttaattttcaaataatttcaactttttttattttagattcaggggctacatatgcacaggtttgttacatgggtgtattgtgggatgctgaggtttggggtgtgggatggtcccatcacccaagtagtgaggcatagtacccaacaggtaggctgtttcaacccttgccctcctcccggggacgctctagtgggtccccagtgtgtctattgttcctatgtttatgtccacgagcactcaatgtttagctcccacttataagtgaaaacatatttggttttctgttcttgcattagtttgtttaggaca

SEQ ID NO: 50850 - DNA, 474 bp, Homo sapiens
attgtggaacctctctggcccttggtctcttcccctgtaaaaggtggaggagggattagacaatctcaatggttaagaatttatcatccatgcacactaaatctaataagagttttataatatactttaaaaatcatttttatataatggaataagaacatagtcattgtaggaaactcaaaaaaaaatgcaaagaatatagaagaaaataaatgtcaattaaaatttttccacccagaagtaactgttgcttatcttcagcagtttgagtgaatgtattttgaatatattttggtgtgttttcttctgatattttctgtgcatacctacttacaaatctgggaattatactatacatggctcaggagcctacttctcacctaacattataccagaggcaaatcttctcatcattaaatgttcttttaattgtctttgttaatgtctacataataccctattacattttatgcc

SEQ ID NO: 50851 - DNA, 529 bp, Homo sapiens
cagatcacttgagctcaggagtttgagaccagcctggacaacaaggcaaaaccctgtctctacaaaaaaatacaagaattaactgggcatggtggctcatatttatagtccaagctacttgggggactgaagtgggaggattggttgagcccaggaggttgaggctgcaatgagtggagatcatgccactgcactccagcccggatgacaaagtgagaccctgtatcaaaaacaaacaaacaaaaaaaccaaaaaaaaacaccatgtgtagctttgctaattaatggactagatatacaaatacaaactaatttcctgagtttagctgtttaggaaagaggcaataactaaacgaaggagacagtagagtcaagaaatggcatttaataatgtggcttcttgaacacagaagcaaagaccaaataagagagagaccggggtggtacctggagaatcaggagtggtgtggagagggtgaggtagaatttgtcattgccagcaataatgggaagttttagattgtttaaaa

SEQ ID NO: 50852 - DNA, 270 bp, Homo sapiens
gtataatcctatagattgaattgtatgaagctacagaaggcatgcttatcaaatatgtagatggcatgaagcctggcaagagaatgaacacattgtatgtcagaaccagaaatgaaataacaaaaaaaatcttgtcagtctgtagcaatgggatgaatctctaaaaagatagaagttaacagggattaacataagatcctacacttgggtccaaaaactcaactgcccaaatgcagttggaagtgatgtagtgtagcagcctgtgataaa

SEQ ID NO: 50853 - DNA, 488 bp, Homo sapiens
agctgagcccaagtcttgagacaccccattcctactgaggctgcctcttcactcagcactgctgctgtgcccctgtttggaaccctttctgcacttggcttttctaacagtgagctctactgagtcttctacttacgcctctaaccactgcttctgtgtttccttatcagccccagggccgatggcctgagagtagaagaaggagtaggctttgatagctgagcccccaaaggtaaatcaaatttaactttgttatgctaaggctataaaaaaaaatggacatgaagaagttgaagcagagcatgtagagtttgctgacagagttctcgaacaagcagttacagaggcaaaccacagtgaaacaacagaagaagggaacctggtggagatggctgctgagaagttgctccatgaactcagaggacctatagaagggcctacctacactcattgtcttagagcagccttgctaacccacgggcagcgag

SEQ ID NO: 50854 - DNA, 255 bp, Homo sapiens
gactagtgctcaaattgaaaattatatgttctcatgaacatataattttttttaaatggtcagccataggtcactgcgtctcatcttacgaatattccccatgcctcactcattggtcaggtgagtaattcccagacctgtgctttattgactgaattatattcactagtttattcagtagttttctctacttttccagaggagttgtcacatttagagatcaagctcaaagtttgctgccttgtgccttggctt

SEQ ID NO: 50855 - DNA, 382 bp, Homo sapiens
cacaactggtttggttaaagcaatcttctgaaaaaaattgtacaatggatgttagattgccagggttacactgccaaagtattttcacacagatgttaggttagagataactaagactgggaaaaaaatacatatttatcctttgcttgtttatcaaacactatgttaggagttctcaaacccagctaaacattagaattacatggagaactttttataaaagatatattggtgaagagacagctagaaatagacatttaaaagaaaaagcagggtcgggtgctgtggttccgtctgtaatcccagcactttggaagactgagtgggggaggatctcttggggccaagagttcaagaccagtctgatcaatatagcaagacc

SEQ ID NO: 50856 - DNA, 2096 bp, Homo sapiens
  misc_feature (51)..(51): n is a, c, g, or t
  misc_feature (134)..(134): n is a, c, g, or t
aaaacatgttgcttttatcagttaggatacagggtgaactgtaacaaaganacccctaaaacagtgactaaatcaagagaggaatctatttctttctcctgaaacaatttagaaaatagttatccattgactanaaattagcacatgcccacagctggctcccacggtagccaggagaattatctataggtggaaagtctgtgtcagccaaagccatgtcactctgagagaactgattctgaggacaagttagccatctaccacccatgtcccttatttggtcctcacaataacactttaggagagatatcattatcgctgttttataaataagggaaactttagcttgagggtttaaggaacataaccaaagttcacaaacataacaagtgagagaaacacattcaagcccaggtctagttgactttaatgaatctttggtgtggaatgaaaaatgtgaacttcttactcatagtgtggtttttaaatatatgcagttgagtgatgattggatactattcatcatattgcctataatatatatttaccgataagcagtgagtgtaaaattgttgtagcttgaataagaaaccacttttgtagttttaatcagactttctcttaaaaacattagataaaataaaagattcaccggatggattctgatgaaaacgaaaacaaagtaaaatgactggcttagcagattctttgaaatgtagcagcccagggatgtaccaaatgtcgaattctagactgaggagtagagttcattggagtcttaaactctctgatatcacttaaagctggagtttattttaaaacaaatgaagcatgggccacctcatgatgcagtggctcctctctggttgaggagagggaaaattggaaaaactggtcgagtaattatcaataattttttttaaaaagaggatcccaaactgtaaaagattgaaataatctttctcaggattttttaaatgtctaagattatgatgtcatatctcccacttacctgataagtaaaaaggttaatatcaagtaacttattagctcttaaagtaaaattgaacttattaaaagctatctatgatttaatagatttaataaaattccttcacgacctggtacccttgtgaaactgtaaaatatatcatatggggggagttttttaactcttattttttgaaaatttactgtagcttctatttcgtgaataagaatgttttgattttgatcatacaaataacttttgtagatttttgtttacttttggggggggttcccttagaagacattaaaaaaaaatactgccttggtctgtgcaggctgctgtaatgaaatactatgaacttggcagcttataaacaacagaaatttatttctcgctgttctcaatggtgggaagtccaagattaagggatcaacaaattaggcctctggatcatacatggcattttctagctgtgtccttatacataaaaggaaaaaggtagctctctcgagtctctttaataaagatactaattctcatgactgaatcaccctccaaaggccccacctcctaataccatcactctggggactaggtgtcagcatgtgaattttggaaaacacaaaaattcagaacatagcaaatgcctttgaagtataaaagataaaattcatttttagtgaaccctgtaatttattcgtgtatatttactaaacagctgtatctttgaaattgttagtaatgattctgcttcaataactatggtcagggaatttataatattatatttttatatactgaactgccatagatgctggaaaaaaggaactgatgttttcagcatattttcaaaatattgataagggaagttattacttttatatagtattcaacttttttcaggtaatagaagtgaataatttattgtgaaataattcattttataaatgtataattatttttataaattttattgttggaaatcaaaaattagtagattttttaccatgttaaattatagtgagattaaagtattactaaactgtgatgctatgtttgtttcactaaactttctaaataaaaactgagaaaaaaaaaatcactg

SEQ ID NO: 50857 - DNA, 3148 bp, Homo sapiens
agaaaattaacttgattaatatgttttattcatttgtggacactaaaatagctcaggaaagtgaaaatgtcttagacatacgcaagtcacatgaccatttaaatgtgcaaatgtaagaagattcaatgtgtttacatcaaatgacatattttattgatttattgcagattcagtgcatatgagccaaattgttgagtgtgtaagagctatattgtgtattttattaaattaatatatagttgtgttgcaaaaatatttgggcttatattgtaaatggcaagtgttgccttggtagctgtcgaactctatgagttttgttttttcctgcttccttttccccatggagtgtgggaagcagtgcctcagagcaaagtctcttgtttaatgtatagtctaccaagtactacagtacataatctgttcaaaatgtgtttgagtgagctgatggagctaactgaaaggtcaaaaattacatccatcagtcatggttatgtgcaagtccttgtagaagcttttattaaagtcatgctaaatcacaagaattgacatttgtaccaatatctgaaacttcttcatgttttttcaataacatacagcttctgcctgtgtagatattatgccatcagttggttctcaaaagtattttaagtgcttcagatgtgtgttcccattatattttgaaaacatgaaaaatgctttaatgcatgtatgtaccagcagtggttacttgcattgtgtagtgtttttcaagaggtctgggtcttaacaaaatgttttcctttatctcagtgctcttctgcctctttttgttggtgtcctttgagaacaatacaccttctattccttcatttggttacacctttccttgtgacatttagcgagtttcaaacttacttccatatgaggctaagaaacctcaaatttcaggaattgggaaaaataaaattagcacttgcagaagtagcagcagatgggaaaatgccttgattgacattttctttcagcatttaaaatttttggcattttacagcttcatgacaaacagttttgtgcccataccttagaaaatgtggtgctgagttaaataaaggctgtttgagcactggagcagaaaaatgcattatttgcaaactggtggataattttgtgccttctcttctggccaccaagccagtgtagaaacagcaaaaatgtcataaaaattcttatatttaaaacaaaaacaaaagcaaaaacaaacattgaattaaattaagttttgtaattttaaactttaaaaacttctactgaaaatatttccgccaaatgccatcaatattttagactgtacctcgtttgcaaaactgctttgagagggaagagtggacaactcccatcagccttattctcttgagaactatattttggttcctagtaacagcctttccaaagctctactcttggtttttattactcataaatgtttaaattagaaaagaagggaccttgtacatgtgaaacctaattgactctctatattttggacaatttatgtatctgaaatgtgttgtctctgttatatgatgttatttttgccaggagactacaggttgatttagcttgatagctgaaatttgatggaaaactgatttccatttagtcttaccaagtgttgcttctctcttactagacagatatccacttagtaaaatctaaagcagtatgtaaatgaaaccagcaaagagagtagggtttattttataaacattcttaatgctaagtaaccagttgttcaatttattatatgtgtctgaggacattaaaacaccataagattgtaataattggttgtgccaatgtgtgagggatttacctttaggctctctgtcaccagtgatttactagtgttagctgtttaacacattatctgtatttagtagtgattatttatttacaagttggtggtaattcagcagtcaggactctaagcttttatagttgaattgaggaaatctcgcttttattcatttagctggcaactgcctttattgcagacctctggtgcttggctttcaaggaagcctatgagatgccaaaatcacacctttagagagcaccttgctctaataggtgatgcatgagcaaacagtgagatttgaaggggttttaacataatttagaatgtgaaaaaaatatcaattcatatctttcaagtactaacccctcaaaaaagcccacacatacaaaatatgtgatgtgataccactttgtcttttaggtctttaagtaactgaagttaagcacagaaaaaaaaatcacttcatggaaatttcagtaagaaacccaaacttctaaaaattgcttgcagatgagctaaaaaaaaaaaaaaaaaaaaaaagcaacaaaataaccttttcatcagagttaaaagtagtgagaatctgttagttatacgtataccaaagtaaacattaaagagacatatcatgcaatttcaaagaattctttcatgctatttcttaacctgacatttctaactttattgcaggcaatatacaaagattggctcactactccataggttaattgaattcctggttgagaaactaacttgttttgttttccaaaattagctgaaatcttgtaaaacatgacttccctttaaaggatctagatattgttcaatttaaaatatggcaccataaaaaagtcatgtagtaatagagcatatgcttttttagaaccaggttaaaagctgtttgttatctaatagagtaaaagttactgaggtcaacagatagacaggtctggcataatatatgcccagtcataatagtctaattatattcttttgacaacagacagcattcatcagagcactaattcgaatgagagttttggctatcaagatgtgttgattctaaatattattgaatgagacctgattaaagtctgactttcctggccccagtgttttgcaggttggctatttccattatcagcccatcactccataaagttcttagctgcaccaagtgattggtgaacaaggacaacaacaaaagcagcatacattgtatggatttatctcaacgctattgtttaatggctgtgtttaatgtgatctatctggaaaatgaggactccgaataaaaagctattactaata

SEQ ID NO: 50858 - DNA, 1338 bp, Homo sapiens
agcccggcctcctgtgggttcggcgaccatcgcgcggcggccatgggggcgcggctgggccggcgggccgggcccgaggctggctctgaggccggggcggcggccggctgcgggcccgcgccctacgagcgccgggtgcggtggctccgcgagatccagtccacgctccgcgagcggcggccggagcgcgcccggcagctgctgcgcctcctgcgccaggacctgggccttgagaggaccctccttcctgatatcctctacagagatgtggccttcctcaacccggtcgaccccatctcccatgacctgcttgtgaacctggcccgggacctgcagtgccccaagaaggactatgagctctggaagtcctcggacaagatctgccgacagctcatctaccacctcacccctcactcgaagcagcagcaagggtccagcctgcgccagaggaagacccagagctgcctcaagagcagcctccagaagactctgctggcaggggagactgtggacctctcaggcatcccgctgtcgacacaggacgtgcaacacatcacacgctacctgagcagccatggtgctgtgctggcggtgctggacctgagcttcacggggctgagtgatgagctgctgcacctcctgctgcccagcctgtgggcgctgccccgcctcacccagctcctgctcaacggcaaccgactgacgcgggccactgcccgcaagctcactgatgccatcaaggacaccaccaagttccctgctttggcttgggtggacctgggcaacaacgtggatgtggcttccctgccccagcccctgctggtcggcctgcgccggcggctgagccagcgcacctcactccccaccatctacgagggcctggaccttgagcctgagggcagtgcggccggggccaccacccctgcctccacctgggactccacagctgctgggctgggacccgagccccaggcctgctgtgccaggtgacccaccacccacctggctcattgctactgacttgtgatgctctcaagcacatgatagtgggcgatgaaggtcaaggaggactcacaggcccccagaaatccagtgtaaatgctcagcctgagattaaggggacagaagaatggactcataggtggccaggtggccagccctggctagaggctcagccttccctcagtgggaggggccccagcacccacagtgtggaccccgcaataaagagtgacacccgcaaaaaacaatactatcaccatctatttcgtcatcttgctcacatactacaaatctcatatgaacaactatacagaacatcagacgatactgtacact

SEQ ID NO: 50859 - DNA, 1279 bp, Homo sapiens
ccctgggcccgaggacagggaacaagggctcattgtctgggcttcctcccgccgggcactgcgggactggaccagcctgtccagctcccagagggcagcctcccctggctctgtgccaggccacagccgggttggggggtaggagggggaggccctggtgggcaactcggtgatgcatggtgcatgactgtgctcacacacacacttggctgcctgggtccctctccccaaggccctgaggtgggcaggaggggctcagattcaccatggtgacactgccctcccacaggactatgagctctggaagtcctcggacaagatctgccgacagctcatctaccacctcacccctcactcgaagcagcagcaagggtccagcctgcgccagaggaagacccagagctgcctcaagagcagcctccagaagactctgctggcaggggagactgtggacctctcaggcatcccgctgtcgacacaggacgtgcaacacatcacacgctacctgagcagccatggtgctgtgctggcggtgctggacctgagcttcacggggctgagtgatgagctgctgcacctcctgctgcccagcctgtgggcgctgccccgcctcacccagctcctgctcaacggcaaccgactgacgcgggccactgcccgcaagctcactgatgccatcaaggacaccaccaagttccctgctttggcttgggtggacctgggcaacaacgtggatgtggcttccctgccccagcccctgctggtcggcctgcgccggcggctgagccagcgcacctcactccccaccatctacgagggcctggaccttgagcctgagggcagtgcggccggggccaccacccctgcctccacctgggactccacagctgctgggctgggacccgagccccaggcctgctgtgccaggtgacccaccacccacctggctcattgctactgacttgtgatgctctcaagcacatgatagtgggcgatgaaggtcaaggaggactcacaggcccccagaaatccagtgtaaatgctcagcctgagattaaggggacagaagaatggactcataggtggccaggtggccagccctggctagaggctcagccttccctcagtgggaggggccccagcacccacagtgtggaccccgcaataaagagtgacacccgcaaaaaacaatactatcaccatctatttcgtcatcttgctcacatactacaaatctcatatgaacaactatacagaacatcagacgatactgtacact

SEQ ID NO: 50860 - DNA, 319 bp, Homo sapiens
cctggtgggcaactcggtgatgcatggtgcatgactgtgctcacacacacacttggctgcctgggtccctctccccaaggccctgaggtgggcaggaggggctcagattcaccatggtgacactgccctcccacaggactatgagctctggaagtcctcggacaagatctgccgacagctcatctaccacctcacccctcactcgaagcagcagcaagggtccagcctgcgccagaggaagacccagagctggtaagggtagcccagccactgcccctcctcactgctgctccaaggtcccttctcaggttgacacctg

SEQ ID NO: 50861 - DNA, 1775 bp, Homo sapiens
gtacacatccccagcatctgtgcatcacaacactcggtccggtggtggctctgctcctacacacaccaggacctgggccttgagaggaccctccttcctgatatcctctacagagatgtggccttcctcaacccggtcgaccccatctcccatgacctgcttgtgaacctggcccgggacctgcagtgccccaagaagctgcccagaaccccatgctgacagcacctgcagatgtcctgccatgagcatcgacacagccccaggatgtgtggctgtgaccagccaccggacccagactcctagtcacagtgagtccccaaccaaaaccagggtatccgctctgggccctgccagctctgaatgcccaggtctctgcacagtcggcccctaggactctgcgcctagcccacggccatcacaggaacagccagggcttgcagctgctgtgtgtgctgcctgctcctggggctgctcacagagggactggataaaggatgcagtggagcatgctcagtgccagctttgtgggccgcgcacctcggattccaccctgagctgggcctctgccggagcccagttaggactgagagagagccaggtggtggtgctgtaaaacattacatcccccagccctgtcagcccagacccagaccccgcaggcgcagtctcgcttggagagtgagaggaagaagaacacgctgacctggcttgttcctactccctgggattggcgtcagtggagcacggctccctcgaggggcctggtctggcctcctccccctgtggactatgagctctggaagtcctcggacaagatctgccgacagctcatctaccacctcacccctcactcgaagcagcagcaagggtccagcctgcgccagaggaagacccagagctgcctcaagagcagcctccagaagactctgctggcaggggagactgtggacctctcaggcatcccgctgtcgacacaggacgtgcaacacatcacacgctacctgagcagccatggtgctgtgctggcggtgctggacctgagcttcacggggctgagtgatgagctgctgcacctcctgctgcccagcctgtgggcgctgccccgcctcacccagctcctgctcaacggcaaccgactgacgcgggccactgcccgcaagctcactgatgccatcaaggacaccaccaagttccctgctttggcttgggtggacctgggcaacaacgtggatgtggcttccctgccccagcccctgctggtcggcctgcgccggcggctgagccagcgcacctcactccccaccatctacgagggcctggaccttgagcctgagggcagtgcggccggggccaccacccctgcctccacctgggactccacagctgctgggctgggacccgagccccaggcctgctgtgccaggtgacccaccacccacctggctcattgctactgacttgtgatgctctcaagcacatgatagtgggcgatgaaggtcaaggaggactcacaggcccccagaaatccagtgtaaatgctcagcctgagattaaggggacagaagaatggactcataggtggccaggtggccagccctggctagaggctcagccttccctcagtgggaggggccccagcacccacagtgtggaccccgcaataaagagtgacacccgcaaaaaacaatactatcaccatctatttcgtcatcttgctcacatactacaaatctcatatgaacaactatacagaacatcagacgatactgtacact

SEQ ID NO: 50862 - DNA, 1678 bp, Homo sapiens
gtacacatccccagcatctgtgcatcacaacactcggtccggtggtggctctgctcctacacacaccaggacctgggccttgagaggaccctccttcctgatatcctctacagagatgtggccttcctcaacccggtcgaccccatctcccatgacctgcttgtgaacctggcccgggacctgcagtgccccaagaagctgcccagaaccccatgctgacagcacctgcagatgtcctgccatgagcatcgacacagccccaggatgtgtggctgtgaccagccaccggacccagactcctagtcacagtgagtccccaaccaaaaccagggtatccgctctgggccctgccagctctgaatgcccaggtctctgcacagtcggcccctaggactctgcgcctagcccacggccatcacaggaacagccagggcttgcagctgctgtgtgtgctgcctgctcctggggctgctcacagagggactggataaaggatgcagtggagcatgctcagtgccagctttgtgggccgcgcacctcggattccaccctgagctgggcctctgccggagcccagttaggactgagagagagccaggtggtggtgctgtaaaacattacatcccccagccctgtcagcccagacccagaccccgcaggcgcagtctcgcttggagagtgagaggaagaagaacacgctgacctggcttgttcctactccctgggattggcgtcagtggagcacggctccctcgaggggcctggtctggcctcctccccctgtggactatgagctctggaagtcctcggacaagatctgccgacagctcatctaccacctcacccctcactcgaagcagcagcaagggtccagcctgcgccagaggaagacccagagctgcctcaagagcagcctccagaagactctgctggcaggggagactgtggacctctcaggcatcccgctgtcgacacaggacgtgcaacacatcacacgctacctgagcagccatggtgctgtgctggcggtgctggacctgagcttcacggggctgagtgatgagctgctgcacctcctgctgcccagcctgtgggcgctgccccgcctcacccagctcctgctcaacggcaaccgactgacgcgggccactgcccgcaagctcactgatgccatcaaggacaccaccaagttccctgctttggcttgggtggacctgggcaacaacgtggatgtggcttccctgccccagcccctgctggtcggcctgcgccggcggctgagccagcgcacctcactccccaccatctacgagggcctggaccttgagcctgagggcagtgcggccggggccaccacccctgcctccacctgggactccacagctgctgggctgggacccgagccccaggcctgctgtgccaggtgacccaccacccacctggctcattgctactgacttgtgatgctctcaagcacatgatagtgggcgatgaaggtcaaggaggactcacaggcccccagaaatccagtgtaaatgctcagcctgagattaaggggacagaagaatggactcataggtggccaggtggccagccctggctagaggctcagccttccctcagtgggaggggccccagcacccacagtgtggaccccgcaataaagagtgacacccgc

SEQ ID NO: 50863 - DNA, 625 bp, Homo sapiens
tggggaggggaaggagcggcacatggggttgagcagaggagaaaatcagaaagatggcttagagaagccagcagtctgcaagtctggggaggatggagagtggtttggggtttggggtcggggtctaaggtgatcagatgcagaagcattacacggtggcctggtttctttactcagcccctggggtagatcccagccccccatgtaggtcccttggctggaaaaggaagagggagtggtcagatgaatctgaggaggagccggagaaggagctcgcccctgagcctgaggagacctgggtagtggagatgctgtgtgggctcaagatgaagctgaagcaacagcgagtgtcacccatcctccctgagcaccacaaggacttcaacagtcagcttggtaggaggataccccagagagcacctccaatcctgttctttctaaaaagaggaaacttccaataaccacacttttccaatgggaaagatacgcccccagtggctgagctctccacgcaggaggactcagaagtgatcactcatgagggacacttaggagacgatagaggactaggctagacttgatcaaggttggcgcttgggatgagaaagcttggtttcgggccagg

SEQ ID NO: 50864 - DNA, 349 bp, Homo sapiens
gactcaaacatgtctctgggctgtcagttctgtcacttctgtcacttctgtgtcactgtactagggaaccgtacacatgggaagatttcaagggcgccaccatgagagcaatattcccttccttgccaaaactcttgtcttcttggcctgaaattctaccacctggcactttagcttaaggctctgattgtggttaaactacatctctcttgggaatgagaaccctttcagctatgatcagtccctcataccttcctgtgaatgagctctagatgcttagctaagagaagatcttgacggggaggctggggagtttgagggaagtagggagagaaggttggaaagagaa

SEQ ID NO: 50865 - DNA, 456 bp, Homo sapiens
tagaaaaagactgatgatatatatccgtagtatgcgctaccaaagcaaatggcagggacgactaagacccaaccttcatcaccaaagacaagtgtgaatgacacgctggttcacctaggcaaggcggattcagattcctcagcatgcggagttcctggaaattgataaaaatgggcacagcacagaaaatgggcagttcacaaaagtggtgcaggtgacccatgagaagttcacatcaccaatggttacagaaatgaaaatcattcaccagccacttgcccccaccagggctggctgcgtgaccttgggcagtgtctatgatcatctgttatgcagcaatacaaaacaaataccctctctcttttagtctgtatttttttctgaatattttgcagtggtttttcgttgttgctgtttttacatttaagctgtgaagtggcagacacaacacaaacc

SEQ ID NO: 50866 - DNA, 972 bp, Homo sapiens
aaaatgcaaagtgaaattgatcgagtcatgtaagattttgtgtccaaactccactgggctgtggataattttaccctcaaggtcctccacactgtagtatggacacccaggtgtgtcccatagaggacataacaaaaatgtatcttaactgggaaaaaaagattaacaaaaagaatgaagatgtgcctcagctgcatgaatatagaaggagaaagatccctctatgtcattccctgggtgatagcaggagaacattatcctaagtaggaaaaaaagacagtggaaacctggttgaaggagcttttttgcacatcaccctggggagccacaaaagagagacaggaacaaaagaacagctgcaaagggagtgaaagaaacccaaagaggcattggcacaggcctactgggaatatgatatggcaaagagagaaaatgaggtctgttttctagttagagaagattgatctattcaaaggactttaaattttgttgattcactttgggtgcatccatgtgaaggtttgagttttgaatcatcatgatttttagccagtaaaagtgttctgggttttagcttcacccacatggacctcaactcgctatttagaagtctactgcccttcaggtgggttgccaacagactctgcctttgctgtacctgggagaatggcttcctcatcaccacattctgcatccttccaagatggcagtgaagatcttcccagggcatctggcattagcagaatgcggctgatgaggaaatatgaccccagtttaggccgttttaccagaatattacacaaattacaaaataacttgatagctagaagagaggattttgaatgtttttactacaaagaaatgattaatgtttgaggtggtggatttgttaattaccctgatttgatccttgtacaatgtatatcaaacatctcattgtacaccagaaatatgtataattttgtgtcaatt

SEQ ID NO: 50867 - DNA, 380 bp, Homo sapiens
gtgattctggcctcctaaagtgctgggattagaggtgtgagctactgcgcccagcctgtcatttaatcttcatggaaactaccatagcttttctgattcttcgttctagtctggctggttgataatatatttaatggaatcattaaaagtttagggttgaaaatttgtggtaaatttgtgaattctttaaattgagcattttgaagtattttctccccacagggattctgaaaacatattagattatacacacacagaagcaaagacagctgaaccttgaggccatttgaaaatcctggcactgtgccagaaagagagctgggctgctgctcttgcaaagaaacagaacacctttcctcttgcttttgttgactgtaatg

SEQ ID NO: 50868 - DNA, 187 bp, Homo sapiens
agaaaaggcccagaagacaagcttttaggaagcagatgcagcccttctccagggggaagttgggggtgggaatatggcagagatgtctgagatgaccgtttgagaaagaaggcactggagtgggcagtgaggactggaacatggtgtggaaggtcctcccacctccctgtctcgacttaattttttt

SEQ ID NO: 50869 - DNA, 322 bp, Homo sapiens
aggcatggactggagccccaaaggcagggtacacgcttctcctgaacctgcttcttgtttcctctatatggctccatttgtggcaaagttgttgcactgaaacttgtgcatgccgggcaaggacaagctggctcaaagagcaaccagccacctctgcaaaggtgtagcaggagccggtgtaccagtcaccaattagcgtcctaccctaaaggtagggccacagtgccatctgcttttcttaaggcctctgctccatcagcaataaggtggcagacactcaggctgtgggaacctggccatccccacttcctcgagcgggtga

SEQ ID NO: 50870 - DNA, 359 bp, Homo sapiens
gttctccaattactgagaaatataatggctaggaatcacatgaggactttataaaaaagcagcctcctggagcttcctcccactcagagtaactgaggaatctgtcccagagacccccaccaccaaccacacattggagaacaggggccaacagggcaaagtacagactttccagcaggccctagaaggcccccaggatctgggctctgtccagctctctaccatcccctgttctcccctcacatcctaagcattaactgcatgccagtgtcgggccacagggatgggtacagaggcatgtcaggcaaagcagcctgtagtcacagactatgtgggcatagaattgcaggagcacattt

SEQ ID NO: 50871 - DNA, 601 bp, Homo sapiens
tagaccaagtttgattaggcaacttgtttgttccacttttgttcaacccagcagttttaaaagaatgcagagtcttagttcaaaatggttccctttgcttgaaaaatcttaaaaacattggagtgcagttcaggatttaccaaattaaggttcagcttaaagctgatggtgcttctgttggtgtttgttcagaatctgtatttttagtcactttttaaaaaattacttggctcctgtttgtggacccttgtaagccaactgagttacccagatgctaactacatattcacatatggctataacctcctgagagtgtcaggtccataagtctgtgttctctgtatgaaacaaaggacctatggggaaagtggaacctgtaattccagagaaaaggagctttcttcacaaatgttgctttttagtggctcctatcccagaatcaatggaaagaaaattggaccttttaggtattcatgctgacaggtggtctcataacaaatttctcagctatccaaaggatgaaaaactgtaggtatctatcatttttaaaaaaaacaagatgaggaagctcttcatataccaatacagaattttcctaaga

SEQ ID NO: 50872 - DNA, 162 bp, Homo sapiens
tataaggtttgaggtatataggttgagattaatttctttgtatatgggtatctagttgttccaacagtgtatgttgaaaagactatcctttctctattgaattgcctttgaaactttgctcaaaacaactgcccattatttgtgggggtctatttttttcat

SEQ ID NO: 50873 - DNA, 336 bp, Homo sapiens
aactttttggtgatagggtttctgtgctgagccctaagcccatgccccactctacatatgctgccttttgataatgcaatccaaatcactcaattcaaaacaattgttttccttgctcttatataacagataaacttggtggttgctagaaactacataaaattccaaaaataagggggccaggttttattcctgtgttgcctggaatatcttcagatcaaacaagagcaaaaagggcctttgagacaggtgtggtctgtgtgcaagatgctcatatcttcctctgtagtccgcaaacttttgtttttagcagtacaactccttttgcaaatgaaa

SEQ ID NO: 50874 - DNA, 1321 bp, Homo sapiens
atttcagtccaactcccactgcgcaggcgcttacagtgcaccaagatggccgcccccgtggatctagagctgaagaaggccttcacagagcttcaagccaaagttattgacactcaacagaaggtgaagctcgcagacatacagattgaacagctaaacagaacgaaaaagcatgcacatcttacagatacagagatcatgactttggtagatgagactaacatgtatgaaggtgtaggaagaatgtttattcttcagtccaaggaagcaattcacagtcagctgttagagaagcagaaaatagcagaagaaaaaattaaagaactagaacagaaaaagtcctacctggagcgaagcgttaaggaagctgaggacaacatccgggagatgctgatggcacgaagggcccagtagggagcctctctgggaagctcttcctcctgcccctcccattcctggtgggggcagaggagtgtctgcagggaaacagcttctcctctgccccgatggatgctttatttggatggcctggcaacatcacattttctgcatcaccctgagccccatttgcttcccagccctggagtttttacccggctttgcctgccacctctgcccaggacactcttccctctcgggatgtgtgatgaactcccaggagagggaagatgggagccagggcaagataggaagctctgcctgagctttccactaggcacgccagccagaccaataaaaagcgtctgtcccactctgctaagcctggttttcttgagcagagggatggaacagagggtgagagaggcagtggccgtctccacctcagctcctgctccctctgcatcagagcccttcctttcttgggggatgggccttgccctcttctcttttcccttcctgtacctttgactaacgctcagcttccgggcctgcatgcagtagacagaagaggaagaaagaacagatgttcacagctgaatctcagtgaacagaatagcagtccctggatggcagtctgcctaaagattcctttccctgccttctcccatacattccaaaaggaagttcaacagtaagcagcacctccaagactgtctccttttggccaatatcataagatggacgccataatcctgaggcctcctagaggctgagggggcaacggtgtgatccagctggctcatcccagcccaggtgggccaattattcaattttcaagaattttgttgcaagccagttgtcaaacacagccattataattatgtaaatttgcaaattatgttaaaaacaaggacaataaatattcaaaatgcatccctaa

SEQ ID NO: 50875 - DNA, 1323 bp, Homo sapiens
cttgtggcccaattcaagcttgattcaggaattcggcacgacccaagatggccgcccccgtggatctagagctgaagaaggccttcacagagcttcaagccaaagttattgacactcaacagaaggtgaagctcgcagacatacagattgaacagctaaacagaacgaaaaagcatgcacatcttacagatacagagatcatgactttggtagatgagactaacatgtatgaaggtgtaggaagaatgtttattcttcagtccaaggaagcaattcacagtcagctgttagagaagcagaaaatagcagaagaaaaaattaaagaactagaacagaaaaagtcctacctggagcgaagcgttaaggaagctgaggacaacatccgggagatgctgatggcacgaagggcccagtagggagcctctctgggaagctcttcctcctgcccctcccattcctggtgggggcagaggagtgtctgcagggaaacagcttctcctctgccccgatggatgctttatttggatggcctggcaacatcacattttctgcatcaccctgagccccatttgcttcccagccctggagtttttacccggctttgcctgccacctctgcccaggacactcttccctctcgggatgtgtgatgaactcccaggagagggaagatgggagccagggcaagataggaagctctgcctgagctttccactaggcacgccagccagaccaataaaaagcgtctgtcccactctgctaagcctggttttcttgagcagagggatggaacagagggtgagagaggcagtggccgtctccacctcagctcctgctccctctgcatcagagcccttcctttcttgggggatgggccttgccctcttctcttttcccttcctgtacctttgactaacgctcagcttccgggcctgcatgcagtagacagaagaggaagaaagaacagatgttcacagctgaatctcagtgaacagaatagcagtccctggatggcagtctgcctaaagattcctttccctgccttctcccatacattccaaaaggaagttcaacagtaagcagcacctccaagactgtctccttttggccaatatcataagatggacgccataatcctgaggcctcctagaggctgagggggcaacggtgtgatccagctggctcatcccagcccaggtgggccaattattcaattttcaagaattttgttgcaagccagttgtcaaacacagccattataattatgtaaatttgcaaattatgttaaaaacaaggacaataaatattcaaaatgcatccctaa

SEQ ID NO: 50876 - DNA, 1776 bp, Homo sapiens
atttcagtccaactcccactgcgcaggcgcttacagtgcaccaagatggccgcccccgtggatctagagctgaagaaggccttcacagagcttcaagccaaagttattgacactcaacagaaggtgaagctcgcagacatacagattgaacagctaaacagaacgaaaaagcatgcacatcttacagatacagagatcatgactttggtagatgagactaacatgtatgaaggtgtaggaagaatgtttattcttcagtccaaggaagcaattcacagtcagctgttagagaagcagaaaatagcagaagaaaaaattaaagaactagaacagaaaaagtcctacctggagcgaagcgttaaggaagctgaggacaacatccgggagatgctgatggcacgaagggcccagtagggagcctctctgggaagctcttcctcctgcccctcccattcctggtgggggcagaggagtgtctgcagggaaacagcttctcctctgccccgatggatgctttatttggatggcctggcaacatcacattttctgcatcaccctgagccccatttgcttcccagccctggagtttttacccggctttgcctgccacctctgcccaggacactcttccctctcgggatgtgtgatgaactcccaggagagggaagatgggagccagggcaagataggaagctctgcctgagctttccactaggcacgccagccagaccaataaaaagcgtctgtcccactctgctaagcctggttttcttgagcagagggatggaacagagggtgagagaggcagtggccgtctccacctcagctcctgctccctctgcatcagagcccttcctttcttgggggatgggccttgccctcttctcttttcccttcctgtacctttgactaacgctcagcttccgggcctgcatgcagtagacagaagaggaagaaagaacagatgttcacagctgaatctcagtgaacagaatagcagtccctggatggcagtctgcctaaagattcctttccctgccttctcccatacattccaaaaggaagttcaacagtaagcagcacctccaagactgtctccttttggccaatatcataagatggacgccataatcctgaggcctcctagaggctgagggggcaacggtgtgatccagctggctcatcccagcccaggtgggccaattattcaattttcaagaattttgttgcaagccagttgtcaaacacagccattataattatgtaaatttgcaaattatgttaaaaacaaggacaataaatattcaaaatgcatccctaaaaaaaaacaaaaaaaaaaaaaaaaaaaaaaacagaacaacaaaacaaaaaaaaaaacaaggggggggcggcgggcaaaagaaagacaccccagggggggcgccaaaaagtaggtgggcgcccccgcggttgttcttgtgagaacacaaggaggggcacccaaaaggagaggcaccaaatcaaaaaagacagaaagacacggggacgccaaataaaaaaccacggcagacagaagcggaaaaaaaacagacacacgagaagaccaaggaggagaggaaacaaccaaacacggagagagggagcacaccaaaatgagaagcaaacaacaacacacaacaaaaaaaaacgcccaaggacaacataaaacacaaaacagaaaagcaacgggaaacaaaaaaccaaagcacccgcataagaaaatatacaaaaagacaaggacgaagaacaaaatacacg

SEQ ID NO: 50877 - DNA, 1735 bp, Homo sapiens
  misc_feature (1502)..(1502): n is a, c, g, or t
  misc_feature (1620)..(1620): n is a, c, g, or t
atttcagtccaactcccactgcgcaggcgcttacagtgcaccaagatggccgcccccgtggatctagagctgaagaaggccttcacagagcttcaagccaaagttattgacactcaacagaaggtgaagctcgcagacatacagattgaacagctaaacagaacgaaaaagcatgcacatcttacagatacagagatcatgactttggtagatgagactaacatgtatgaaggtgtaggaagaatgtttattcttcagtccaaggaagcaattcacagtcagctgttagagaagcagaaaatagcagaagaaaaaattaaagaactagaacagaaaaagtcctacctggagcgaagcgttaaggaagctgaggacaacatccgggagatgctgatggcacgaagggcccagtagggagcctctctgggaagctcttcctcctgcccctcccattcctggtgggggcagaggagtgtctgcagggaaacagcttctcctctgccccgatggatgctttatttggatggcctggcaacatcacattttctgcatcaccctgagccccatttgcttcccagccctggagtttttacccggctttgcctgccacctctgcccaggacactcttccctctcgggatgtgtgatgaactcccaggagagggaagatgggagccagggcaagataggaagctctgcctgagctttccactaggcacgccagccagaccaataaaaagcgtctgtcccactctgctaagcctggttttcttgagcagagggatggaacagagggtgagagaggcagtggccgtctccacctcagctcctgctccctctgcatcagagcccttcctttcttgggggatgggccttgccctcttctcttttcccttcctgtacctttgactaacgctcagcttccgggcctgcatgcagtagacagaagaggaagaaagaacagatgttcacagctgaatctcagtgaacagaatagcagtccctggatggcagtctgcctaaagattcctttccctgccttctcccatacattccaaaaggaagttcaacagtaagcagcacctccaagactgtctccttttggccaatatcataagatggacgccataatcctgaggcctcctagaggctgagggggcaacggtgtgatccagctggctcatcccagcccaggtgggccaattattcaattttcaagaattttgttgcaagccagttgtcaaacacagccattataattatgtaaatttgcaaattatgttaaaaacaaggacaataaatattcaaaatgcatccctaaaaaaaaacaaaaaaaaaaaaaaaaaaaaaaagtgtgtgtgtgggcgcggcctgtgggcctgtggagaaaagttttttcaaacaccatttggttgtggggcgcgcgggggccccgttggtgtatgggagcacagggcgcaacacaaagcacgggtggcccacaaggagagaacccggggtcngagaacacagagtgcgcgggggggcatctttgccaacccgacataaaaaaaaaaaaggcccgggggggggaacacaccgagcgaggcgtgcggggaaacaaactctctcccagaggcngggcgcctagcgggaggaggcaacacataacgggggcaccattcaatacacaggggggggtcccacaagggaaggcctccgcattcacaaaattaagccccgcgcgcgggggggt

SEQ ID NO: 50878 - DNA, 1356 bp, Homo sapiens
atttcagtccaactcccactgcgcaggcgcttacagtgcaccaagatggccgcccccgtggatctagagctgaagaaggccttcacagagcttcaagccaaagttattgacactcaacagaaggtgaagctcgcagacatacagattgaacagctaaacagaacgaaaaagcatgcacatcttacagatacagagatcatgactttggtagatgagactaacatgtatgaaggtgtaggaagaatgtttattcttcagtccaaggaagcaattcacagtcagctgttagagaagcagaaaatagcagaagaaaaaattaaagaactagaacagaaaaagtcctacctggagcgaagcgttaaggaagctgaggacaacatccgggagatgctgatggcacgaagggcccagtagggagcctctctgggaagctcttcctcctgcccctcccattcctggtgggggcagaggagtgtctgcagggaaacagcttctcctctgccccgatggatgctttatttggatggcctggcaacatcacattttctgcatcaccctgagccccatttgcttcccagccctggagtttttacccggctttgcctgccacctctgcccaggacactcttccctctcgggatgtgtgatgaactcccaggagagggaagatgggagccagggcaagataggaagctctgcctgagctttccactaggcacgccagccagaccaataaaaagcgtctgtcccactctgctaagcctggttttcttgagcagagggatggaacagagggtgagagaggcagtggccgtctccacctcagctcctgctccctctgcatcagagcccttcctttcttgggggatgggccttgccctcttctcttttcccttcctgtacctttgactaacgctcagcttccgggcctgcatgcagtagacagaagaggaagaaagaacagatgttcacagctgaatctcagtgaacagaatagcagtccctggatggcagtctgcctaaagattcctttccctgccttctcccatacattccaaaaggaagttcaacagtaagcagcacctccaagactgtctccttttggccaatatcataagatggacgccataatcctgaggcctcctagaggctgagggggcaacggtgtgatccagctggctcatcccagcccaggtgggccaattattcaattttcaagaattttgttgcaagccagttgtcaaacacagccattataattatgtaaatttgcaaattatgttaaaaacaaggacaataaatattcaaaatgcatccctaacctaattactacatttgaccacgatctgtgctcta

SEQ ID NO: 50879 - DNA, 1360 bp, Homo sapiens
atttcagtccaactcccactgcgcaggcgcttacagtgcaccaagatggccgcccccgtggatctagagctgaagaaggccttcacagagcttcaagccaaagttattgacactcaacagaaggtgaagctcgcagacatacagattgaacagctaaacagaacgaaaaagcatgcacatcttacagatacagagatcatgactttggtagatgagactaacatgtatgaaggtgtaggaagaatgtttattcttcagtccaaggaagcaattcacagtcagctgttagagaagcagaaaatagcagaagaaaaaattaaagaactagaacagaaaaagtcctacctggagcgaagcgttaaggaagctgaggacaacatccgggagatgctgatggcacgaagggcccagtagggagcctctctgggaagctcttcctcctgcccctcccattcctggtgggggcagaggagtgtctgcagggaaacagcttctcctctgccccgatggatgctttatttggatggcctggcaacatcacattttctgcatcaccctgagccccatttgcttcccagccctggagtttttacccggctttgcctgccacctctgcccaggacactcttccctctcgggatgtgtgatgaactcccaggagagggaagatgggagccagggcaagataggaagctctgcctgagctttccactaggcacgccagccagaccaataaaaagcgtctgtcccactctgctaagcctggttttcttgagcagagggatggaacagagggtgagagaggcagtggccgtctccacctcagctcctgctccctctgcatcagagcccttcctttcttgggggatgggccttgccctcttctcttttcccttcctgtacctttgactaacgctcagcttccgggcctgcatgcagtagacagaagaggaagaaagaacagatgttcacagctgaatctcagtgaacagaatagcagtccctggatggcagtctgcctaaagattcctttccctgccttctcccatacattccaaaaggaagttcaacagtaagcagcacctccaagactgtctccttttggccaatatcataagatggacgccataatcctgaggcctcctagaggctgagggggcaacggtgtgatccagctggctcatcccagcccaggtgggccaattattcaattttcaagaattttgttgcaagccagttgtcaaacacagccattataattatgtaaatttgcaaattatgttaaaaacaaggacaataaatattcaaaatgcatccctaaaaaaaaaaagtcgacgcggccgcgaatttagtagtagta

SEQ ID NO: 50880 - DNA, 1329 bp, Homo sapiens
  misc_feature (1288)..(1288): n is a, c, g, or t
  misc_feature (1291)..(1291): n is a, c, g, or t
  misc_feature (1297)..(1297): n is a, c, g, or t
  misc_feature (1310)..(1310): n is a, c, g, or t
  misc_feature (1313)..(1313): n is a, c, g, or t
atttcagtccaactcccactgcgcaggcgcttacagtgcaccaagatggccgcccccgtggatctagagctgaagaaggccttcacagagcttcaagccaaagttattgacactcaacagaaggtgaagctcgcagacatacagattgaacagctaaacagaacgaaaaagcatgcacatcttacagatacagagatcatgactttggtagatgagactaacatgtatgaaggtgtaggaagaatgtttattcttcagtccaaggaagcaattcacagtcagctgttagagaagcagaaaatagcagaagaaaaaattaaagaactagaacagaaaaagtcctacctggagcgaagcgttaaggaagctgaggacaacatccgggagatgctgatggcacgaagggcccagtagggagcctctctgggaagctcttcctcctgcccctcccattcctggtgggggcagaggagtgtctgcagggaaacagcttctcctctgccccgatggatgctttatttggatggcctggcaacatcacattttctgcatcaccctgagccccatttgcttcccagccctggagtttttacccggctttgcctgccacctctgcccaggacactcttccctctcgggatgtgtgatgaactcccaggagagggaagatgggagccagggcaagataggaagctctgcctgagctttccactaggcacgccagccagaccaataaaaagcgtctgtcccactctgctaagcctggttttcttgagcagagggatggaacagagggtgagagaggcagtggccgtctccacctcagctcctgctccctctgcatcagagcccttcctttcttgggggatgggccttgccctcttctcttttcccttcctgtacctttgactaacgctcagcttccgggcctgcatgcagtagacagaagaggaagaaagaacagatgttcacagctgaatctcagtgaacagaatagcagtccctggatggcagtctgcctaaagattcctttccctgccttctcccatacattccaaaaggaagttcaacagtaagcagcacctccaagactgtctccttttggccaatatcataagatggacgccataatcctgaggcctcctagaggctgagggggcaacggtgtgatccagctggctcatcccagcccaggtgggccaattattcaattttcaagaattttgttgcaagccagttgtcaaacacagccattataattatgtaaatttgcaaattatgttaacanaantacacnggccccagggtanatncttcaaatgactcact

SEQ ID NO: 50881 - DNA, 1133 bp, Homo sapiens
  misc_feature (21)..(21): n is a, c, g, or t
taccggtccggaattcccggngatatggccgcccccgtggatctagagctgaagaaggtttattcttcagtccaaggaagcaattcacagtcagctgttagagaagcagaaaatagcagaagaaaaaattaaagaactagaacagaaaaagtcctacctggagcgaagcgttaaggaagctgaggacaacatccgggagatgctgatggcacgaagggcccagtagggagcctctctgggaagctcttcctcctgcccctcccattcctggtgggggcagaggagtgtctgcagggaaacagcttctcctctgccccgatggatgctttatttggatggcctggcaacatcacattttctgcatcaccctgagccccatttgcttcccagccctggagtttttacccggctttgcctgccacctctgcccaggacactcttccctctcgggatgtgtgatgaactcccaggagagggaagatgggagccagggcaagataggaagctctgcctgagctttccactaggcacgccagccagaccaataaaaagcgtctgtcccactctgctaagcctggttttcttgagcagagggatggaacagagggtgagagaggcagtggccgtctccacctcagctcctgctccctctgcatcagagcccttcctttcttgggggatgggccttgccctcttctcttttcccttcctgtacctttgactaacgctcagcttccgggcctgcatgcagtagacagaagaggaagaaagaacagatgttcacagctgaatctcagtgaacagaatagcagtccctggatggcagtctgcctaaagattcctttccctgccttctcccatacattccaaaaggaagttcaacagtaagcagcacctccaagactgtctccttttggccaatatcataagatggacgccataatcctgaggcctcctagaggctgagggggcaacggtgtgatccagctggctcatcccagcccaggtgggccaattattcaattttcaagaattttgttgcaagccagttgtcaaacacagccattataattatgtaaatttgcaaattatgttaaaaacaaggacaataaatattcaaaatgcatccctaa

SEQ ID NO: 50882 - DNA, 1384 bp, Homo sapiens
ggtgaaaagtaccatttgcttgctgttcctatgtaaaaatattaaggtagcagcagtctgaactgttaactttgtcactgaggaattgtgtgctgtaactgacttaattagctgaatttctctgaaaacagtcaattttaagccataccaagaattttctgattttagctgccacttatctcatagtgcaaagttaggaataacttactatctaatctgagagagaggactgaaatgttcatgtcaaggaacataatctgcttaatgaaatatccaagaaggagctcagaaaaatattgacttagaaggtttattcttcagtccaaggaagcaattcacagtcagctgttagagaagcagaaaatagcagaagaaaaaattaaagaactagaacagaaaaagtcctacctggagcgaagcgttaaggaagctgaggacaacatccgggagatgctgatggcacgaagggcccagtagggagcctctctgggaagctcttcctcctgcccctcccattcctggtgggggcagaggagtgtctgcagggaaacagcttctcctctgccccgatggatgctttatttggatggcctggcaacatcacattttctgcatcaccctgagccccatttgcttcccagccctggagtttttacccggctttgcctgccacctctgcccaggacactcttccctctcgggatgtgtgatgaactcccaggagagggaagatgggagccagggcaagataggaagctctgcctgagctttccactaggcacgccagccagaccaataaaaagcgtctgtcccactctgctaagcctggttttcttgagcagagggatggaacagagggtgagagaggcagtggccgtctccacctcagctcctgctccctctgcatcagagcccttcctttcttgggggatgggccttgccctcttctcttttcccttcctgtacctttgactaacgctcagcttccgggcctgcatgcagtagacagaagaggaagaaagaacagatgttcacagctgaatctcagtgaacagaatagcagtccctggatggcagtctgcctaaagattcctttccctgccttctcccatacattccaaaaggaagttcaacagtaagcagcacctccaagactgtctccttttggccaatatcataagatggacgccataatcctgaggcctcctagaggctgagggggcaacggtgtgatccagctggctcatcccagcccaggtgggccaattattcaattttcaagaattttgttgcaagccagttgtcaaacacagccattataattatgtaaatttgcaaattatgttaaaaacaaggacaataaatattcaaaatgcatccctaa

SEQ ID NO: 50883 - DNA, 1156 bp, Homo sapiens
cttgtggcccaattcaagcttgattcaggaattcggcacgacccaagatggccgcccccgtggatctagagctgaagaaggtttattcttcagtccaaggaagcaattcacagtcagctgttagagaagcagaaaatagcagaagaaaaaattaaagaactagaacagaaaaagtcctacctggagcgaagcgttaaggaagctgaggacaacatccgggagatgctgatggcacgaagggcccagtagggagcctctctgggaagctcttcctcctgcccctcccattcctggtgggggcagaggagtgtctgcagggaaacagcttctcctctgccccgatggatgctttatttggatggcctggcaacatcacattttctgcatcaccctgagccccatttgcttcccagccctggagtttttacccggctttgcctgccacctctgcccaggacactcttccctctcgggatgtgtgatgaactcccaggagagggaagatgggagccagggcaagataggaagctctgcctgagctttccactaggcacgccagccagaccaataaaaagcgtctgtcccactctgctaagcctggttttcttgagcagagggatggaacagagggtgagagaggcagtggccgtctccacctcagctcctgctccctctgcatcagagcccttcctttcttgggggatgggccttgccctcttctcttttcccttcctgtacctttgactaacgctcagcttccgggcctgcatgcagtagacagaagaggaagaaagaacagatgttcacagctgaatctcagtgaacagaatagcagtccctggatggcagtctgcctaaagattcctttccctgccttctcccatacattccaaaaggaagttcaacagtaagcagcacctccaagactgtctccttttggccaatatcataagatggacgccataatcctgaggcctcctagaggctgagggggcaacggtgtgatccagctggctcatcccagcccaggtgggccaattattcaattttcaagaattttgttgcaagccagttgtcaaacacagccattataattatgtaaatttgcaaattatgttaaaaacaaggacaataaatattcaaaatgcatccctaa

SEQ ID NO: 50884 - DNA, 1119 bp, Homo sapiens
caggcagggaaggcgaggcgatatagagacgaacgaggttcaggtttattcttcagtccaaggaagcaattcacagtcagctgttagagaagcagaaaatagcagaagaaaaaattaaagaactagaacagaaaaagtcctacctggagcgaagcgttaaggaagctgaggacaacatccgggagatgctgatggcacgaagggcccagtagggagcctctctgggaagctcttcctcctgcccctcccattcctggtgggggcagaggagtgtctgcagggaaacagcttctcctctgccccgatggatgctttatttggatggcctggcaacatcacattttctgcatcaccctgagccccatttgcttcccagccctggagtttttacccggctttgcctgccacctctgcccaggacactcttccctctcgggatgtgtgatgaactcccaggagagggaagatgggagccagggcaagataggaagctctgcctgagctttccactaggcacgccagccagaccaataaaaagcgtctgtcccactctgctaagcctggttttcttgagcagagggatggaacagagggtgagagaggcagtggccgtctccacctcagctcctgctccctctgcatcagagcccttcctttcttgggggatgggccttgccctcttctcttttcccttcctgtacctttgactaacgctcagcttccgggcctgcatgcagtagacagaagaggaagaaagaacagatgttcacagctgaatctcagtgaacagaatagcagtccctggatggcagtctgcctaaagattcctttccctgccttctcccatacattccaaaaggaagttcaacagtaagcagcacctccaagactgtctccttttggccaatatcataagatggacgccataatcctgaggcctcctagaggctgagggggcaacggtgtgatccagctggctcatcccagcccaggtgggccaattattcaattttcaagaattttgttgcaagccagttgtcaaacacagccattataattatgtaaatttgcaaattatgttaaaaacaaggacaataaatattcaaaatgcatccctaa

SEQ ID NO: 50885 - DNA, 1129 bp, Homo sapiens
gtgtattgattatttgcgtagaacctgcaggagacgacaggcgaagagctcaggtttattcttcagtccaaggaagcaattcacagtcagctgttagagaagcagaaaatagcagaagaaaaaattaaagaactagaacagaaaaagtcctacctggagcgaagcgttaaggaagctgaggacaacatccgggagatgctgatggcacgaagggcccagtagggagcctctctgggaagctcttcctcctgcccctcccattcctggtgggggcagaggagtgtctgcagggaaacagcttctcctctgccccgatggatgctttatttggatggcctggcaacatcacattttctgcatcaccctgagccccatttgcttcccagccctggagtttttacccggctttgcctgccacctctgcccaggacactcttccctctcgggatgtgtgatgaactcccaggagagggaagatgggagccagggcaagataggaagctctgcctgagctttccactaggcacgccagccagaccaataaaaagcgtctgtcccactctgctaagcctggttttcttgagcagagggatggaacagagggtgagagaggcagtggccgtctccacctcagctcctgctccctctgcatcagagcccttcctttcttgggggatgggccttgccctcttctcttttcccttcctgtacctttgactaacgctcagcttccgggcctgcatgcagtagacagaagaggaagaaagaacagatgttcacagctgaatctcagtgaacagaatagcagtccctggatggcagtctgcctaaagattcctttccctgccttctcccatacattccaaaaggaagttcaacagtaagcagcacctccaagactgtctccttttggccaatatcataagatggacgccataatcctgaggcctcctagaggctgagggggcaacggtgtgatccagctggctcatcccagcccaggtgggccaattattcaattttcaagaattttgttgcaagccagttgtcaaacacagccattataattatgtaaatttgcaaattatgttaaaaacaaggacaataaatattcaaaatgcatccctaa

SEQ ID NO: 50886 - DNA, 1275 bp, Homo sapiens
atttcagtccaactcccactgcgcaggcgcttacagtgcaccaagatggccgcccccgtggatctagagctgaagaaggccttcacagagcttcaagccaaagttattgacactcaacagaaggtgaagctcgcagacatacagattgaacagctaaacagaacgaaaaagcatgcacatcttacagatacagagatcatgactttggtagatgagactaacatgtatgaaggtgtaggaagaatgtttattcttcagtccaaggaagcaattcacagtcagctgttagagaagcagaaaatagcagaagaaaaaattaaagaactagaacagaaaaagtcctacctggagcgaagcgttaaggaagctgaggacaacatccgggagatgctgatggcacgaagggcccagtagggagcctctctgggaagctcttcctcctgcccctcccattcctggtgggggcagaggagtgtctgcagggaaacagcttctcctctgccccgatggatgctttatttggatggcctggcaacatcacattttctgcatcaccctgagccccatttgcttcccagccctggagtttttacccggctttgcctgccacctctgcccaggacactcttccctctcgggatgtgtgatgaactcccaggagagggaagatgggagccagggcaagataggaagctctgcctgagctttccactaggcacgccagccagaccaataaaaagcgtcagagggtgagagaggcagtggccgtctccacctcagctcctgctccctctgcatcagagcccttcctttcttgggggatgggccttgccctcttctcttttcccttcctgtacctttgactaacgctcagcttccgggcctgcatgcagtagacagaagaggaagaaagaacagatgttcacagctgaatctcagtgaacagaatagcagtccctggatggcagtctgcctaaagattcctttccctgccttctcccatacattccaaaaggaagttcaacagtaagcagcacctccaagactgtctccttttggccaatatcataagatggacgccataatcctgaggcctcctagaggctgagggggcaacggtgtgatccagctggctcatcccagcccaggtgggccaattattcaattttcaagaattttgttgcaagccagttgtcaaacacagccattataattatgtaaatttgcaaattatgttaaaaacaaggacaataaatattcaaaatgcatccctaa

SEQ ID NO: 50887 - DNA, 1343 bp, Homo sapiens
tcgcaggcgcctgagagaatggagcgagagtggtgcgtacccgtgcgaattacagggtcactactgcgctcactgcatcatgaacgcgcagaagctaattgacctgtactcccgaacgcgtatagctcgcagacatacagattgaacagctaaacagaacgaaaaagcatgcacatcttacagatacagagatcatgactttggtagatgagactaacatgtatgaaggtgtaggaagaatttcattcttcgagctccgaaggcaagccaattcaccaggtcgagcgtgttcagcagcacagccagcaaacatcagccagcaagcaaaacacattaaagacactagaacagccagaaaaagtcctacctggagcgaagcgttaaggaagctgaggacaacatccgggagatgctgatggcacgaagggcccagtagggagcctctctgggaagctcttcctcctgcccctcccattcctggtgggggcagaggagtgtctgcagggaaacagcttctcctctgccccgatggatgctttatttggatggcctggcaacatcacattttctgcatcaccctgagccccatttgcttcccagccctggagtttttacccggctttgcctgccacctctgcccaggacactcttccctctcgggatgtgtgatgaactcccaggagagggaagatgggagccagggcaagataggaagctctgcctgagctttccactaggcacgccagccagaccaataaaaagcgtctgtcccactctgctaagcctggttttcttgagcagagggatggaacagagggtgagagaggcagtggccgtctccacctcagctcctgctccctctgcatcagagcccttcctttcttgggggatgggccttgccctcttctcttttcccttcctgtacctttgactaacgctcagcttccgggcctgcatgcagtagacagaagaggaagaaagaacagatgttcacagctgaatctcagtgaacagaatagcagtccctggatggcagtctgcctaaagattcctttccctgccttctcccatacattccaaaaggaagttcaacagtaagcagcacctccaagactgtctccttttggccaatatcataagatggacgccataatcctgaggcctcctagaggctgagggggcaacggtgtgatccagctggctcatcccagcccaggtgggccaattattcaattttcaagaattttgttgcaagccagttgtcaaacacagccattataattatgtaaatttgcaaattatgttaaaaacaaggacaataaatattcaaaatgcatccctaa

SEQ ID NO: 50888 - DNA, 1269 bp, Homo sapiens
atttcagtccaactcccactgcgcaggcgcttacagtgcaccaagatggccgcccccgtggatctagagctgaagaaggccttcacagagcttcaagccaaagttattgacactcaacagaaggtgaagctcgcagacatacagattgaacagctaaacagaacgaaaaagcatgcacatcttacagatacagagatcatgactttggtagatgagactaacatgtatgaaggtgtaggaagaatgtttattcttcagtccaaggaagcaattcacagtcagctgttagagaagcagaaaatagcagaagaaaaaattaaagaactagaagggagatgctgatggcacgaagggcccagtagggagcctctctgggaagctcttcctcctgcccctcccattcctggtgggggcagaggagtgtctgcagggaaacagcttctcctctgccccgatggatgctttatttggatggcctggcaacatcacattttctgcatcaccctgagccccatttgcttcccagccctggagtttttacccggctttgcctgccacctctgcccaggacactcttccctctcgggatgtgtgatgaactcccaggagagggaagatgggagccagggcaagataggaagctctgcctgagctttccactaggcacgccagccagaccaataaaaagcgtctgtcccactctgctaagcctggttttcttgagcagagggatggaacagagggtgagagaggcagtggccgtctccacctcagctcctgctccctctgcatcagagcccttcctttcttgggggatgggccttgccctcttctcttttcccttcctgtacctttgactaacgctcagcttccgggcctgcatgcagtagacagaagaggaagaaagaacagatgttcacagctgaatctcagtgaacagaatagcagtccctggatggcagtctgcctaaagattcctttccctgccttctcccatacattccaaaaggaagttcaacagtaagcagcacctccaagactgtctccttttggccaatatcataagatggacgccataatcctgaggcctcctagaggctgagggggcaacggtgtgatccagctggctcatcccagcccaggtgggccaattattcaattttcaagaattttgttgcaagccagttgtcaaacacagccattataattatgtaaatttgcaaattatgttaaaaacaaggacaataaatattcaaaatgcatccctaa

SEQ ID NO: 50889 - DNA, 1261 bp, Homo sapiens
atttcagtccaactcccactgcgcaggcgcttacagtgcaccaagatggccgcccccgtggatctagagctgaagaaggccttcacagagcttcaagccaaagttattgacactcaacagaaggtgaagctcgcagacatacagattgaacagctaaacagaacgaaaaagcatgcacatcttacagatacagagatcatgactttggtagatgagactaacatgtatgaaggtgtaggaagaatgtttattcttcagtccaaggaagcaattcacagtcagctgttagagaagcagaaaatagcagaagaaaaaattaaagaactagaacagaaaaagtcctacctggagcgaagcgttaaggaagctgaggacaacatccgggagatgctgatggcacgaagggcccagtagggagcctctctgggaagctcttcctcgccccgatggatgctttatttggatggcctggcaacatcacattttctgcatcaccctgagccccatttgcttcccagccctggagtttttacccggctttgcctgccacctctgcccaggacactcttccctctcgggatgtgtgatgaactcccaggagagggaagatgggagccagggcaagataggaagctctgcctgagctttccactaggcacgccagccagaccaataaaaagcgtctgtcccactctgctaagcctggttttcttgagcagagggatggaacagagggtgagagaggcagtggccgtctccacctcagctcctgctccctctgcatcagagcccttcctttcttgggggatgggccttgccctcttctcttttcccttcctgtacctttgactaacgctcagcttccgggcctgcatgcagtagacagaagaggaagaaagaacagatgttcacagctgaatctcagtgaacagaatagcagtccctggatggcagtctgcctaaagattcctttccctgccttctcccatacattccaaaaggaagttcaacagtaagcagcacctccaagactgtctccttttggccaatatcataagatggacgccataatcctgaggcctcctagaggctgagggggcaacggtgtgatccagctggctcatcccagcccaggtgggccaattattcaattttcaagaattttgttgcaagccagttgtcaaacacagccattataattatgtaaatttgcaaattatgttaaaaacaaggacaataaatattcaaaatgcatccctaa

SEQ ID NO: 50890 - DNA, 1203 bp, Homo sapiens
atttcagtccaactcccactgcgcaggcgcttacagtgcaccaagatggccgcccccgtggatctagagctgaagaaggccttcacagagcttcaagccaaagttattgacactcaacagaaggtgaagctcgcagacatacagattgaacagctaaacagaacgaaaaagcatgcacatcttacagatacagagatcatgactttggtagatgagactaacatgtatgaaggtgtaggaagaatgtttattcttcagtccaaggaagcaattcacagtcagctgttagagaagcagaaaatagcagaagaaaaaattaaagaactagaacagaaaaagtcctacctggagcgaagcgttaaggaagctgaggacaacatccgccccgatggatgctttatttggatggcctggcaacatcacattttctgcatcaccctgagccccatttgcttcccagccctggagtttttacccggctttgcctgccacctctgcccaggacactcttccctctcgggatgtgtgatgaactcccaggagagggaagatgggagccagggcaagataggaagctctgcctgagctttccactaggcacgccagccagaccaataaaaagcgtctgtcccactctgctaagcctggttttcttgagcagagggatggaacagagggtgagagaggcagtggccgtctccacctcagctcctgctccctctgcatcagagcccttcctttcttgggggatgggccttgccctcttctcttttcccttcctgtacctttgactaacgctcagcttccgggcctgcatgcagtagacagaagaggaagaaagaacagatgttcacagctgaatctcagtgaacagaatagcagtccctggatggcagtctgcctaaagattcctttccctgccttctcccatacattccaaaaggaagttcaacagtaagcagcacctccaagactgtctccttttggccaatatcataagatggacgccataatcctgaggcctcctagaggctgagggggcaacggtgtgatccagctggctcatcccagcccaggtgggccaattattcaattttcaagaattttgttgcaagccagttgtcaaacacagccattataattatgtaaatttgcaaattatgttaaaaacaaggacaataaatattcaaaatgcatccctaa

SEQ ID NO: 50891 - DNA, 1115 bp, Homo sapiens
atttcagtccaactcccactgcgcaggcgcttacagtgcaccaagatggccgcccccgtggatctagagctgaagaaggccttcacagagcttcaagccaaagttattgacactcaacagaaggtgaagctcgcagacatacagattgaacagctaaacagaacgaaaaagcatgcacatcttacagatacagagatcatgactttggtagatgagactaacatgtatgaaggtgtaggaagaatgtttattcttcagtccaaggaagcaattcacagtcagctgttagagaagcagaaaatagcagaagaaaaaattaaagaactagaaatcacattttctgcatcaccctgagccccatttgcttcccagccctggagtttttacccggctttgcctgccacctctgcccaggacactcttccctctcgggatgtgtgatgaactcccaggagagggaagatgggagccagggcaagataggaagctctgcctgagctttccactaggcacgccagccagaccaataaaaagcgtctgtcccactctgctaagcctggttttcttgagcagagggatggaacagagggtgagagaggcagtggccgtctccacctcagctcctgctccctctgcatcagagcccttcctttcttgggggatgggccttgccctcttctcttttcccttcctgtacctttgactaacgctcagcttccgggcctgcatgcagtagacagaagaggaagaaagaacagatgttcacagctgaatctcagtgaacagaatagcagtccctggatggcagtctgcctaaagattcctttccctgccttctcccatacattccaaaaggaagttcaacagtaagcagcacctccaagactgtctccttttggccaatatcataagatggacgccataatcctgaggcctcctagaggctgagggggcaacggtgtgatccagctggctcatcccagcccaggtgggccaattattcaattttcaagaattttgttgcaagccagttgtcaaacacagccattataattatgtaaatttgcaaattatgttaaaaacaaggacaataaatattcaaaatgcatccctaa

SEQ ID NO: 50892 - DNA, 1051 bp, Homo sapiens
atttcagtccaactcccactgcgcaggcgcttacagtgcaccaagatggccgcccccgtggatctagagctgaagaaggccttcacagagcttcaagccaaagttattgacactcaacagaaggtgaagctcgcagacatacagattgaacagctaaacagaacgaaaaagcatgcacatcttacagatacagagatcatgactttggtagatgagactaacatgtatgaaggtgtaggaagaatgtttattcttcagtccaaggaagcaattcacagtcagctgttagagaagcagaaaatagcagaagaaaaaattaaagaactagaacagaaaaagtcctacctggagcgaagcgttaaggaagctgaggacaacatccgggagatgctgatggcacgaagggcccagtagggagcctctctgggaagctcttcctcctgcccctcccattcctggtgggggcagaggagtgtctgcagggaaacagcttctcctctgccccgatggatgctttatttggatggcctggcaacatcacattttctgcatcaccctgagccccatttgcttcccagccctggagtttttacccggctttgcctgccacctctgcccaggacactcttccctctcgggatgtgtgatgaactcccaggagagggaagatgggagccagggcaagataggaagctctgcctgagctttccactaggcacgccagccagaccaataaaaagcgtctctgcctaaagattcctttccctgccttctcccatacattccaaaaggaagttcaacagtaagcagcacctccaagactgtctccttttggccaatatcataagatggacgccataatcctgaggcctcctagaggctgagggggcaacggtgtgatccagctggctcatcccagcccaggtgggccaattattcaattttcaagaattttgttgcaagccagttgtcaaacacagccattataattatgtaaatttgcaaattatgttaaaaacaaggacaataaatattcaaaatgcatccctaa

SEQ ID NO: 50893 - DNA, 1086 bp, Homo sapiens
atttcagtccaactcccactgcgcaggcgcttacagtgcaccaagatggccgcccccgtggatctagagctgaagaaggccttcacagagcttcaagccaaagttattgacactcaacagaaggtgaagctcgcagacatacagattgaacagctaaacagaacgaaaaagcatgcacatcttacagatacagagatcatgactttggtagatgagactaacatgtatgaaggtgtaggaagaatgtttattcttcagtccaaggaagcaattcacagtcagctgttagagaagcagaaaatagcagaagaaaaaattaaagaactagaacagaaaaagtcctacctggagcgaagcgttaaggaagctgaggacaacatccgggagatgctgatggcacgaagggcccagtagggagcctctctgggaagctcttcctcctgcccctcccattcctggtgggggcagaggagtgtctgcagggaaacagcttctcctctgccccgatggatgctttatttggatggcctggcaacatcacattttctgcatcaccctgagccccatttgcttcccagccctggagtttttacccggctttgcctgccacctctgcccaggacactcttccctctcgggatgtgtgatgaactcccaggagagggaagatgggagccagggcaagataggaagctctgcctgagctttccactaggcacgccagccagaccaataaaaagcgtctctgcctaaagattcctttccctgccttctcccatacattccaaaaggaagttcaacagtaagcagcacctccaagactgtctccttttggccaatatcataagatggacgccataatcctgaggcctcctagaggctgagggggcaacggtgtgatccagctggctcatcccagcccaggtgggccaattattcaattttcaagaattttgttgcaagccagttgtcaaacacagccattataattatgtaaatttgcaaattatgttaaaaacaaggacaataaatattcaaaatgcatccctaacctaattactacatttgaccacgatctgtgctcta

SEQ ID NO: 50894 - DNA, 549 bp, Homo sapiens
cttgtggcccaattcaagcttgattcaggaattcggcacgacccaagatggccgcccccgtggatctagagctgaagaaggccttcacagagcttcaagccaaagttattgacactcaacagaaggtgaagctcgcagacatacagattgaacagctaaacatgcagtagacagaagaggaagaaagaacagatgttcacagctgaatctcagtgaacagaatagcagtccctggatggcagtctgcctaaagattcctttccctgccttctcccatacattccaaaaggaagttcaacagtaagcagcacctccaagactgtctccttttggccaatatcataagatggacgccataatcctgaggcctcctagaggctgagggggcaacggtgtgatccagctggctcatcccagcccaggtgggccaattattcaattttcaagaattttgttgcaagccagttgtcaaacacagccattataattatgtaaatttgcaaattatgttaaaaacaaggacaataaatattcaaaatgcatccctaa

SEQ ID NO: 50895 - DNA, 1383 bp, Homo sapiens
atttcagtccaactcccactgcgcaggcgcttacagtgcaccaagatggccgcccccgtggatctagagctgaagaaggccttcacagagcttcaagccaaagttattgacactcaacagaaggtgaagctcgcagacatacagattgaacagctaaacagaacgaaaaagcatgcacatcttacagatacagagatcatgactttggtagatgagactaacatgtatgaaggtgtaggaagaatgtttattcttcagtccaaggaagcaattcacagtcagctgttagagaagcagaaaatagcagaagaaaaaattaaagaactagaagtaagtttttattggcaataggagttaacttttgggagaaagtagtaatcttattgtgtcatattaaatgaaaatgtatgcctgcctgccaaagtaatgtcatattatttttattttctataattacgttggagccgtgaagctgtcatattcatattcatagcgcatataagaccaaaacaaaaaaaaaaagaatagtctcttctttggaactgcagagaattttgatgagatggttttaacctgaatgtattttgtccattggcccttgaatgtgtttatcctttaaaaaaaacaaaaccataaacaaaatgtaatgtatatttaaacaacacttgtgtagtggattgtggtggatgggcaggagagtgggtaataatgataaattttagaggatcttggtatagggtcttttttacacattgtaatttctttaacctaaattaggttctatataaggacaaagtagcaagctataaccaattaactatctgaaggatggtgctccaatgagaacaattttttctttttagctagggaaaaagatgataggtaacagtaagcaaatctttggaaatattactttattatttttattattataatttatttatacattaagacctttagtgagatattcttcttgggctttggtgaaaggcccatcctgtgtatagtaaaagttagactggacaaaaagctggttatttcttagggaccaagatttcccaacatgtgggtggatacattgacttcataggtcatttcatctaatttctgtaagtactatttgaggcagaggatcagaatctaactcagccctctgctgaatttgggagctacaacttgtagcctcctgaggatttcttaggggcactgaattggcctggcctgggagtatgcagtatcttaggttacttaggcttatttttaactactgatagttgaaacaaacttgataatagatttgcagcttagaaaagtgtattgtaaaaaaaaaaaatccaaataattatctatttttaatcttccttctttttatatatctcatta

SEQ ID NO: 50896 - DNA, 475 bp, Homo sapiens
aaatattactttattatttttattattataatttatttatacattaagacctttagtgagatattcttcttgggctttggtgaaaggcccatcctgtgtatagtaaaagttagactggacaaaaagctggttatttcttagggaccaagatttcccaacatgtgggtggatacattgacttcataggtcatttcatctaatttctgtaagtactatttgaggcagaggatcagaatctaactcagccctctgctgaatttgggagctacaacttgtagcctcctgaggatttcttaggggcactgaattggcctggcctgggagtatgcagtatcttaggttacttaggcttatttttaactactgatagttgaaacaaacttgataatagatttgcagcttagaaaagtgtattgtaaaaacaagacaaaaaagcaaaaaaaccaagtaaagaaaaaacagcctgtgataacca

SEQ ID NO: 50897 - DNA, 388 bp, Homo sapiens
ctgcctgattcctatattaaataagaaagcagaatctacttttaagcctttattccttctcagccaagaaggtttaaacttctggtggtttcctgagcttgacgtattatgttaatatgcatttgtccttttaatttgctcagtttaatatttgtagtatgtagctattgatttcgatgaattcaatagtcatgtggcttaattttcaactttcttgtgtttcataggtttattcttcagtccaaggaagcaattcacagtcagctgttagagaagcagaaaatagcagaagaaaaaattaaagaactagaagtaagtttttattggcaataggagttaacttttgggagaaagtagtaatcttattgtgtcatattaaatgaaaatg

SEQ ID NO: 50898 - DNA, 664 bp, Homo sapiens
gaatgtctttgggaagcttttggaagtaataagttcgttttggaaagaacactccagacaagctttccaatagtctttcccaaactgtcatgcctgaggttctggacttactcttactcatccctgagagcacagcgactagctgaaggactgatcgactgatgagggtttgacctcatctacatacatctcaatttagcagcacatattaagctagctggcaaactgcttaaagccacatgggaaatctgcgcgttgggctatgtctggaagatacggaggagcaagccagacctgaccggtcaggtagtgaagacacggaatccgaaacccaaatatttcaggagtcaattctcagagaaagataagaagcccggttagtccaactcatgcgcaggcgcagaagaaagaccggcgcacaaagtaagacgcgcccttccccaccctatttcagtccaactcccactgcgcaggcgcttacagtgcaccaagatggccgcccccgtggatctagagctgaagaaggtaaaagagggtctttggcaggcggaggtcttctttttggaggctgaggggactatagacaagaatatcaagtgaggcacgagccttgcagaaggaaggagggtccagtggactagggaatggtttcccagagtcctaa

SEQ ID NO: 50899 - DNA, 390 bp, Homo sapiens
tccccccattaggaaagatacttacatgttttattcaaaattcttttaagccaccaccaaagaagagaaagaaattaacataataactctccgggtggttccctgtttacaaagtaagtttaacttttactttgttttccttcagagccctaaattcaactcctactttattccatatttccattttcagtcatccttgatgcctgaaatgatttagttgatgccatattgatttcgttcttgtttgcttcctcaaaatgtttctcatttttctgtccccttggctcatttctaagtgtgttttctaatgtccatatcctgcacaattgccagcagcaccatgacctagggaggaccctcattatgaactgcattctacaggaaaaaaga

SEQ ID NO: 50900 - DNA, 426 bp, Homo sapiens
tttccaaatcttgactatcgtgaacattgctgcaaaaaatatgggagtgcagatacctctttgatataccgttttcctttcttttgggtatatacccaacagtgggattgctggataatatggtagctctattttttgtgttttttttagaatcctccaaactattctccatagtggttgtactaatttacattcccaccaacagtgtataaacatttccttttctccacagtgtttgagggttcccttttctccactcctcaccagcatttgttattgcctgtcatttagataaaagccaaaaatatttttttttaattagccaggtgtggtagaggctgtggtgggaggatcacttgaacccagcagttcaaggctgtagtaagccatgattgcaccactgaactctagcctgagtgacagagg

SEQ ID NO: 50901 - DNA, 410 bp, Homo sapiens
tcccctcaactctgctgaactcagcacttccaagcagtcagaatggcagctgtaccctgcaccatgacataataaaggaaatggagccatggttctgtgtgtctcctggtgccagcatactgggctatcccagtctgatgccactatgccagcctctcccacagaactttaattccataagatgctctataaaaatgaatgaaggaatagaaaaacatttccagagtcaagtgactttgggatatattgcctataataattacaaaataacagtagtaatcacagttgataattactgagcatttactttgtgctgggcacataattatatttgactcttacaactctcctatgagataggtactattagccacaggaatgatattcaaaatatttaatgactagtacag

SEQ ID NO: 50902 - DNA, 1043 bp, Homo sapiens
ttttactctttaataaactttaattttcacattcttctaattttatgctaaatgtcttttacagaggccgatccctacttcactgtgaaattacatgacaaaactgcagtggagaaggatgagattactttgaagtgtgaagtgagcaaagatgtaccagtgaaatggttcaaagatggtgaagagattgtcccttcacccaaatattctatcaaggcagatggcctgcgccgcatcttaaaaatcaaaaaggcggaccttaaagataaaggcgaatatgtgtgtgactgtggcacagacaagaccaaggcaaatgttactgttgagggtgagttgctcaacaatgtaaaatttaccctatctgaatctgcagtttattagttcagtcatgctaacaaaactgtatcatttcagctcgactaataaaagtggaaaagcctctgtacggagtagaggtgtttgttggtgaaacagcccactttgaaattgaactttctgaacctgatgttcacggccagtggaagctgaaaggacagcctttgacagcttcccctgactgtgaaatcattgaggatggaaagaagcatattctgatccttcataactgtcagctgggtatgacaggagaggtttccttccaggctgctaatgccaaatctgcagccaatctgaaagtgaaagaattgcctcttatcttcatcacacctctcagtgatgttaaagtcttcgagaaagatgaggctaagtttgagtgtgaagtatccagggagcccaaaacattccgttggctaaaaggaacccaggaaatcacaggtgatgacagatttgagcttataaaggatggcactaagcattcaatggtgatcaagtcagctgcttttgaagatgaagcaaaatacatgtttgaagctgaagataagcacacaagtggcaaactgatcattgaaggtaaatagttttatcaaatagtccaccccaaaatcattttttttgcctttagttttatatttcttctttaaagtgcttcaattaataagttcttt

SEQ ID NO: 50903 - DNA, 1322 bp, Homo sapiens
ggtccaaaggacctgatataattaagtcatctgacaaatttgatatcatcgctgatggaaagaaacatattcttgttattaatgattctcaatttgatgatgaaggggtctatactgctgaggtggagggcaagaagacctcagctcggttgtttgtcacaggtataagactgaaattcatgtcacctcttgaagatcaaacagtaaaagaaggtgaaacagcaacttttgtttgtgaactttctcatgaaaaaatgcatgtagtctggttcaaaaatgatgccaaactccatacaagcagaacagtactcatctcttctgagggcaagactcacaaattggaaatgaaagaagtgacattggatgatatatctcagataaaagctcaagtcaaggagctgagctccacagcacagctgaaggtcttagaggccgatccctacttcactgtgaaattacatgacaaaactgcagtggagaaggatgagattactttgaagtgtgaagtgagcaaagatgtaccagtgaaatggttcaaagatggtgaagagattgtcccttcacccaaatattctatcaaggcagatggcctgcgccgcatcttaaaaatcaaaaaggcggaccttaaagataaaggcgaatatgtgtgtgactgtggcacagacaagaccaaggcaaatgttactgttgaggctcgactaataaaagtggaaaagcctctgtacggagtagaggtgtttgttggtgaaacagcccactttgaaattgaactttctgaacctgatgttcacggccagtggaagctgaaaggacagcctttgacagcttcccctgactgtgaaatcattgaggatggaaagaagcatattctgatccttcataactgtcagctgggtatgacaggagaggtttccttccaggctgctaatgccaaatctgcagccaatctgaaagtgaaagaattgcctcttatcttcatcacacctctcagtgatgttaaagtcttcgagaaagatgaggctaagtttgagtgtgaagtatccagggagcccaaaacattccgttggctaaaaggaacccaggaaatcacaggtgatgacagatttgagcttataaaggatggcactaagcattcaatggtgatcaagtcagctgcttttgaagatgaagcaaaatacatgtttgaagctgaagataagcacacaagtggcaaactgatcattgaaggtaaatagttttatcaaatagtccaccccaaaatcattttttttgcctttagttttatatttcttctttaaagtgcttcaattaataagttcttt

SEQ ID NO: 50904 - DNA, 583 bp, Homo sapiens
gctgaggcaggagaatggcgtgaacccgggaggcggagcttgcagtgagcagagatcgcgccactgcactccagcctgggcaaaagagcgagactctgtctcaaaaaaaaaaaaaaaaagaaagaaagtttgaaattgttttaaaacagttaaggccaggtgctgtggctcattcctgtaatcccagaactttgggaggccaaggagagcagattgcttgagttcaggatttgagaccagcctgggcaacttgttcaaaccctgtctcttcaaacaattagctggatgtggtagcacttgtagtaccaactacttgggggctgaggcaggaggattgtttgagcccaggaaatcaaggctgtagtgagtcaagatgacaccactgcattccagcctgagcaacagcatgagaccttatctcaaggaaaaaaaaaaaaaaactagtcaagaggctagccacagtggctcatacctgtaatcctggcacttgggccaacacaagaagatcgcctgaggccacgagttcaaggctatggtgagctgtggttgtgcgactgagtaagagagcaagaccctggctctt

SEQ ID NO: 50905 - DNA, 504 bp, Homo sapiens
gctgaggcaggagaatggcgtgaacccgggaggcggagcttgcagtgagcagagatcgcgccactgcactccagcctgggcaaaagagcgagactctgtctcaaaaaaaaaaaaaaaaagaaagaaagtttgaaattgttttaaaacagttaaggccaggtgctgtggctcattcctgtaatcccagaactttgggaggccaaggagagcagattgcttgagttcaggatttgagaccagcctgggcaacttgttcaaaccctgtctcttcaaacaattagctggatgtggtagcacttgtagtaccaactacttgggggctgaggcaggaggattgtttgagcccaggaaatcaaggctgtagtgagtcaagatgacaccactgcattccagcctgagcaacagcatgagaccttatctcagaactttggggaggccaaggagagcagattgctttgagttcaggattttgagaccagcctggggcaacttgtttcaaaccct

SEQ ID NO: 50906 - DNA, 368 bp, Homo sapiens
ggagatcatccaagcaacttcagaattttagggtttcaaatttattgagaccctgagatgtgtggaaagaagatttgaatgattgtttcaaagtcatttattctataaaatcttttcttttttttttctttttaaaaattttactactttgcttttggagcagatatgaagtctgttatagctcttgaaaaagtatgcagtaatggtgttttaatagtgagaattacatttcttcctttcttcctaggatcgcttgagtccaagagtttgaagctgcagtgagctaggatggcgccactgcactttagactggacaatagagtgagaccctgtctctaaaaataaataaataaataaataaataaatg

SEQ ID NO: 50907 - DNA, 478 bp, Homo sapiens
caactcattactcttcacggtcctgagtttgcttttctgtaaaattgagaaagaaataattgcctgacctctcatcccacgattgtttttaagagtgggaatcacagcttggggggcagggagttgagagcttctgctgtagtggtgtgagcaacacaggatggccatatttaaattgggattgtactgtggagagttatattaaattcataaggtcaggagaaacagaaacacgggagttgggccttattgcagactcctcctcggtgattttatttggagtaaacggcacacgtaatcttagcatgtctcatgtcaaaatcacttcaaagaatgccacgggtgagtctgcggcagatgttcagggcatctttttaaaggagaaccaaaaaattaaaatttatttcctttttaattgtggctgttttaaactttgttactttaaaaattacatatgtgtaagtggtccactcttttt

SEQ ID NO: 50908 - DNA, 207 bp, Homo sapiens
tgtttcacatataacttgcacattaagtgaaaaaaaatgattatgctttagcttcttatctttgttaaaatgtagagctgtctggactctcaagatttcctcaaagggacctggaagaatagaaacagatttgacagattattgagatcctttgattacatatctagaatgcctgttacatatgtatttagttaactagttgtatta

SEQ ID NO: 50909 - DNA, 135 bp, Homo sapiens
acaagccatgtcttgcaataaatatagcaaatgcagggaaccagaaaagtcattcttctgtggtcatttgtaatctacttataagaaggaaggaagaatgggggtagggcggagttgtagcattcagcagaattg

SEQ ID NO: 50910 - DNA, 443 bp, Homo sapiens
tctttgacctaacattttccactgggccatatcccacaaccccaggagttcttcattcatttgctgtaagcaacctagacagactagatacaccccgtaaaaaggatgccacagaaaagggtctcattacctttctgctagtaaataccttcaggaggcctgattagtatgtttccaaggattctttactgggtcatttctctctctctcttcctctcccttctcttcttggacgtcctcagagaagacacgatgggttactaaataagcccaaaccctttccttctcaagaaccatttctatagcaaatgttattacattatgaccttttttaaaaatgtgtgtgcccctctccatatgatgatttatcatttgtaacacactcagagtgcacaaaccatcagaaatccttatctactatggtaaaatttgagcttcacggg

SEQ ID NO: 50911 - DNA, 205 bp, Homo sapiens
tgaagtaaaaagcccatggttgagtaaagatctcactatcaattgagaatgcattatggcaacatagtgtgatgacactcaaatgcacttaaacccagaaaacttgtataaagtttctcaagcaaagaaactaaaaaacagagaaagctcatcctcttgggcatataatagctgtaactgacatcactgttgttattagtgccac

SEQ ID NO: 50912 - DNA, 348 bp, Homo sapiens
aaagattcaaataaaatattaagaaactttctaaatggttctgacagtaatggtccagccagggaaataaagtttctagcctctttcttggggctttcagaatagactagataaccttagaattaaatgtggatttatgtttttctgaacagtacccccttttattgactacatgtttccccaagaatttgttttagagtagatgtttcaaataaagggtccaattcttaacccattcacattgtctcattttgcagataaccacttgcctagcataaaaatctttacgttgttctcagaaattgattcttgactctacacagcaaatccttcgtctttattgctgtg

SEQ ID NO: 50913 - DNA, 841 bp, Homo sapiens
tttagagggtctcaaggctgtggttgacatttttagtttgttgggctaaacaaccatttgctatacaatactatggaaacgaatggtggaagagattgccctggaaaactctgttcaattccgttaagaaatattaaattcctgaggacaatctacttgtttattattttcaatttctcttaaaatagtataaaaggatcttcttgggtggcagtacagggatgacaaggaagggaccaaatctcagttgttcacatttttacttagtttggattccaaataatggggcttctcataaaagatttggaccctgccccgaggcttttggtaataaatgtggccgctttgtttttttccctaattatttcattcgtaaaagtcttatcttcccaataaagatggtaactcctctggactgggtctgcttttcgcattttccttcttttatataccaccatggtatagaacttatttttgcttaataaacagtttggacatcaggaagagacagagctgtatacaataggtagtttacagtcaaatatttactgctttaaataaggcagaattggctgggcacagtggctcacgcctgtaatcccagcactttgggaggccgaggcgggcggatcacaaggtcaggagatcgagaccatcctggctaacctggtgaaaccccgtctctactaaaaatacaaaaaattagccgggcgtcgtggtgggcgcctatagtcccagctactcgggaggctgaggcaggagaatggcgtgaacccgggaggtggagcttgcagtgagccgagatcaagccactgcactccagcctgggtgacagagtgag

SEQ ID NO: 50914 - DNA, 754 bp, Homo sapiens
agaagttctgggggtacagcccaggtgtaggttctctgggagagtctgtcatgcactaaaatttgagagtcatgccataaaacctctttatagtgctccagtataaaaaagatcttggggttaagcttagctaaacaaatacgtctgcaggctggcagttcatgaattccacctaaagactatctggtttatccctcattttacacaaaaggaaactgtggtttagagggttgaagtaacatgttaaaattctcatggcttttttgtggtagagcagacactagaatcagttctccttcctccggtccatagctggctgcttctaatcttttaaaaatcagctaatcaaggtaacttggatccatttcaatcctgtcagtgaccctacgttcaatataaaagatgagtcctgggagaactgccgttctgattcacattcatctgaatgttgagcgagaaaggtttccatctcaaccacaccatgtgtgcatgtgcatgcacatacacgcgtgcgcgcgcacacacacacaccactgccaccaccacatagctcagatctgtcacaacatgagggaggggactcgcaaacatgcataatttatgcaggattttcacggatttttcagtatttggaagtgatttcttaaattatacattgaaacagctccataaagatgaagctggagttagtttcacaatagccttaaaagtgagagaatttgcgtctctgggatcaatgtgcatatttcaaagt

SEQ ID NO: 50915 - DNA, 669 bp, Homo sapiens
cctgggagaactgccgttctgattcacattcatctgaatgttgaaaaagtgcatttcttcagagtgctctgtaggaggtggaaatattcaataagcttgcgagaaaggtttccatctcaaccacaccatgtgtgcatgtgcatgcacatacacgcgtgcgcgcgcacacacacacaccactgccaccaccacatagctcagatctgtcacaacatgagggaggggactcgcaaacatgcataatttatgcaggattttcacggatttttcagtatttggaagtgatttcttaaattatacattgaaacagctccataaagatgaagctggagttagtttcacaatagccttaaaagtgagagaatttgcgtctctgggatcaatgtgcatatttcaaagtgagacgtttcactttatagaatttagagggtctcaaggctgtggttgacatttttagtttgttgggctaaacaaccatttgctatacaatactatggaaacgaatggtggaagagattgccctggaaaactctgttcaattccgttaagaaatattaaattcctgaggacaatctacttgtttattattttcaatttctcttaaaatagtataaaaggatcttcttgggtggcagtacagggatgacaaggaagggaccaaatctcagt

SEQ ID NO: 50916 - DNA, 269 bp, Homo sapiens
gcctcattcatcttaccctagtctatgcctgatctttccccaggtttctaatgttccattcctagagtcacacctcttactgcatcatcccttactgctttggcaggaagctgctgatacaccattttccttattcagaatctctcttcctcaccaaaatgttcagataagctttcagtagtttaacccacaacttaagcaaagttccttttcttctcttaagctatcagggctggtactatttactggatagaagtgtctttcggtct

SEQ ID NO: 50917 - DNA, 374 bp, Homo sapiens
ctggtcaataaatgtttatgtacaattcttatttctataggatgaatccctagaagtggaattgctgggtaaagtatataaacatttaaaaaactgttacatgttaccagatggtcctgccccaaaaaattgtattaatttttagtgtcaccaatttgataggtaaattttaacatattttgttttaataattggtcaggttaaatgttttttgtttattgataatttatatttaatcataatttttaaaaaatcatgtaatatatattccatattccaatttccttagttgtcccaaaaatatattcttgtaactttggtgaaatagcatctaatcaaagttcacatttagttattgtctccttaatctcttt

SEQ ID NO: 50918 - DNA, 2690 bp, Homo sapiens
  misc_feature (2575)..(2575): n is a, c, g, or t
  misc_feature (2590)..(2590): n is a, c, g, or t
  misc_feature (2597)..(2597): n is a, c, g, or t
  misc_feature (2608)..(2608): n is a, c, g, or t
gactgttccataaaagtcagacacttggttttagttcccaaactgattttgatgacattcttgactgcagggcttggagttaaccccactgggcctgagttgtctctctgtaaagttacacatcatttcagactcaaaggcctctagcatgcagggtctggtgtcataataggcaccaatgggaaccattactgtcattgccttttttggctttaatcttcccaattgtaagttcctttcatgtttaaaacaagtttaaaagacagggggacttaggcatgctcaggcagtctagcctttaatgtaagaatttcaaaacataaaggaaaaaaaacttttttttttaagcagtactttgtgagttacaagacagcagcagctccttagtgttgattgccgaggcctttttggtttgaaaactctgcttcctttgtgaatttggtgttaggagttcttattgttattctgcagcctttactattgtcctttatttactgaacacagtgaataccaagcactgtttattagaggttaggagtaggggcaggtgattaaaaaaacaaaaaagctaataatctcctcaagcaatttctggcctaatagaattatagtagacagtgaagtatctaaacccagggaatcagattgaggcaccatgtccatcgccttgagaattaataggctgcatttctgggttctcctttttttttttttttttgcccaactgagtctttctgtggacttacatggaacttcttattctcttaaatcattaagttacttgacaatattcttggatttggagaaactggatgtagggccgtatgaaaaaatcattcgaaatcagatttaggggtataaggttggataggaatgttttagaaagaagaatgtaaggcagataactaatttgtcacatccaaagtataaaactgctactttttccctagaaaagggaagctcattttaggcagcctaaaccagtaagattttcttcctcctccaagtgcagatttttgtacctttcgtttgtcaaaacattctttggccctatgcatgccagagtgatatagaaaggaagttaccacatttttttgagaacaaatcactcctgataaaatttcttagacaattgataatcattttaagaagaaatttaattgtatttagctctgtgtctcgcccctttggtgtcactcttctacctcttccatcactatagctaaatatttagaagtatatcttgacacctagcacaaatgttttggttaagtatcttaaaactgatggatggtatggctggggcagcatggctcacgcctgtaatcccagcactttgggaggccaaggcgggtgaatcacctgaggtcaggagtttgagaccggcctgaccaacttggagaaaccccgtctctactaaaaatacaaaaattagtcaggggtggtggcgcatgcctgtaatcctgtctactcaggaggctgaggcaggagaattgcctgaacccgggaggcagaggttgcagtgagctgagatcgtgccattgcactccagcctgggcaacaagagcaaaactcagtctcaaaaaacaaaacaaaaaacctgttggtatagtacgaaagaaacgtcttgcagttttctgttgcagagaattaattagaaccaacctgttggattatacacattcacctttcagaatcctttcttctctgtggaaacccacactctcagcagtgtgtgggaacacagtagattcttaaggaatgcttgttgaatgttgcagtctgcatcttcttgaagtaacagaactgttggtagctgtttaaaagtaaaatgtgtctaaagaccttttggaaattaagatgtaagagattaatgcaccaaagcagtctcttaattacttaaaatgaattatttcaaagaatctttaattgaattttctgtgaagtctggaatttgtaaattatgtccctttgttcaaaccagcccctgaaaagaacaattaaggcaattaagatagcattaaagttttcaatgaagttggcattttctgtgtattaagattagatgttagctgctgaagtttgtggaggtcggacataaagcttccaacatcagtaatgcaaaattgtcttgaacctgcgataaaattttgttggacttttttttcattgcagtgaaaagggccatgtagcatgcctcaaagccaggttactcagcctagtccttgtttaagcagttttgatattcattcaagttcaattttctcactgattttatgattaatttcttggaaaatttgaaagttttcaagaagtaaaaaattaatatcttgttatcccagtatatagagattaacttcagttcaatgtttggtgcattttcttctagtctttttttcaatgtataaatattaaagttatttcatagttgagatcatactgcatatatgattactgtatcttgcttttttcattttaacgtcgtgagcaattttcccatgacattacaaactgtctttgaaaaatggaaaacatttggggctgtcagcataactgaaaatgttttcttgggtgncacatgtatctttgnaattggnttgattagtgngcttattcataaaaattcagtattttcattttacacacgaacgaacaacacacacagcaaatagaacaccaagaaaaaagaa

SEQ ID NO: 50919 - DNA, 2258 bp, Homo sapiens
  misc_feature (2143)..(2143): n is a, c, g, or t
  misc_feature (2158)..(2158): n is a, c, g, or t
  misc_feature (2165)..(2165): n is a, c, g, or t
  misc_feature (2176)..(2176): n is a, c, g, or t
gctcgctaccccttcatttgcaggattgttattctgcagcctttactattgtcctttatttactgaacacagtgaataccaagcactgtttattagaggttaggagtaggggcaggtgattaaaaaaacaaaaaagctaataatctcctcaagcaatttctggcctaatagaattatagtagacagtgaagtatctaaacccagggaatcagattgaggcaccatgtccatcgccttgagaattaataggctgcatttctgggttctcctttttttttttttttttgcccaactgagtctttctgtggacttacatggaacttcttattctcttaaatcattaagttacttgacaatattcttggatttggagaaactggatgtagggccgtatgaaaaaatcattcgaaatcagatttaggggtataaggttggataggaatgttttagaaagaagaatgtaaggcagataactaatttgtcacatccaaagtataaaactgctactttttccctagaaaagggaagctcattttaggcagcctaaaccagtaagattttcttcctcctccaagtgcagatttttgtacctttcgtttgtcaaaacattctttggccctatgcatgccagagtgatatagaaaggaagttaccacatttttttgagaacaaatcactcctgataaaatttcttagacaattgataatcattttaagaagaaatttaattgtatttagctctgtgtctcgcccctttggtgtcactcttctacctcttccatcactatagctaaatatttagaagtatatcttgacacctagcacaaatgttttggttaagtatcttaaaactgatggatggtatggctggggcagcatggctcacgcctgtaatcccagcactttgggaggccaaggcgggtgaatcacctgaggtcaggagtttgagaccggcctgaccaacttggagaaaccccgtctctactaaaaatacaaaaattagtcaggggtggtggcgcatgcctgtaatcctgtctactcaggaggctgaggcaggagaattgcctgaacccgggaggcagaggttgcagtgagctgagatcgtgccattgcactccagcctgggcaacaagagcaaaactcagtctcaaaaaacaaaacaaaaaacctgttggtatagtacgaaagaaacgtcttgcagttttctgttgcagagaattaattagaaccaacctgttggattatacacattcacctttcagaatcctttcttctctgtggaaacccacactctcagcagtgtgtgggaacacagtagattcttaaggaatgcttgttgaatgttgcagtctgcatcttcttgaagtaacagaactgttggtagctgtttaaaagtaaaatgtgtctaaagaccttttggaaattaagatgtaagagattaatgcaccaaagcagtctcttaattacttaaaatgaattatttcaaagaatctttaattgaattttctgtgaagtctggaatttgtaaattatgtccctttgttcaaaccagcccctgaaaagaacaattaaggcaattaagatagcattaaagttttcaatgaagttggcattttctgtgtattaagattagatgttagctgctgaagtttgtggaggtcggacataaagcttccaacatcagtaatgcaaaattgtcttgaacctgcgataaaattttgttggacttttttttcattgcagtgaaaagggccatgtagcatgcctcaaagccaggttactcagcctagtccttgtttaagcagttttgatattcattcaagttcaattttctcactgattttatgattaatttcttggaaaatttgaaagttttcaagaagtaaaaaattaatatcttgttatcccagtatatagagattaacttcagttcaatgtttggtgcattttcttctagtctttttttcaatgtataaatattaaagttatttcatagttgagatcatactgcatatatgattactgtatcttgcttttttcattttaacgtcgtgagcaattttcccatgacattacaaactgtctttgaaaaatggaaaacatttggggctgtcagcataactgaaaatgttttcttgggtgncacatgtatctttgnaattggnttgattagtgngcttattcataaaaattcagtattttcattttacacacgaacgaacaacacacacagcaaatagaacaccaagaaaaaagaa

SEQ ID NO: 50920 - DNA, 1998 bp, Homo sapiens
  misc_feature (1883)..(1883): n is a, c, g, or t
  misc_feature (1898)..(1898): n is a, c, g, or t
  misc_feature (1905)..(1905): n is a, c, g, or t
  misc_feature (1916)..(1916): n is a, c, g, or t
caccgagtccacaccacctgagtccacaccaactgagtctttctgtggacttacatggaacttcttattctcttaaatcattaagttacttgacaatattcttggatttggagaaactggatgtagggccgtatgaaaaaatcattcgaaatcagatttaggggtataaggttggataggaatgttttagaaagaagaatgtaaggcagataactaatttgtcacatccaaagtataaaactgctactttttccctagaaaagggaagctcattttaggcagcctaaaccagtaagattttcttcctcctccaagtgcagatttttgtacctttcgtttgtcaaaacattctttggccctatgcatgccagagtgatatagaaaggaagttaccacatttttttgagaacaaatcactcctgataaaatttcttagacaattgataatcattttaagaagaaatttaattgtatttagctctgtgtctcgcccctttggtgtcactcttctacctcttccatcactatagctaaatatttagaagtatatcttgacacctagcacaaatgttttggttaagtatcttaaaactgatggatggtatggctggggcagcatggctcacgcctgtaatcccagcactttgggaggccaaggcgggtgaatcacctgaggtcaggagtttgagaccggcctgaccaacttggagaaaccccgtctctactaaaaatacaaaaattagtcaggggtggtggcgcatgcctgtaatcctgtctactcaggaggctgaggcaggagaattgcctgaacccgggaggcagaggttgcagtgagctgagatcgtgccattgcactccagcctgggcaacaagagcaaaactcagtctcaaaaaacaaaacaaaaaacctgttggtatagtacgaaagaaacgtcttgcagttttctgttgcagagaattaattagaaccaacctgttggattatacacattcacctttcagaatcctttcttctctgtggaaacccacactctcagcagtgtgtgggaacacagtagattcttaaggaatgcttgttgaatgttgcagtctgcatcttcttgaagtaacagaactgttggtagctgtttaaaagtaaaatgtgtctaaagaccttttggaaattaagatgtaagagattaatgcaccaaagcagtctcttaattacttaaaatgaattatttcaaagaatctttaattgaattttctgtgaagtctggaatttgtaaattatgtccctttgttcaaaccagcccctgaaaagaacaattaaggcaattaagatagcattaaagttttcaatgaagttggcattttctgtgtattaagattagatgttagctgctgaagtttgtggaggtcggacataaagcttccaacatcagtaatgcaaaattgtcttgaacctgcgataaaattttgttggacttttttttcattgcagtgaaaagggccatgtagcatgcctcaaagccaggttactcagcctagtccttgtttaagcagttttgatattcattcaagttcaattttctcactgattttatgattaatttcttggaaaatttgaaagttttcaagaagtaaaaaattaatatcttgttatcccagtatatagagattaacttcagttcaatgtttggtgcattttcttctagtctttttttcaatgtataaatattaaagttatttcatagttgagatcatactgcatatatgattactgtatcttgcttttttcattttaacgtcgtgagcaattttcccatgacattacaaactgtctttgaaaaatggaaaacatttggggctgtcagcataactgaaaatgttttcttgggtgncacatgtatctttgnaattggnttgattagtgngcttattcataaaaattcagtattttcattttacacacgaacgaacaacacacacagcaaatagaacaccaagaaaaaagaa

SEQ ID NO: 50921 - DNA, 1788 bp, Homo sapiens
  misc_feature (13)..(13): n is a, c, g, or t
  misc_feature (20)..(20): n is a, c, g, or t
  misc_feature (23)..(23): n is a, c, g, or t
  misc_feature (27)..(27): n is a, c, g, or t
  misc_feature (33)..(33): n is a, c, g, or t
  misc_feature (43)..(43): n is a, c, g, or t
  misc_feature (45)..(45): n is a, c, g, or t
  misc_feature (1673)..(1673): n is a, c, g, or t
  misc_feature (1688)..(1688): n is a, c, g, or t
  misc_feature (1695)..(1695): n is a, c, g, or t
  misc_feature (1706)..(1706): n is a, c, g, or t
gtggtgaagtagngagggtnggntttngggtgngaaaggtgangnaagaaaagggaagctcattttaggcagcctaaaccagtaagattttcttcctcctccaagtgcagatttttgtacctttcgtttgtcaaaacattctttggccctatgcatgccagagtgatatagaaaggaagttaccacatttttttgagaacaaatcactcctgataaaatttcttagacaattgataatcattttaagaagaaatttaattgtatttagctctgtgtctcgcccctttggtgtcactcttctacctcttccatcactatagctaaatatttagaagtatatcttgacacctagcacaaatgttttggttaagtatcttaaaactgatggatggtatggctggggcagcatggctcacgcctgtaatcccagcactttgggaggccaaggcgggtgaatcacctgaggtcaggagtttgagaccggcctgaccaacttggagaaaccccgtctctactaaaaatacaaaaattagtcaggggtggtggcgcatgcctgtaatcctgtctactcaggaggctgaggcaggagaattgcctgaacccgggaggcagaggttgcagtgagctgagatcgtgccattgcactccagcctgggcaacaagagcaaaactcagtctcaaaaaacaaaacaaaaaacctgttggtatagtacgaaagaaacgtcttgcagttttctgttgcagagaattaattagaaccaacctgttggattatacacattcacctttcagaatcctttcttctctgtggaaacccacactctcagcagtgtgtgggaacacagtagattcttaaggaatgcttgttgaatgttgcagtctgcatcttcttgaagtaacagaactgttggtagctgtttaaaagtaaaatgtgtctaaagaccttttggaaattaagatgtaagagattaatgcaccaaagcagtctcttaattacttaaaatgaattatttcaaagaatctttaattgaattttctgtgaagtctggaatttgtaaattatgtccctttgttcaaaccagcccctgaaaagaacaattaaggcaattaagatagcattaaagttttcaatgaagttggcattttctgtgtattaagattagatgttagctgctgaagtttgtggaggtcggacataaagcttccaacatcagtaatgcaaaattgtcttgaacctgcgataaaattttgttggacttttttttcattgcagtgaaaagggccatgtagcatgcctcaaagccaggttactcagcctagtccttgtttaagcagttttgatattcattcaagttcaattttctcactgattttatgattaatttcttggaaaatttgaaagttttcaagaagtaaaaaattaatatcttgttatcccagtatatagagattaacttcagttcaatgtttggtgcattttcttctagtctttttttcaatgtataaatattaaagttatttcatagttgagatcatactgcatatatgattactgtatcttgcttttttcattttaacgtcgtgagcaattttcccatgacattacaaactgtctttgaaaaatggaaaacatttggggctgtcagcataactgaaaatgttttcttgggtgncacatgtatctttgnaattggnttgattagtgngcttattcataaaaattcagtattttcattttacacacgaacgaacaacacacacagcaaatagaacaccaagaaaaaagaa

SEQ ID NO: 50922 - DNA, 335 bp, Homo sapiens
aagcttccaacatcagtaatgcaaaattgtcttgaacctgcgataaaattttgttggacttttttttcattgcagtgaaaagggccatgtagcaggacggcaggcgattgcatctctatcgtaatccttgtttaagcagttttgatattcattcaagttcaattttctcactgattttatgattaatttcttggaaaatttgaaagttttcaagaagtaaaaaattaatatcttgttatcccagtatatagagattaacttcagttcaatgtttggtgcattttcttctagtctttttttcaatgtataaatattaaagttatttcatagttgag

SEQ ID NO: 50923 - DNA, 298 bp, Homo sapiens
acaggctggagtgcaggggcgcaatcacgactcactgcagcctcgacctcctgggctcaagtgatcctcctgcctcacccacccaagtagctcggaccacagccacgtgcctccacaactggctaatttttgtatttttggagagatggggttttgccatgttgcccaggcttgtttaggaaaaaacattatgccacattctaaccggagcagaagtgcgcagacatctcagagtctaagctggcattaacaacttttacaaacccacctagctgattctgggcagtgtgcagggagg

SEQ ID NO: 50924 - DNA, 2069 bp, Homo sapiens
  misc_feature (1999)..(1999): n is a, c, g, or t
  misc_feature (2010)..(2010): n is a, c, g, or t
  misc_feature (2029)..(2030): n is a, c, g, or t
  misc_feature (2032)..(2032): n is a, c, g, or t
  misc_feature (2035)..(2035): n is a, c, g, or t
  misc_feature (2052)..(2053): n is a, c, g, or t
  misc_feature (2060)..(2060): n is a, c, g, or t
gagaggccttgtaggcacagcggctgagactcgatctgctccaagtaggggctccagcgcgggtcggagtctgggggttcgcgcccgccgacccgcgccctgctccctctcagcacctgggcggacgaaatgaccattaagaagtagatgcccagatgcaaaagtgatgaaacagtccatttgtcataaagtaagatgcagctgtggcatgtcaaccagcttggaacaaaattgtatctgtttttctcagaagagaattccacaaggagattttcttctttctaccatcatcaagatcaagcaggcaagtttacttgctgtcatcttctacaagtgtgggctgtgcatgcctttcttccaagaagtacagtacttccaagaagtgcagaagagttcggggagaagtaacttcacagtggagaaacctgacagccagcatggcctcacaaagattgattttactgctgctgaaaactgtctgaagatgagaagcagtttcagtaagaacaacagagagtaaacaaagctaagataacaacagtgaatgccacaaattctgaatagaacataacatggataaactgatttgttctacttcattaagttacactgaagttggagaagtttgcagaactttggcatacatagaggtcacaatagtatatgtttttatcaaactgaattctaattgttagaaggtaggacagtgaataatggcaatactgcagagtggttaggagaatgtgagctttgtggtcagtcagaaaactggttcaaatctcaaccgtgtcatttaggagttgggtgtgggcaagttatttaacttgagtcttacttctcacatctgtgtctgtcataggataattgtgtattatctgaatagtgagagttgaataaattatcctcaaaattaaataaaatggaaggattcagtatgatgcctggaaggcatgtatatattaaggtctcaataaatgctatttgttttgatttattattattacaataaaaaagtcacagtggaaaaagccaaattctcattttgatttaaaacttttccatattattattattatcatttaatgttttagagacaagatctccctctttcactcaggcttgggtgcagtcgtgaaatcatacatagcccactgcaacctcgaacgcctgaactcaagggatcccactgcttagctgggactaaaggtgtgtgccactgtgtttggctaactttttttattctttgtagagatgggggtcttgctgacatccaagatttatttcagtattttttagtaaattaatactattatgagcttaacagatgaaagttattcaccataaactttaaagaactgtgggaaaattatgtttaaacatttttatattatctcagctctgcttcatccacttccccagttattcatcagctttgaacacttcttctaaaagttaaatacttgtcagtcctcttaatggcctccaaggagagatatgtcaagaatttcatttgaagcctattttggtgtttaatcctgctgagcctatgtctctacaatttaacattcagtggaagcaataaatggtgatcatatcatcaagaaattggatccattcctcaaaaacattccagtgatccattcctttcatatccctgcgaaatgatttgtactcagaacagttgtgtgtttgcacaagcatatgcagcacattaagaatgccaaatctgaatttttcagtggtctgaagtggaaacttctcatagagcagccatatgttttctaggattgcattaatcttaccttttaggcaaacaatatagtgcattttgtctatgttttaccacatacaacaaatactgaaccctttcttattcctgtatctatgaatgaatatggaaagacttatctgaaaggcatatcaaggattttttttttttattagcttacttggccaggcgtggtggctcacttctgtaatcccagcactttgggaggcnaaggtgggtgnatcatgaggtcaggagttnnanacnagcctggccaacatggnnaaacccngtctctact

SEQ ID NO: 50925 - DNA, 959 bp, Homo sapiens
gagaggccttgtaggcacagcggctgagactcgatctgctccaagtaggggctccagcgcgggtcggagtctgggggttcgcgcccgccgacccgcgccctgctccctctcagcacctgggcggacgaaatgaccattaagaagtagatgcccagatgcaaaagtgatgaaacagtccatttgtcataaagtaagatgcagctgtggcatgtcaaccagcttggaacaaaattgtatctgtttttctcagaagagaattccacaagcatgggagaaatggtctttcaaatccttttgcatccagactgacacggtacctcacgcctataatcccagcactttgagaggctgaggaggagttcgagaccagcctggccaacatggtgaaaccccgtctctactaaaaatacaaaaaattagctgggcagggtggcgggcgcctgtaatcccagctactcgggaggctcagggaggagaatcacttgaacccaggaggtggaggttgcagtgagccgagattgtgccactgcactccagcctgggcgacagtgcgggactccgtctcaaaccaaaccaaacctaaccaaagccaaagcaaaccaaaccaaaccaaaaaaaaaaaaaaaaaaaaaaaaaagagaaaaaagaaaaaaggagagaaagacgaagcagagcgagaacaaagaacagcgagacgagaaactaagcgcgcggcgcacacaaacggcggaacaacacagagcaagggcacacacagcgacccgcgcgacaccctctctcacagtgggggttacaaggggcggcccacaaagggggggcgtataaaactcaccgaaaagagcgatccgcaagagtagacacctgccgcaacacgggcacaacccaccacagagcaacacaaacgtgaacacaccaagacacacaacaagagaagcgaacagacaacaagagagacaaaa

SEQ ID NO: 50926 - DNA, 3537 bp, Homo sapiens
gagaggccttgtaggcacagcggctgagactcgatctgctccaagtaggggctccagcgcgggtcggagtctgggggttcgcgcccgccgacccgcgccctgctccctctcagcacctgggcggacggttaaatcagcaaacaaagaaaacatggtattttgaaatatgattaaactcctgatgctgcagcagaggctaagaatattaatggccagatctagtgcacacatggtcttctgaagaagccatgggtagctgttgtagctgtccagataaagacactgtcccagataaccatcggaacaagtttaaggtcattaatgtggatgatgatgggaatgagttaggttctggcataatggaacttacagacacagaactgattttatacacccgcaaacgtgactcagtaaaatggcactacctctgcctgcgacgctatggctatgactcgaatctcttttcttttgaaagtggtcgaaggtgtcaaactggacaaggaatctttgcctttaagtgtgcccgtgcagaagaattatttaacatgttgcaagagattatgcaaaataatagtataaatgtggtggaagagccagttgtagaaagaaataatcatcagacagaattggaagtccctagaacacctcgaacacctacaactccaggatttgctgctcagaacttacctaatggatatccccgatatccctcatttggagatgcttcatcccatccgtcaagcagacatccttctgtgggaagtgctcgcctgccttcagtaggggaagaatctacacatcctttgcttgtggctgaggaacaagtacatacctatgtcaacactacaggtgtgcaagaagagcggaaaaaccgcacaagtgtgcatgttccattggaggcaagggtttctaacgctgaaagcagcacaccaaaagaagaaccaagtagtattgaggacagggatcctcagattcttcttgaacctgaaggagtcaaatttgttttagggccaacccctgttcaaaagcagttaatggaaaaagagaaactggagcaacttggaagagatcaagttagtggaagtggagcaaataacacagaatgggacactggctatgacagtgatgaacgaagagatgcaccctctgttaacaaactggtgtatgaaaatataaatgggctatctatccctagtgcctcaggggtcaggagaggtcgtctgacatccaccagtacctcagatacccagaatatcaacaactcagctcagagaagaactgcattattaaactatgaaaatctaccatctttgcctcctgtttgggaagcccgcaagctaagtagggatgaagatgacaatttaggaccaaagaccccatctctaaatggctaccataataatctagatccaatgcataactatgtaaatacagagaatgtaacagtgccagcaagtgctcacaaaatagaatattcaaggcgtcgggactgtacaccaacagtctttaactttgatatcagacgcccaagtttagaacacaggcagcttaattacatacaggttgacttggaaggtggcagtgactctgacaaccctcagactccaaaaacgcctacaactccccttccacaaacccctaccaggcgcacagagctgtatgccgtgatagacatcgagagaactgctgctatgtcaaatttgcagaaagcactgccacgagatgatggtacatctaggaaaactagacacaatagtactgatctgcccatgtgagcctggaaagcattgtgttgtttgcacctttgtgaagtttttaaaaatgaagatgcaagtgcttcattttcatttctaaacactaactccttttatagactgataaaatttttttctgaatatttcatgtgcatctttaactaaagggaattaatgtagagcaggtactccttaaagaacactaatttcattatatactactcgttgtacagcagcattcccgttttcacagtgcctatttaaaatgagagttgaagtaaatgacatgctggttgatttttatcaatattctggacttaacgcatacctttcatgtctaagtcatggttggcttttaaaactttttataaagcctcttgacaatgtacattgctaacaggtaactataggctttgaaagtaatgctcgtagattcagtgttcacagtatgtggcctccagcatgtaacatgaggaatcctttatttcattaattaatggctttttgacttgagccaaaacatatgtaaaggaaacagaagtaccgcacctcctcttacaccagtcagctcctttgccttcagtgttactagaaagcggcctgtgtccatgagtgtgctttgctgttggtgcactgaaaggcaggaaggagacaagattttctatttactcatctcatgatgtcatttgaagggcatgtccagatatcttaaaattataataggctcaagaatcagtctcaggtcactttacccaaaaacatttgaaaatctgaaccacaatctcctgaaagtttttctcctatagattgttgacaacacattgttttctggaggcatttgtgccattaggtttccatttatcttcagtttttttctttggtgtttgggatgtcttattttgttgccttatgtccttttcaatttaaaatgtttgagtttgtatatagttttgaaattggattatgtgttcattgttgtttagtttgcatttttgtcaaattatggttttgaaggttcatttggaacttactgttagtctgtaacagggttgcccttgtccagtatttatttataagctgtttacttttcaagttgataaaaacattctccaattctaaatttgcttgtgtccataggtgatctctttagcaaactgagaaaaaaaggaagctacttttaacatgcaaagttccctcaaggtgtaccgtgttgtctctgtgggcactcttccccagcactttagcagtaattcccccagctacacgctgcagttgtactctgcccactctagtgttcctcagctctgctgtccttttacttgtagctggatctttgattatccttcgatttccatgaaatattaatattgttgccagcatagcaggtacagtggaagtcttgtagcagtgagattgtatcataatttaggatttaaaatgaattaaagtttatataaactgaagagtctccatatgtcaaactcttggaaaatcaaagatgttccaatttcctaaacactagagaatacgagagaaggtagagtggaaaaggttaggtaaccttgcaaaatattttactattttctctaaatatgaggaagtttgagattatgatctggatctaccagatataactaaggttaatttagcatgaaaaagttttagtcatattggcatccaacctattcagtaaccgaatcataggacaatgatggattaggagaacaatagagtgggatcattataaagaaaataaattattaaaggtgtctttatcgtttta

SEQ ID NO: 50927 - DNA, 2872 bp, Homo sapiens
gagaggccttgtaggcacagcggctgagactcgatctgctccaagtaggggctccagcgcgggtcggagtctgggggttcgcgcccgccgacccgcgccctgctccctctcagcacctgggcggacggttaaatcagcaaacaaagaaaacatggtattttgaaatatgattaaactcctgatgctgcagcagaggctaagaatattaatggccagatctagtgcacacatggtcttctgaagaagccatgggtagctgttgtagctgtccagataaagacactgtcccagataaccatcggaacaagtttaaggtcattaatgtggatgatgatgggaatgagttaggttctggcataatggaacttacagacacagaactgattttatacacccgcaaacgtgactcagtaaaatggcactacctctgcctgcgacgctatggctatgactcgaatctcttttcttttgaaagtggtcgaaggtgtcaaactggacaaggaatctttgcctttaagtgtgcccgtgcagaagaattatttaacatgttgcaagagattatgcaaaataatagtataaatgtggtggaagagccagttgtagaaagaaataatcatcagacagaattggaagtccctagaacacctcgaacacctacaactccaggatttgctgctcagaacttacctaatggatatccccgatatccctcatttggagatgcttcatcccatccgtcaagcagacatccttctgtgggaagtgctcgcctgccttcagtaggggaagaatctacacatcctttgcttgtggctgaggaacaagtacatacctatgtcaacactacaggtgtgcaagaagagcggaaaaaccgcacaagtgtgcatgttccattggaggcaagggtttctaacgctgaaagcagcacaccaaaagaagaaccaagtagtattgaggacagggatcctcagattcttcttgaacctgaaggagtcaaatttgttttagggccaacccctgttcaaaagcagttaatggaaaaagagaaactggagcaacttggaagagatcaagttagtggaagtggagcaaataacacagaatgggacactggctatgacagtgatgaacgaagagatgcaccctctgttaacaaactggtgtatgaaaatataaatgggctatctatccctagtgcctcaggggtcaggagaggtcgtctgacatccaccagtacctcagatacccagaatatcaacaactcagctcagagaagaactgcattattaaactatgaaaatctaccatctttgcctcctgtttgggaagcccgcaagctaagtagggatgaagatgacaatttaggaccaaagaccccatctctaaatggctaccataataatctagatccaatgcataactatgtaaatacagagaatgtaacagtgccagcaagtgctcacaaaatagaatattcaaggcgtcgggactgtacaccaacagtctttaactttgatatcagacgcccaagtttagaacacaggcagcttaattacatacaggttgacttggaaggtggcagtgactctgacaaccctcagactccaaaaacgcctacaactccccttccacaaacccctaccaggcgcacagagctgtatgccgtgatagacatcgagagaactgctgctatgtcaaatttgcagaaagcactgccacgagatgatggtacatctaggaaaactagacacaatagtactgatctgcccatgtgagcctggaaagcattgtgttgtttgcacctttgtgaagtttttaaaaatgaagatgcaagtgcttcattttcatttctaaacactaactccttttatagactgataaaatttttttctgaatatttcatgtgcatctttaactaaagggaattaatgtagagcaggtactccttaaagaacactaatttcattatatactactcgttgtacagcagcattcccgttttcacagtgcctatttaaaatgagagttgaagtaaatgacatgctggttgatttttatcaatattctggacttaacgcatacctttcatgtctaagtcatggttggcttttaaaactttttataaagcctcttgacaatgtacattgctaacaggtaactataggctttgaaagtaatgctcgtagattcagtgttcacagtatgtggcctccagcatgtaacatgaggaatcctttatttcattaattaatggctttttgacttgagccaaaacatatgtaaaggaaacagaagtaccgcacctcctcttacaccagtcagctcctttgccttcagtgttactagaaagcggcctgtgtccatgagtgtgctttgctgttggtgcactgaaaggcaggaaggagacaagattttctatttactcatctcatgatgtcatttgaagggcatgtccagatatcttaaaattataataggctcaagaatcagtctcaggtcactttacccaaaaacatttgaaaatctgaaccacaatctcctgaaagtttttctcctatagattgttgacaacacattgttttctggaggcatttgtgccattaggtttccatttatcttcagtttttttctttggtgtttgggatgtcttattttgttgccttatgtccttttcaatttaaaatgtttgagtttgtatatagttttgaaattggattatgtgttcattgttgtttagtttgcatttttgtcaaattatggttttgaaggttcatttggaacttactgttagtctgtaacagggttgcccttgtccagtatttatttataagctgtttacttttcaagttgataaaaacattctccaattcta

SEQ ID NO: 50928 - DNA, 1023 bp, Homo sapiens
gagaggccttgtaggcacagcggctgagactcgatctgctccaagtaggggctccagcgcgggtcggagtctgggggttcgcgcccgccgacccgcgccctgctccctctcagcacctgggcggacgaaatgaccattaagaagtagatgcccagatgcaaaagtgatgaaacagtccatttgtcataaagtaagatgcagctgtggcatgtcaaccagcttggaacaaaattgtatctgtttttctcagaagagaattccacaaggagattttcttctttctaccatcatcaagatcaagcaggcaagtttacttgctgtcatcttctacaagtgtgggctgtgcatgcctttcttccaagaagtacagtacttccaagaagtgcagaagagttcggggagaagtaacttcacagtggagaaacctgacagccagcatggcctcacaaagattgattttactgctgctgaaaactgtctgaagatgagaagcagtttcagtaagaacaacagagagtaaacaaagctaagataacaacagtgaatgccacaaattctgaatagaacataacatggataaactgatttgttctacttcattaagttacactgaagttggagaagtttgcagaactttggcatacatagaggtcacaatagtatatgtttttatcaaactgaattctaattgttagaaggtaggacagtgaataatggcaatactgcagagtggttaggagaatgtgagctttgtggtcagtcagaaaactggttcaaatctcaaccgtgtcatttaggagttgggtgtgggcaagttatttaacttgagtcttacttctcacatctgtgtctgtcataggataattgtgtattatctgaatagtgagagttgaataaattatcctcaaaattaaataaaatggaaggattcagtatgatgcctggaaggcatgtatatattaaggtctcaataaatgctatttgttttgatttattattattacaataaaaaagtcacagtgg

SEQ ID NO: 50929 - DNA, 1319 bp, Homo sapiens
gagaggccttgtaggcacagcggctgagactcgatctgctccaagtaggggctccagcgcgggtcggagtctgggggttcgcgcccgccgacccgcgccctgctccctctcagcacctgggcggacgaaatgaccattaagaagtagatgcccagatgcaaaagtgatgaaacagtccatttgtcataaagtaagatgcagctgtggcatgtcaaccagcttggaacaaaattgtatctgtttttctcagaagagaattccacaagaatcagtctcaggtcactttacccaaaaacatttgaaaatctgaaccacaatctcctgaaagtttttctcctatagattgttgacaacacattgttttctggaggcatttgtgccattaggtttccatttatcttcagtttttttctttggtgtttgggatgtcttattttgttgccttatgtccttttcaatttaaaatgtttgagtttgtatatagttttgaaattggattatgtgttcattgttgtttagtttgcatttttgtcaaattatggttttgaaggttcatttggaacttactgttagtctgtaacagggttgcccttgtccagtatttatttataagctgtttacttttcaagttgataaaaacattctccaattctaaatttgcttgtgtccataggtgatctctttagcaaactgagaaaaaaaggaagctacttttaacatgcaaagttccctcaaggtgtaccgtgttgtctctgtgggcactcttccccagcactttagcagtaattcccccagctacacgctgcagttgtactctgcccactctagtgttcctcagctctgctgtccttttacttgtagctggatctttgattatccttcgatttccatgaaatattaatattgttgccagcatagcaggtacagtggaagtcttgtagcagtgagattgtatcataatttaggatttaaaatgaattaaagtttatataaactgaagagtctccatatgtcaaactcttggaaaatcaaagatgttccaatttcctaaacactagagaatacgagagaaggtagagtggaaaaggttaggtaaccttgcaaaatattttactattttctctaaatatgaggaagtttgagattatgatctggatctaccagatataactaaggttaatttagcatgaaaaagttttagtcatattggcatccaacctattcagtaaccgaatcataggacaatgatggattaggagaacaatagagtgggatcattataaagaaaataaattattaaaggtgtctttatcgtttta

SEQ ID NO: 50930 - DNA, 1051 bp, Homo sapiens
gagaggccttgtaggcacagcggctgagactcgatctgctccaagtaggggctccagcgcgggtcggagtctgggggttcgcgcccgccgacccgcgccctgctccctctcagcacctgggcggacgaaatgaccattaagaagtagatgcccagatgcaaaagtgatgaaacagtccatttgtcataaagtaagatgcagctgtggcatgtcaaccagcttggaacaaaattgtatctgtttttctcagaagagaattccacaaggagattttcttctttctaccatcatcaagatcaagcaggcaagtttacttgctgtcatcttctacaagggtgaaacacaactccctaatccttaagtgtgggctgtgcatgcctttcttccaagaagtacagtacttccaagaagtgcagaagagttcggggagaagtaacttcacagtggagaaacctgacagccagcatggcctcacaaagattgattttactgctgctgaaaactgtctgaagatgagaagcagtttcagtaagaacaacagagagtaaacaaagctaagataacaacagtgaatgccacaaattctgaatagaacataacatggataaactgatttgttctacttcattaagttacactgaagttggagaagtttgcagaactttggcatacatagaggtcacaatagtatatgtttttatcaaactgaattctaattgttagaaggtaggacagtgaataatggcaatactgcagagtggttaggagaatgtgagctttgtggtcagtcagaaaactggttcaaatctcaaccgtgtcatttaggagttgggtgtgggcaagttatttaacttgagtcttacttctcacatctgtgtctgtcataggataattgtgtattatctgaatagtgagagttgaataaattatcctcaaaattaaataaaatggaaggattcagtatgatgcctggaaggcatgtatatattaaggtctcaataaatgctatttgttttgatttattattattacaataaaaaagtcacagtgg

SEQ ID NO: 50931 - DNA, 496 bp, Homo sapiens
gaagtaacttcacagtggagaaacctgacagccaggtaggttgtcaggggtaacatcaacagtgataagtcatgttgatagtgtgtttcaagggctatgttgtgataaaagtggcactttatctctgtgatcctcctgtccaaatcccatactcccagtctaattatgagaaaagcatcaaattccaagagaggagaggcattctacaaaatactttacaggtgctcctgaaaatggtcaggattatcaaaaacaagaaaaatctgaaaaaccattactgccaagaggatccttaagagacatgatgactaaatgtaatgaagtttgtttttttaaaaaaccacaaaactgagtccctcaagaatttttttaaacctagaagtcacatactttgcaacttttattagattttagatcgcatcccactcttgaatgcatatttccccgggagcaacccatgttttaaaaaatttaataaaggaggatatcagataac

SEQ ID NO: 50932 - DNA, 162 bp, Homo sapiens
attttccctgcccatataaatacagttctgatttcaaattgtggtttgaattagggttcagtttttgtagagaaatattcagaatctctgatgggaggaaaataagggtgcttgaagaaaaagaggcatctgtagggacctttgtagtaggtgtttgacttt

SEQ ID NO: 50933 - DNA, 495 bp, Homo sapiens
gttttgcaagttatgtttaagtactatatattaaatcattacaatactgccatttatcagtgtctcaagagttaacagaaggctttgagggtatctatgggaaagccttgagaaggccatgggttactattggtgagctgttcatcatttgggttttccaaattactggaggccagattgttaatagtgttattagatccttatgtcatgatgtcctttcataagccctgcttgatttatggactggtggagcttttacaagcagttattctgtgtttggaaataagcaaagacaatcttagtcaatgtgatacaatggaaggagccctggactaaaacacagggcatccgtgtcctttccagtaatatgttttgtgattctgagtattaggttgctacatctggattgttgggcttctagtattttcacatataatttagtgaaagatttttaaacaagctgttttctgcatttagaattcttctcttgctatc

SEQ ID NO: 50934 - DNA, 321 bp, Homo sapiens
tttaccctgggttaagaatacctttctttcactttaagatttaaactaaatgacaccaaaactccaaccttggctagtaagatttttgagggcaggggaaaaaaatgccttttctcaaccacaaatctcgtgtactcaggaaacactgatttgttgggaatagaccaggtggagctctatttccagatattacaatgttggtcctgattcacagcagttgagcggctaaaagcattctaaataaggcagtgtttcaccaggtgaaggaagacaattagaaagggaggaagtctgtccttattcccatcctccacagctgcc

SEQ ID NO: 50935 - DNA, 273 bp, Homo sapiens
tccccttctaccttttaaggatcctgtgattatattgctactacctaagtgattcaggatcctcatcatatctgaagatcagctgattattatctacaactttgatttccccttgccatgtaaagtaacatattcctatttgcagggtttttgaatttggacatagacatcattgggagccattattctgcctaccacaatgattcagtgtcaggattattcagcaatacatatgagtttctacaatgggcaagaacatttagtattacaacg

SEQ ID NO: 50936 - DNA, 339 bp, Homo sapiens
ttccttaccatataagggcagaagtttagcttggctgtggtcacttggccttacacagcaagttgggtgaaaccttcttcgtataactacagtttgcatgaaataaaaagacctgacctttgatcatcccaagttccactccagttcagtcaggactttggaaacatattccagaggattgatttctagattataatattctcccaccagtattttttcttaataaccttaactggaatacttttttaaaaagtaaaagtcactgccatttttaattttctgttgttgtattggctaaaacatctggatttcatgaaaatctaggcctcataaaagttg

SEQ ID NO: 50937 - DNA, 801 bp, Homo sapiens
ttttttttttggtagagacagagtttcactatgttggccaggctggtcacaaaatcctaaccacaagtgatccacctgcctcagcctcccgaagtcctagggttacaggtgtgagccactgtgaccagccaatattattatttaatataaaatgctctaaattctaagagaaaataatacacacatatcagagtactgtgatagactcagataaaatgatacaaattatagtgttctaactatgtcaaatgtgttctaactatggtatagattttgatggcttttctccgattcaaattacattttttctgaaacaaatctaaagataagagagtactttcatcagggaagttggtttctgcaggattccctagagagatttttattcttaggtctttgaagagacttgggggtctcttttcaaagacaaaacttttgagataactttttcaacattttaaagcaaaaagttgacaactttctgccttagagatgtgaaattgttgaccttggagtgcatctccctaaaattggctgaaagtcgtgaattttgtgttctgtttcccacaatgtcatgagaaacagcccaggtgtagttggtagtccgtgctagtgcagtggctgtcactgtttcacatgacaacagagctggaaggagccctaaatagcatccaattcagggcccatattttgtaaatgtggaatgaaacttgatcgaggcaacagaccccccatgatgcggagttcagagacagtgttttgcaggattgattcagccttgaaaactcacacagctcaatt

SEQ ID NO: 50938 - DNA, 397 bp, Homo sapiens
tgtgtaactcatttgtttattaggtaagatcttcctataaaatttctaaaaggtttctagatgcatctcccattgcttattagttcaactactaagtacatatgaattaatgctgctttttcctaaaggttatatttaaggagcaggaaagcatcatataacaatattttcataatgccccaaatttctccaacatgttgttttcattatttttgtaaaataatgtcaaaattatttgacaaaattcatttctctgcaagtttatgaaactgactagtgagctgggcatggtggctcatgcctgtaattccatcactttgggaggctcaggtaggaagatcgcctgagcccacgagttccagacaagcctgggaaacaaagtgagaccctgtttcta

SEQ ID NO: 50939 - DNA, 551 bp, Homo sapiens
cttggagataaaatgagtctacctacaagcctgggaacatggtgagaccccatctctgcaaaaaacaaatgtgcgcctttggtcccagctacttaaggaggctgaggtgtgggaggatcacttgagctccagaagtcgaggctgcagtgagctgtgatcatgccactgcagtctatcctgggcgacagagtgagaccctgtctcaaaaacaaaaaaaaaaaatgagtctacctagtctgtcattttcccccaaatttttaattttaaacattagaaattgaaatgtactaagaaagtaacttgaacactaaatccctaaaaatgatatagtgatctcacaattctagaaagtgattcctgatttcatgttctattttgttcttattcttactaccaccaccctaatccaggcctttttctaatttattgctgatattgaaggagtcttttttattgtgccttagtttcttatatgcacgttgctgccaaagccatctcttaataaaaggtttgatgaatgttacaacagtaattgaaatttttccactaaa

SEQ ID NO: 50940 - DNA, 538 bp, Homo sapiens
aggaaagggtcctctttccatttccttattctgaggctagagagaagggtggattccccagttttcagggagatggtggtcatcgtgtctgcagactaggtttgctccctgggtgtggtccaactttctttctgacttgccgtcctctctgggtctccctgcagaccccaggttggcctcctgcctttctgctttctctggccttatctctctctctctctctctctctggttccattctccaggacccgcagatttcttctgcttcctgaatactcccttgaccgtgtcatgtaaccccaaggttctgctaaacagtcaaagccgattccatcggataattcgagttaaagtgtaaaaggagggtagtagcacatttctgtgaacatgtacatttgaaagttttcatctcttaacctgaaaatgtgattggaacaggcgcttcaagagtgtggaaaatatggccaggtgcggtggcgcatgcctgtagtcccagcactttgggaggctgaggcgtgtggatcacctgaggtcaggag

SEQ ID NO: 50941 - DNA, 207 bp, Homo sapiens
ctcattgtaaaacatgacaataatagcacctacttatgagggttgttttggggatcatgaagtaacccataaaaagcacttagcatagtgcctggcacgtagtaatgttcaaaaagtattaaccattgacattatcgttactaacttattatgcataagatgtgttcgtgtagcctgatggcatttggctttcactttatcagaaag

SEQ ID NO: 50942 - DNA, 204 bp, Homo sapiens
aagactcaggccttgggaacaaggctgtgactgttgttacccacacacgcatgtgagtgtgcagcctctccggggagagtgggtgacctgggggagtcaaggcaggtggaacaagccatccacttctgcactggtgccgtccactcagagaacccgtctagcagcggagatgctgctcccaagctgagagatgtggtcctgcgg

SEQ ID NO: 50943 - DNA, 930 bp, Homo sapiens
aagccctgcctcagcttctctcccaacactcagcttttctcccaatacaggaacttttggaggtcacttctggggcctttgctgagcaggccactccttgcttctcctgcagatgacaaggtttccagcatgattattgctatgactgatggaacaatgatgaaacatccatctttggacactctcaaagaaggagtacttcattgaagtcagcttgaacaacggcaaaacattcaagagcaatgtcagcatcaccagcaccacatgtactcgtggaacaaataccacggagcagcacctagcacagaggaaggccccctgccctgggcatctgtgggaaaccagggcccaagtctgcggtgagctggtgcagaaactctgagctgaggagctaacattacacccatctgcaactgagagaacctgccaggctccagcaaaaccaaacaggacattctccccaggagacaccgtcctcatccaggggaaccaggattctcatggaaaatcatttcctactgaagacgaggtcagaggaaaaactcccaggtatcccaaagagaggcagcagatacaagaaacaaggagattcaaagcccagagagtaaagagaatagagtgatctaaaaggaacattgaaataagggtgtataaaatgttcaaaaaaagataaaggaataaaactatatgacaagaacagctaattataacaaatgcagagttttaaaaggaccgaagttctaaaatgcattaatgaaaaatgaaacacaaccagaaagttcaagacaaaaagtggaataactccaaagacagatctgagcagcatctgccctgcagccccactgaccgagatggaaaccagaaacaggatgttgtgtgctgggagcagataaggagtgtctagcagggcagctcactccaccatcctca

SEQ ID NO: 50944 - DNA, 430 bp, Homo sapiens
aagccctgcctcagcttctctcccaacactcagcttttctcccaatacaggaacttttggaggtcacttctggggcctttgctgagcaggccactccttgcttctcctgcagatgacaaggtttccagcatgattattgctatgactgatggaacaatgatgaaacatccatctttggacactctcaaagaaaatcctaccatgtggttattcatggaaatggctttcagaatctaaagaaacgggatgaagttatttgcagatttatcttcagtgaaagcactatcattgggagtacttcattgaagtcagcttgaacaacggcaaaacattcaagagcaatgtcagcatcaccagcaccacatgtggcaatctggatatcttccgtgacctctctcacccaagctgctgccaggtgccatggatgtgg

SEQ ID NO: 50945 - DNA, 530 bp, Homo sapiens
gataattttatttatttaaagaacagattttgttatgtctctgtggaaacatttagtacctgttaagataaaaactaatcagaaagaaaacatcaatcctgggaaagcaaaacagacgggtgtgtgtctaaacttatggtctgcaacttggcctacagagggaagctggaggaggtgaaggagaggattctggccaataaacccctggctatgagaactgaccaggacagaagtgcattgcattgggcatgctcagccatacatacataaattattgaatttttgtttcaacttggagtgccagtgaatgataaagactatgcgagattggtctcctcttcagactgctgtttgtgctggccagaatgagactgtaaaagcccttctgggaaaaggtgctcaagtgaatgctgtcaatcaaaatggctctactcccctacatcatgcagcttccaaaaacaggcatgagattgctctcatgttactagaaggtggggctaatccagatggtaaggatcattatgaggcta

SEQ ID NO: 50946 - DNA, 343 bp, Homo sapiens
aaagactcagtgttgagactcacatgtctccccgaagggaaggaggaggcattcaagtagaaacacatttacgtcaacaggttttctgaacccccggtgaattttgagttcttagtgcaaccttcccctgcttcaccgttcctgtttcttctctgtgcctctgttttccggttggggaagtggaaaggatcctgactctggaggaaagtggagaagaaccagtgggcccgactgcatcaagagcctccccttagcagagaaccgcctggtcctcctcactcatacgtgctgtctgtgtgcagggtgctcatgggagatgttgaagaggtgtaagaaggcttct

SEQ ID NO: 50947 - DNA, 307 bp, Homo sapiens
ctgtgttgtccaggctggtcttaaacgcctgagcttaagcagtctacatgcctcagcctcctgaagtgctgggattccaaacatgagccactgtgcctggcccggcaactgttactagactatagagagggaggtgggcaagggctggtgacactagacaggtgcagtaggtctggaccatgggtggccttgcgctacacattacagagctcaggctttttttctccaggtgagagggctggtgccactgaggcatcaagcagaggtttgagatctccttggtgacagtgtagagcagacaggtaga

SEQ ID NO: 50948 - DNA, 362 bp, Homo sapiens
gccttttagacttagcacccttgcaaagctcattctttgcctctcgattgtttggaaagacacagtggtgtaagttaaaagcctgaactttagagtaaaaatacctaggtttaagtcctggttctcctctatattaactgtgtgatctttggggaagttaattaacctccctgggcctcagtttctctcatgtgtaaaatggaggtaatggcatctaccttatagatttgttgtattaaatatattaaatgaattaatacacataaggcactaattgtgttagctatttttataatcttaaccataatatttgtctgttttttcaaacaaaatttaaggatttaaagagataagatagactt

SEQ ID NO: 50949 - DNA, 998 bp, Homo sapiens
aagactcaaacttagaaacttgaattagatgtggtattcaaatccttacgtgccgcgaagacacagacagcccccgtaagaacccacgaagcaggcgaagttcattgttctcaacattctagctgctcttgctgcatttgctctggaattcttgtagagatattacttgtccttccaggctgttctttctgtagctcccttgttttctttttgtgatcatgttgcagatggctgggcagtgctcccaaaatgaatattttgacagtttgttgcatgcttgcataccttgtcaacttcgatgttcttctaatactcctcctctaacatgtcagcgttattgtaatgcaagtgtgaccaattcagtgaaaggaacgaatgcgattctctggacctgtttgggactgagcttaataatttctttggcagttttcgtgctaatgtttttgctaaggaagataagctctgaaccattaaaggacgagtttaaaaacacaggatcaggtctcctgggcatggctaacattgacctggaaaagagcaggactggtgatgaaattattcttccgagaggcctcgagtacacggtggaagaatgcacctgtgaagactgcatcaagagcaaaccgaaggtcgactctgaccattgctttccactcccagctatggaggaaggcgcaaccattcttgtcaccacgaaaacgaatgactattgcaagagcctgccagctgctttgagtgctacggagatagagaaatcaatttctgctaggtaattaaccatttcgactcgagcagtgccactttaaaaatcttttgtcagaatagatgatgtgtcagatctctttaggatgactgtatttttcagttgccgatacagctttttgtcctctaactgtggaaactctttatgttagatatatttctctaggttactgttgggagcttaatggtagaaacttccttggtttcatgattaaactcttttttttcctgacatc

SEQ ID NO: 50950 - DNA, 289 bp, Homo sapiens
tggtctcaaacgcctagcctcaaatgatcgtcccccgctgggcctcccaagttactaggattacagacatgagccattgtgccaggtctacctttactcttgtttcaagtagaaattcactgaaaatatttcaccccaactactgaatcctttgagaagttaaaattatttacctgaatcacaagaccaattatgttttttctgaaagtctgagatcagatttcattatttttagtaataaatttccaacaacactttgtattagggttctcttagaggggcagaagta

SEQ ID NO: 50951 - DNA, 1065 bp, Homo sapiens
gactggcggcgggcgccgcggtcgggctggctgccgggcagcatggaggagctgagcagcgtgggcgagcaggtcttcgccgccgagtgcatcctgagcaagcggctccgcaagggcaagctggagtacctggtcaagtggcgcggctggtcctccaaacataacagctgggagccggaggagaacatcctggacccgaggctgctcctggccttccagaagaaggaacatgagaaggaggtgcagaaccggaagagaggcaagaggccgagaggccggccaaggaagctcactgccatgtcctcctgcagccggcgctccaagctcaaggtgggtggctgcgctgggtatgctgaccccacctcccagcacccccttggcgtagggggcaggcagagggagggtttggggccctcaggaagggggtggcacttctgccaacagtctgtccctctactcggaaaacaggagccccctttcttcctgtctctcagcttctgctgccaggggccccagccggctgagagttcctccccgcccctcccaggggcttcctgcttcagcctgtcctgcacgcctctctgctgggtggcagggtcaaactgctgcagacaagcactcttccctcccagggggtccttgggggacggaaaggaacaggaagcatgcgtacagtaggtgctcataggattgccggctggatgtgactcaaaagcctaagatttgggggctactccgggcccacctgcgggtgcaccttaaatcgaggtggccacgaaaggcagggctgactgaatagccagggggtgccaggaggggccttggaggagggcagaggcagtgtgggctgatgatgtgctttggccttctcgggactgtcctgtcacccctcctcgctacagtgatgggctcaccccgccacaggtatgcatgcgcccctggggtccgtggtagggcccctccctcccctgaggacaggtgaggcaggacaggatgggggaggagggcctggcctcagtcccgggtgtggctttgattccctcctccgggcactgtccctgatac

SEQ ID NO: 50952 - DNA, 745 bp, Homo sapiens
acttacggctaggtacgaggctgggtggtggtccatggcttcgttgagggccatccatatgccagctgggggccagcccacagtggccatattggctgcagcaggaatggtgcccacctcggcgaattgaagggctaagagtcccagatagctaggccagagctggaagcagacagtaaggggaagagctgctcccacaggagagggagagattccagctcactgcgcagcctgggaggaggcgtggatcctggcacgctgagcctcaggcaccagcctccctgtgctcgacagcaaagtcttgactccttcctgctgagcactgtgctaccttcactgctccaaagccagactaacagctctccaagcccttggggtgactcggcttccaggagctgttggagaaatgaggatgtctgtccctgtctgcctgggcaggccagattcctccccagcagccgggtctctccagaccctgattcggtgcctttctgtttaccagctacttcaatcccaaagtttgaatctgcagataccttactcccagccactttgccttcttactgtgttgtgtgtttttcctggtgcttcaagagcgtgtgcagggcaagtgccgtcactgggaactgcaccagatgctcagacttggttgtcttatgtttaccaataaataaaagtagactttttacaccaaaccaacatccaaaaaaaaacccgggggcaaaatgggggggggacaaagggg

SEQ ID NO: 50953 - DNA, 4580 bp, Homo sapiens
gactggcggcgggcgccgcggtcgggctggctgccgggcagcatggaggagctgagcagcgtgggcgagcaggtcttcgccgccgagtgcatcctgagcaagcggctccgcaagggcaagctggagtacctggtcaagtggcgcggctggtcctccaaacataacagctgggagccggaggagaacatcctggacccgaggctgctcctggccttccagaagaaggaacatgagaaggaggtgcagaaccggaagagaggcaagaggccgagaggccggccaaggaagctcactgccatgtcctcctgcagccggcgctccaagctcaaggaacccgatgctccctccaaatccaagtccagcagttcctcctcttcctccacgtcatcctcctcttcctcagatgaagaggatgacagtgacttagatgctaagaggggtccccggggccgcgagacccacccagtgccgcagaagaaggcccagatcctggtggccaaacccgagctgaaggatcccatccggaagaagcggggacgaaagcccctgcccccagagcaaaaggcaacccgaagacccgtgagcctggccaaggtgctgaagaccgcccggaaggatctgggggccccggccagcaagctgccccctccactcagcgcccccgttgcaggcctggcagctctgaaggcccacgccaaggaggcctgtggcggccccagtgccatggccaccccagagaacctggccagcctaatgaagggcatggccagtagccccggccggggtggcatcagctggcagagctccatcgtgcactacatgaaccggatgacccagagccaggcccaggctgccagcaggttggcgctgaaggcccaggccaccaacaagtgcggcctcgggctggacctgaaggtgaggacgcagaaaggggagctgggaatgagccctccaggaagcaaaatcccgaaggcccccagcggtggggctgtggagcagaaagtggggaacacagggggccccccgcacacccatggtgccagcagggtgcctgctgggtgcccaggcccccagccagcacccacccaggagctgagcctccaggtcttggacttgcagagtgtcaagaatggcatgcccggggtgggtctccttgcccgccacgccaccgccaccaagggtgtcccggccaccaacccagcccctgggaagggcactgggagtggcctcattggggccagcggggccaccatgcccaccgacacaagcaaaagtgagaagctagcttccagagcagtggcgccacccacccctgccagcaagagggactgtgtcaagggcagtgctacccccagtgggcaggagagccgcacagcccccggagaagcccgcaaggcggccacactgccagagatgagcgcaggtgaggagagtagcagctcggactccgaccccgactccgcctcgccgcccagcactggacagaacccgtcagtgtccgttcagaccagccaggactggaagcccacccgcagcctcatcgagcacgtatttgtcaccgacgtcactgccaacctcatcaccgtcacagtgaaggagtctcccaccagcgtgggcttcttcaacctgaggcattactgaagccccggcgccaccagctgcgcggtcttactccccttccctgcctatggtgtcgcttggctaagtgactcccagcccaagccccctcaagagtctgggtcgggggaggaggagtgggtggcctccttgatgggcaggcttggaagggacttctcccgcaccccactctgtcccaggacatagggcagggggcctcactgccttgttggtctccaccttgttcctacctctgcaggcctctttgctctcccctcttgcctcaggaaacccggtggcacctgtggctccaggtgactgtcttgaacagagcgggcttcttcatggctgcgttgttgctgagtttgaactgctcctccctggcctgcgtgactgaatcacagctttggtccctgtcttgcaggggctgaggtgtcaggaggggacttctggcccaccttgccttcagccctggagtgggcagagagtattgtggggaggcatggccagtgggactagtgttccctccatctggccacagcttttgggagatggggtgggcaggggtggtcctggctggcattgcctgagccggcagtgatgaagtggggagcttgcccttgacaggtgggggctggctggggccttaatgtgaaaagacagtggcaggcagctggagtagagcgagcccagcagccctaaaaggctgccttcatggccatctagccccagttcagggcagcatccatagcccacaagccagcgtgggtggggcgggggtggtcccacagctgggttccacctgaagagcctccgtgcctcggagcaggagaggcaggctatggctgccaccctccctcctgcctgtgtcccagtgagaactgacctgagtccccttccaaacccagacccacctcctgccccaggcccactgaagcatgttccatttctaaaaagcccagagttcagtgtgtcccaaggaaaacccaaagtggaggtgctcaggtccaggggagtccagtgggcaggacccttggcaggcaagcccctcccttcactcccaggacctaccttctgctagtaaaggactggcttcattctaattatggcccacagactgccccggagacctggaggacagcagtgctggcacttgggtgtccatgggcccgtctgccggctctgcctgtgctgcaagtgttggccgtgggtccagccaacaactccctacgtcctgtgtggggccctgcccaagtggatgaggcattccttgaggagtatcattttccctgacaatccccatcacctttaggggttccctgcttggctcctttccagctgaaaaactagacctgtgccattggggaagctggacaaagtctagggggcccgcctggtagagggtcccgggaagctggatctgtcagcctcggccctgaggcccctgttaactcaagactgtgagctgcctctaggtggtcacgtctgggagctagcttgtatggcttctgaccagtatcaggatttctgttctgagagcagcgtgggcagcaaggcagggcagcccagaggtggcagcggcaggcaatctggtcactaggtctttgtgatgccaaaaataaaagagggtggggtgggtgctttctgttcctctgattggatggagtccgccagcaggcatggggctacattccagtgcctgactatagggaggcactcctgattccatggagcagcccggactttgagaatgggctctggtttgcggggggcaggcgtaccagactgcaagaccccccagtacctcaccgtgccaaataggaagaggtggccttggtgtagccaaatggatctttttaacagtgtgcctttggggagggacccatgtccatggcttcgttgagggccatccatatgccagctgggggccagcccacagtggccatattggctgcagcaggaatggtgcccacctcggcgaattgaagggctaagagtcccagatagctaggccagagctggaagcagacagtaaggggaagagctgctcccacaggagagggagagattccagctcactgcgcagcctgggaggaggcgtggatcctggcacgctgagcctcaggcaccagcctccctgtgctcgacagcaaagtcttgactccttcctgctgagcactgtgctaccttcactgctccaaagccagactaacagctctccaagcccttggggtgactcggcttccaggagctgttggagaaatgaggatgtctgtccctgtctgcctgggcaggccagattcctccccagcagccgggtctctccagaccctgattcggtgcctttctgtttaccagctacttcaatcccaaagtttgaatctgcagataccttactcccagccactttgccttcttactgtgttgtgtgtttttcctggtgcttcaagagcgtgtgcagggcaagtgccgtcactgggaactgcaccagatgctcagacttggttgtcttatgtttaccaataaataaaagtagactttttctatttttatttgctgctatttgtgtgtgtgtttgtgtttgtgtagctaggtatctggcacttctgacgatgcattgttgcttttttcccgaaggtcccgcaggaactgtggcaatggtgtgtgtgtgaaatggtgtgttaaccgcgttttgtttgctcctgtattgaataggaagcagtggccagtctgtcttccttagagatgttagcatatttttatatgtatatattttgtaccaaaaaagagtgttccttgttttggttacactcgaaattctgacctagctggagagggctctgggccgagagctttcactaaggggagacttcaggggaggatcaagctttgaaccaaagccaatcactggcttgatttgtgttttttaattaaaaaaaaaatcattcatgtatgccacttct

SEQ ID NO: 50954 - DNA, 4679 bp, Homo sapiens
taatggaagggagggtgtttggcatccccggaaggggctctctgcacagctgctcccgcggccccgtttctgcgtcttcccggaccccgctctttcttcgctacccctcgaggtgccccggcccgcgcgccacattgttctggatctcgggctgggcgcctgtgcccctccctgcatgctggacctgccttcccttcctcctctggctccgggccagggtttgggggaatccctctctgcaactttgcgttttatgggggtttgtttttctcccaggcagagactgtgggagtcctcttgtggccttgttttaattggggggttggagcggcagtttccctttgggtctgaggttagagtgctggcttggtggggggtggccagcctccaaaacctgggtttggactttgagaagtgccatggtgctacggtgccactgccatcggcccaagtcgaggagcggtgagggcgagccccctcgggctgccttgcaaagcggtgatcatcagcctggcgtctaatgctgccctgtcctctgctttgcagacataacagctgggagccggaggagaacatcctggacccgaggctgctcctggccttccagaagaaggaacatgagaaggaggtgcagaaccggaagagaggcaagaggccgagaggccggccaaggaagctcactgccatgtcctcctgcagccggcgctccaagctcaaggaacccgatgctccctccaaatccaagtccagcagttcctcctcttcctccacgtcatcctcctcttcctcagatgaagaggatgacagtgacttagatgctaagaggggtccccggggccgcgagacccacccagtgccgcagaagaaggcccagatcctggtggccaaacccgagctgaaggatcccatccggaagaagcggggacgaaagcccctgcccccagagcaaaaggcaacccgaagacccgtgagcctggccaaggtgctgaagaccgcccggaaggatctgggggccccggccagcaagctgccccctccactcagcgcccccgttgcaggcctggcagctctgaaggcccacgccaaggaggcctgtggcggccccagtgccatggccaccccagagaacctggccagcctaatgaagggcatggccagtagccccggccggggtggcatcagctggcagagctccatcgtgcactacatgaaccggatgacccagagccaggcccaggctgccagcaggttggcgctgaaggcccaggccaccaacaagtgcggcctcgggctggacctgaaggtgaggacgcagaaaggggagctgggaatgagccctccaggaagcaaaatcccgaaggcccccagcggtggggctgtggagcagaaagtggggaacacagggggccccccgcacacccatggtgccagcagggtgcctgctgggtgcccaggcccccagccagcacccacccaggagctgagcctccaggtcttggacttgcagagtgtcaagaatggcatgcccggggtgggtctccttgcccgccacgccaccgccaccaagggtgtcccggccaccaacccagcccctgggaagggcactgggagtggcctcattggggccagcggggccaccatgcccaccgacacaagcaaaagtgagaagctagcttccagagcagtggcgccacccacccctgccagcaagagggactgtgtcaagggcagtgctacccccagtgggcaggagagccgcacagcccccggagaagcccgcaaggcggccacactgccagagatgagcgcaggtgaggagagtagcagctcggactccgaccccgactccgcctcgccgcccagcactggacagaacccgtcagtgtccgttcagaccagccaggactggaagcccacccgcagcctcatcgagcacgtatttgtcaccgacgtcactgccaacctcatcaccgtcacagtgaaggagtctcccaccagcgtgggcttcttcaacctgaggcattactgaagccccggcgccaccagctgcgcggtcttactccccttccctgcctatggtgtcgcttggctaagtgactcccagcccaagccccctcaagagtctgggtcgggggaggaggagtgggtggcctccttgatgggcaggcttggaagggacttctcccgcaccccactctgtcccaggacatagggcagggggcctcactgccttgttggtctccaccttgttccacagcttttgggagatggggtgggcaggggtggtcctggctggcattgcctgagccggcagtgatgaagtggggagcttgcccttgacaggtgggggctggctggggccttaatgtgaaaagacagtggcaggcagctggagtagagcgagcccagcagccctaaaaggctgccttcatggccatctagccccagttcagggcagcatccatagcccacaagccagcgtgggtggggcgggggtggtcccacagctgggttccacctgaagagcctccgtgcctcggagcaggagaggcaggctatggctgccaccctccctcctgcctgtgtcccagtgagaactgacctgagtccccttccaaacccagacccacctcctgccccaggcccactgaagcatgttccatttctaaaaagcccagagttcagtgtgtcccaaggaaaacccaaagtggaggtgctcaggtccaggggagtccagtgggcaggacccttggcaggcaagcccctcccttcactcccaggacctaccttctgctagtaaaggactggcttcattctaattatggcccacagactgccccggagacctggaggacagcagtgctggcacttgggtgtccatgggcccgtctgccggctctgcctgtgctgcaagtgttggccgtgggtccagccaacaactccctacgtcctgtgtggggccctgcccaagtggatgaggcattccttgaggagtatcattttccctgacaatccccatcacctttaggggttccctgcttggctcctttccagctgaaaaactagacctgtgccattggggaagctggacaaagtctagggggcccgcctggtagagggtcccgggaagctggatctgtcagcctcggccctgaggcccctgttaactcaagactgtgagctgcctctaggtggtcacgtctgggagctagcttgtatggcttctgaccagtatcaggatttctgttctgagagcagcgtgggcagcaaggcagggcagcccagaggtggcagcggcaggcaatctggtcactaggtctttgtgatgccaaaaataaaagagggtggggtgggtgctttctgttcctctgattggatggagtccgccagcaggcatggggctacattccagtgcctgactatagggaggcactcctgattccatggagcagcccggactttgagaatgggctctggtttgcggggggcaggcgtaccagactgcaagaccccccagtacctcaccgtgccaaataggaagaggtggccttggtgtagccaaatggatctttttaacagtgtgcctttggggagggacccatgtccatggcttcgttgagggccatccatatgccagctgggggccagcccacagtggccatattggctgcagcaggaatggtgcccacctcggcgaattgaagggctaagagtcccagatagctaggccagagctggaagcagacagtaaggggaagagctgctcccacaggagagggagagattccagctcactgcgcagcctgggaggaggcgtggatcctggcacgctgagcctcaggcaccagcctccctgtgctcgacagcaaagtcttgactccttcctgctgagcactgtgctaccttcactgctccaaagccagactaacagctctccaagcccttggggtgactcggcttccaggagctgttggagaaatgaggatgtctgtccctgtctgcctgggcaggccagattcctccccagcagccgggtctctccagaccctgattcggtgcctttctgtttaccagctacttcaatcccaaagtttgaatctgcagataccttactcccagccactttgccttcttactgtgttgtgtgtttttcctggtgcttcaagagcgtgtgcagggcaagtgccgtcactgggaactgcaccagatgctcagacttggttgtcttatgtttaccaataaataaaagtagactttttctatttttatttgctgctatttgtgtgtgtgtttgtgtttgtgtagctaggtatctggcacttctgacgatgcattgttgcttttttcccgaaggtcccgcaggaactgtggcaatggtgtgtgtgtgaaatggtgtgttaaccgcgttttgtttgctcctgtattgaataggaagcagtggccagtctgtcttccttagagatgttagcatatttttatatgtatatattttgtaccaaaaaagagtgttccttgttttggttacactcgaaattctgacctagctggagagggctctgggccgagagctttcactaaggggagacttcaggggaggatcaagctttgaaccaaagccaatcactggcttgatttgtgttttttaattaaaaaaaaaatcattcatgtatgccacttct

SEQ ID NO: 50955 - DNA, 2799 bp, Homo sapiens
taagccgggtgtagtcggacgaggactctgtcccaggacatagggcagggggcctcactgccttgttggtctccaccttgttcctacctctgcaggcctctttgctctcccctcttgcctcaggaaacccggtggcacctgtggctccaggtgactgtcttgaacagagcgggcttcttcatggctgcgttgttgctgagtttgaactgctcctccctggcctgcgtgactgaatcacagctttggtccctgtcttgcaggggctgaggtgtcaggaggggacttctggcccaccttgccttcagccctggagtgggcagagagtattgtggggaggcatggccagtgggactagtgttccctccatctggccacagcttttgggagatggggtgggcaggggtggtcctggctggcattgcctgagccggcagtgatgaagtggggagcttgcccttgacaggtgggggctggctggggccttaatgtgaaaagacagtggcaggcagctggagtagagcgagcccagcagccctaaaaggctgccttcatggccatctagccccagttcagggcagcatccatagcccacaagccagcgtgggtggggcgggggtggtcccacagctgggttccacctgaagagcctccgtgcctcggagcaggagaggcaggctatggctgccaccctccctcctgcctgtgtcccagtgagaactgacctgagtccccttccaaacccagacccacctcctgccccaggcccactgaagcatgttccatttctaaaaagcccagagttcagtgtgtcccaaggaaaacccaaagtggaggtgctcaggtccaggggagtccagtgggcaggacccttggcaggcaagcccctcccttcactcccaggacctaccttctgctagtaaaggactggcttcattctaattatggcccacagactgccccggagacctggaggacagcagtgctggcacttgggtgtccatgggcccgtctgccggctctgcctgtgctgcaagtgttggccgtgggtccagccaacaactccctacgtcctgtgtggggccctgcccaagtggatgaggcattccttgaggagtatcattttccctgacaatccccatcacctttaggggttccctgcttggctcctttccagctgaaaaactagacctgtgccattggggaagctggacaaagtctagggggcccgcctggtagagggtcccgggaagctggatctgtcagcctcggccctgaggcccctgttaactcaagactgtgagctgcctctaggtggtcacgtctgggagctagcttgtatggcttctgaccagtatcaggatttctgttctgagagcagcgtgggcagcaaggcagggcagcccagaggtggcagcggcaggcaatctggtcactaggtctttgtgatgccaaaaataaaagagggtggggtgggtgctttctgttcctctgattggatggagtccgccagcaggcatggggctacattccagtgcctgactatagggaggcactcctgattccatggagcagcccggactttgagaatgggctctggtttgcggggggcaggcgtaccagactgcaagaccccccagtacctcaccgtgccaaataggaagaggtggccttggtgtagccaaatggatctttttaacagtgtgcctttggggagggacccatgtccatggcttcgttgagggccatccatatgccagctgggggccagcccacagtggccatattggctgcagcaggaatggtgcccacctcggcgaattgaagggctaagagtcccagatagctaggccagagctggaagcagacagtaaggggaagagctgctcccacaggagagggagagattccagctcactgcgcagcctgggaggaggcgtggatcctggcacgctgagcctcaggcaccagcctccctgtgctcgacagcaaagtcttgactccttcctgctgagcactgtgctaccttcactgctccaaagccagactaacagctctccaagcccttggggtgactcggcttccaggagctgttggagaaatgaggatgtctgtccctgtctgcctgggcaggccagattcctccccagcagccgggtctctccagaccctgattcggtgcctttctgtttaccagctacttcaatcccaaagtttgaatctgcagataccttactcccagccactttgccttcttactgtgttgtgtgtttttcctggtgcttcaagagcgtgtgcagggcaagtgccgtcactgggaactgcaccagatgctcagacttggttgtcttatgtttaccaataaataaaagtagactttttctatttttatttgctgctatttgtgtgtgtgtttgtgtttgtgtagctaggtatctggcacttctgacgatgcattgttgcttttttcccgaaggtcccgcaggaactgtggcaatggtgtgtgtgtgaaatggtgtgttaaccgcgttttgtttgctcctgtattgaataggaagcagtggccagtctgtcttccttagagatgttagcatatttttatatgtatatattttgtaccaaaaaagagtgttccttgttttggttacactcgaaattctgacctagctggagagggctctgggccgagagctttcactaaggggagacttcaggggaggatcaagctttgaaccaaagccaatcactggcttgatttgtgttttttaattaaaaaaaaaatcattcatgtatgccacttct

SEQ ID NO: 50956 - DNA, 4606 bp, Homo sapiens
taatggaagggagggtgtttggcatccccggaaggggctctctgcacagctgctcccgcggccccgtttctgcgtcttcccggaccccgctctttcttcgctacccctcgaggtgccccggcccgcgcgccacattgttctggatctcgggctgggcgcctgtgcccctccctgcatgctggacctgccttcccttcctcctctggctccgggccagggtttgggggaatccctctctgcaactttgcgttttatgggggtttgtttttctcccaggcagagactgtgggagtcctcttgtggccttgttttaattggggggttggagcggcagtttccctttgggtctgaggttagagtgctggcttggtggggggtggccagcctccaaaacctgggtttggactttgagaagtgccatggtgctacggtgccactgccatcggcccaagtcgaggagcggtgagggcgagccccctcgggctgccttgcaaagcggtgatcatcagcctggcgtctaatgctgccctgtcctctgctttgcagacataacagctgggagccggaggagaacatcctggacccgaggctgctcctggccttccagaagaaggaacatgagaaggaggtgcagaaccggaagagaggcaagaggccgagaggccggccaaggaagctcactgccatgtcctcctgcagccggcgctccaagctcaaggaacccgatgctccctccaaatccaagtccagcagttcctcctcttcctccacgtcatcctcctcttcctcagatgaagaggatgacagtgacttagatgctaagaggggtccccggggccgcgagacccacccagtgccgcagaagaaggcccagatcctggtggccaaacccgagctgaaggatcccatccggaagaagcggggacgaaagcccctgcccccagagcaaaaggcaacccgaagacccgtgagcctggccaaggtgctgaagaccgcccggaaggatctgggggccccggccagcaagctgccccctccactcagcgcccccgttgcaggcctggcagctctgaaggcccacgccaaggaggcctgtggcggccccagtgccatggccaccccagagaacctggccagcctaatgaagggcatggccagtagccccggccggggtggcatcagctggcagagctccatcgtgcactacatgaaccggatgacccagagccaggcccaggctgccagcaggttggcgctgaaggcccaggccaccaacaagtgcggcctcgggctggacctgaaggtgaggacgcagaaaggggagctgggaatgagccctccaggaagcaaaatcccgaaggcccccagcggtggggctgtggagcagaaagtggggaacacagggggccccccgcacacccatggtgccagcagggtgcctgctgggtgcccaggcccccagccagcacccacccaggagctgagcctccaggtcttggacttgcagagtgtcaagaatggcatgcccggggtgggtctccttgcccgccacgccaccgccaccaagggtgtcccggccaccaacccagcccctgggaagggcactgggagtggcctcattggggccagcggggccaccatgcccaccgacacaagcaaaagtgagaagctagcttccagagcagtggcgccacccacccctgccagcaagagggactgtgtcaagggcagtgctacccccagtgggcaggagagccgcacagcccccggagaagcccgcaaggcggccacactgccagagatgagcgcaggtgaggagagtagcagctcggactccgaccccgactccgcctcgccgcccagcactggacagaacccgtcagtgtccgttcagaccagccaggactggaagcccacccgcagcctcatcgagcacgtatttgtcaccgacgtcactgccaacctcatcaccgtcacagtgaaggagtctcccaccagcgtgggcttcttcaacctgaggcattactgaagccccggcgccaccagctgcgcggtcttactccccttccctgcctatggtgtcgcttggctaagtgactcccagcccaagccccctcaagagtctgggtcgggggaggaggagtgggtggcctccttgatgggcaggcttggaagggacttctcccgcaccccactctgtcccaggacatagggcagggggcctcactgccttgttggtctccaccttgttcctacctctgcaggcctctttgctctcccctcttgcctcaggaaacccggtggcacctgtggctccaggtgactgtcttgaacagagcgggcttcttcatggctgcgttgttgctgagtttgaactgctcctccctggcctgcgtgactgaatcacagctttggtccctgtcttgcaggggctgaggtgtcaggaggggacttctggcccaccttgccttcagccctggagtgggcagagagtattgtggggaggcatggccagtgggactagtgttccctccatctggccacagcttttgggagatggggtgggcaggggtggtcctggctggcattgcctgagccggcagtgatgaagtggggagcttgcccttgacaggtgggggctggctggggccttaatgtgaaaagacagtggcaggcagctggagtagagcgagcccagcagccctaaaaggctgccttcatggccatctagccccagttcagggcagcatccatagcccacaagccagcgtgggtggggcgggggtggtcccacagctgggttccacctgaagagcctccgtgcctcggagcaggagaggcaggctatggctgccaccctccctcctgcctgtgtcccagtgagaactgacctgagtccccttccaaacccagacccacctcctgccccaggcccactgaagcatgttccatttctaaaaagcccagagttcagtgtgtcccaaggaaaacccaaagtggaggtgctcaggtccaggggagtccagtgggcaggacccttggcaggcaagcccctcccttcactcccaggacctaccttctgctagtaaaggactggcttcattctaattatggcccacagactgccccggagacctggaggacagcagtgctggcacttgggtgtccatgggcccgtctgccggctctgcctgtgctgcaagtgttggccgtgggtccagccaacaactccctacgtcctgtgtggggccctgcccaagtggatgaggcattccttgaggagtatcattttccctgacaatccccatcacctttaggggttccctgcttggctcctttccagctgaaaaactagacctgtgccattggggaagctggacaaagtctagggggcccgcctggtagagggtcccgggaagctggatctgtcagcctcggccctgaggcccctgttaactcaagactgtgagctgcctctaggtggtcacgtctgggagctagcttgtatggcttctgaccagtatcaggatttctgttctgagagcagcgtgggcagcaaggcagggcagcccagaggtggcagcggcaggcaatctggtcactaggtctttgtgatgccaaaaataaaagagggtggggtgggtgctttctgttcctctgattggatggagtccgccagcaggcatggggctacattccagtgcctgactatagggaggcactcctgattccatggagcagcccggactttgagaatgggctctggtttgcggggggcaggcgtaccagactgcaagaccccccagtacctcaccgtgccaaataggaagaggtggccttggtgtagccaaatggatctttttaacagtgtgcctttggggagggacccatgtccatggcttcgttgagggccatccatatgccagctgggggccagcccacagtggccatattggctgcagcaggaatggtgcccacctcggcgaattgaagggctaagagtcccagatagctaggccagagctggaagcagacagtaaggggaagagctgctcccacaggagagggagagattccagctcactgcgcagcctgggaggaggcgtggatcctggcacgctgagcctcaggcaccagcctccctgtgctcgacagcaaagtcttgactccttcctgctgagcactgtgctaccttcactgctccaaagccagactaacagctctccaagcccttggggtgactcggcttccaggagctgttggagaaatgaggatgtctgtccctgtctgcctgggcaggccagattcctccccagcagccgggtctctccagaccctgattcggtgcctttctgtttaccagctacttcaatcccaaagtttgaatctgcagataccttactcccagccactttgccttcttactgtgttgtgtgtttttcctggtgcttcaagagcgtgtgcagggcaagtgccgtcactgggaactgcaccagatgctcagacttggttgtcttatgtttaccaataaataaaagtagactttttacaccaaaccaacatccaaaaaaaaacccgggggcaaaatgggggggggacaaagggg

SEQ ID NO: 50957 - DNA, 2925 bp, Homo sapiens
taatggaagggagggtgtttggcatccccggaaggggctctctgcacagctgctcccgcggccccgtttctgcgtcttcccggaccccgctctttcttcgctacccctcgaggtgccccggcccgcgcgccacattgttctggatctcgggctgggcgcctgtgcccctccctgcatgctggacctgccttcccttcctcctctggctccgggccagggtttgggggaatccctctctgcaactttgcgttttatgggggtttgtttttctcccaggcagagactgtgggagtcctcttgtggccttgttttaattggggggttggagcggcagtttccctttgggtctgaggttagagtgctggcttggtggggggtggccagcctccaaaacctgggtttggactttgagaagtgccatggtgctacggtgccactgccatcggcccaagtcgaggagcggtgagggcgagccccctcgggctgccttgcaaagcggtgatcatcagcctggcgtctaatgctgccctgtcctctgctttgcagacataacagctgggagccggaggagaacatcctggacccgaggctgctcctggccttccagaagaaggaacatgagaaggaggtgcagaaccggaagagaggcaagaggccgagaggccggccaaggaagctcactgccatgtcctcctgcagccggcgctccaagctcaaggaacccgatgctccctccaaatccaagtccagcagttcctcctcttcctccacgtcatcctcctcttcctcagatgaagaggatgacagtgacttagatgctaagaggggtccccggggccgcgagacccacccagtgccgcagaagaaggcccagatcctggtggccaaacccgagctgaaggatcccatccggaagaagcggggacgaaagcccctgcccccagagcaaaaggcaacccgaagacccgtgagcctggccaaggtgctgaagaccgcccggaaggatctgggggccccggccagcaagctgccccctccactcagcgcccccgttgcaggcctggcagctctgaaggcccacgccaaggaggcctgtggcggccccagtgccatggccaccccagagaacctggccagcctaatgaagggcatggccagtagccccggccggggtggcatcagctggcagagctccatcgtgcactacatgaaccggatgacccagagccaggcccaggctgccagcaggttggcgctgaaggcccaggccaccaacaagtgcggcctcgggctggacctgaaggtgaggacgcagaaaggggagctgggaatgagccctccaggaagcaaaatcccgaaggcccccagcggtggggctgtggagcagaaagtggggaacacagggggccccccgcacacccatggtgccagcagggtgcctgctgggtgcccaggcccccagccagcacccacccaggagctgagcctccaggtcttggacttgcagagtgtcaagaatggcatgcccggggtgggtctccttgcccgccacgccaccgccaccaagggtgtcccggccaccaacccagcccctgggaagggcactgggagtggcctcattggggccagcggggccaccatgcccaccgacacaagcaaaagtgagaagctagcttccagagcagtggcgccacccacccctgccagcaagagggactgtgtcaagggcagtgctacccccagtgggcaggagagccgcacagcccccggagaagcccgcaaggcggccacactgccagagatgagcgcaggtgaggagagtagcagctcggactccgaccccgactccgcctcgccgcccagcactggacagaacccgtcagtgtccgttcagaccagccaggactggaagcccacccgcagcctcatcgagcacgtatttgtcaccgacgtcactgccaacctcatcaccgtcacagtgaaggagtctcccaccagcgtgggcttcttcaacctgaggcattactgaagccccggcgccaccagctgcgcggtcttactccccttccctgcctatggtgtcgcttggctaagtgactcccagcccaagccccctcaagagtctgggtcgggggaggaggagtgggtggcctccttgatgggcaggcttggaagggacttctcccgcaccccactctgtcccaggacatagggcagggggcctcactgccttgttggtctccaccttgttcctacctctgcaggcctctttgctctcccctcttgcctcaggaaacccggtggcacctgtggctccaggtgactgtcttgaacagagcgggcttcttcatggctgcgttgttgctgagtttgaactgctcctccctggcctgcgtgactgaatcacagctttggtccctgtcttgcaggggctgaggtgtcaggaggggacttctggcccaccttgccttcagccctggagtgggcagagagtattgtggggaggcatggccagtgggactagtgttccctccatctggccacagcttttgggagatggggtgggcaggggtggtcctggctggcattgcctgagccggcagtgatgaagtggggagcttgcccttgacaggtgggggctggctggggccttaatgtgaaaagacagtggcaggcagctggagtagagcgagcccagcagccctaaaaggctgccttcatggccatctagccccagttcagggcagcatccatagcccacaagccatagcccacaattagctgggtgtggtggcatacacttgtggtctgagctactttggaggtttgggtgggaggatcacttgagcctgggaggtcgaggctgcagtgaactggtatcgtgcctctgcattccagcccgggtgacagagtaagactgtctcc

SEQ ID NO: 50958 - DNA, 926 bp, Homo sapiens
taatggaagggagggtgtttggcatccccggaaggggctctctgcacagctgctcccgcggccccgtttctgcgtcttcccggaccccgctctttcttcgctacccctcgaggtgccccggcccgcgcgccacattgttctggatctcgggctgggcgcctgtgcccctccctgcatgctggacctgccttcccttcctcctctggctccgggccagggtttgggggaatccctctctgcaactttgcgttttatgggggtttgtttttctcccaggcagagactgtgggagtcctcttgtggccttgttttaattggggggttggagcggcagtttccctttgggtctgaggttagagtgctggcttggtggggggtggccagcctccaaaacctgggtttggactttgagaagtgccatggtgctacggtgccactgccatcggcccaagtcgaggagcggtgagggcgagccccctcgggctgccttgcaaagcggtgatcatcagcctggcgtctaatgctgccctgtcctctgctttgcagacataacagctgggagccggaggagaacatcctggacccgaggctgctcctggccttccagaagaagtgaggacgctgacagcactggggagggtgtgggggagggacggtggctggttggagtcgtgctgggcgctgctcgcctgccgggaggctggagctggggctgtggtctgaggtcccttagcaagattgtgtccagggccatctctgtggctggctgtaaaagtccccagccagcccctctcccaccttctcctagccagcctgtatccatccctgagaagaacctaagtaagtgctgctttggtgtttccgacagccatacttgcaaaaaccaactttttcagttgcttcagataaagatgttatagcttcac

SEQ ID NO: 50959 - DNA, 4968 bp, Homo sapiens
taatggaagggagggtgtttggcatccccggaaggggctctctgcacagctgctcccgcggccccgtttctgcgtcttcccggaccccgctctttcttcgctacccctcgaggtgccccggcccgcgcgccacattgttctggatctcgggctgggcgcctgtgcccctccctgcatgctggacctgccttcccttcctcctctggctccgggccagggtttgggggaatccctctctgcaactttgcgttttatgggggtttgtttttctcccaggcagagactgtgggagtcctcttgtggccttgttttaattggggggttggagcggcagtttccctttgggtctgaggttagagtgctggcttggtggggggtggccagcctccaaaacctgggtttggactttgagaagtgccatggtgctacggtgccactgccatcggcccaagtcgaggagcggtgagggcgagccccctcgggctgccttgcaaagcggtgatcatcagcctggcgtctaatgctgccctgtcctctgctttgcagacataacagctgggagccggaggagaacatcctggacccgaggctgctcctggccttccagaagaaggaacatgagaaggaggtgcagaaccggaagagaggcaagaggccgagaggccggccaaggaagctcactgccatgtcctcctgcagccggcgctccaagctcaaggaacccgatgctccctccaaatccaagtccagcagttcctcctcttcctccacgtcatcctcctcttcctcagatgaagaggatgacagtgacttagatgctaagaggggtccccggggccgcgagacccacccagtgccgcagaagaaggcccagatcctggtggccaaacccgagctgaaggatcccatccggaagaagcggggacgaaagcccctgcccccagagcaaaaggcaacccgaagacccgtgagcctggccaaggtgctgaagaccgcccggaaggatctgggggccccggccagcaagctgccccctccactcagcgcccccgttgcaggcctggcagctctgaaggcccacgccaaggaggcctgtggcggccccagtgccatggccaccccagagaacctggccagcctaatgaagggcatggccagtagccccggccggggtggcatcagctggcagagctccatcgtgcactacatgaaccggatgacccagagccaggcccaggctgccagcaggttggcgctgaaggcccaggccaccaacaagtgcggcctcgggctggacctgaaggtgaggacgcagaaaggggagctgggaatgagccctccaggaagcaaaatcccgaaggcccccagcggtggggctgtggagcagaaagtggggaacacagggggccccccgcacacccatggtgccagcagggtgcctgctgggtgcccaggcccccagccagcacccacccaggagctgagcctccaggtcttggacttgcagagtgtcaagaatggcatgcccggggtgggtctccttgcccgccacgccaccgccaccaagggtgtcccggccaccaacccagcccctgggaagggcactgggagtggcctcattggggccagcggggccaccatgcccaccgacacaagcaaaagtgagaagctagcttccagagcagtggcgccacccacccctgccagcaagagggactgtgtcaagggcagtgctacccccagtgggcaggagagccgcacagcccccggagaagcccgcaaggcggccacactgccagagatgagcgcaggtgaggagagtagcagctcggactccgaccccgactccgcctcgccgcccagcactggacagaacccgtcagtgtccgttcagaccagccaggactggaagcccacccgcagcctcatcgagcacgtatttgtcaccgacgtcactgccaacctcatcaccgtcacagtgaaggagtctcccaccagcgtgggcttcttcaacctgaggcattactgaagccccggcgccaccagctgcgcggtcttactccccttccctgcctatggtgtcgcttggctaagtgactcccagcccaagccccctcaagagtctgggtcgggggaggaggagtgggtggcctccttgatgggcaggcttggaagggacttctcccgcaccccactctgtcccaggacatagggcagggggcctcactgccttgttggtctccaccttgttcctacctctgcaggcctctttgctctcccctcttgcctcaggaaacccggtggcacctgtggctccaggtgactgtcttgaacagagcgggcttcttcatggctgcgttgttgctgagtttgaactgctcctccctggcctgcgtgactgaatcacagctttggtccctgtcttgcaggggctgaggtgtcaggaggggacttctggcccaccttgccttcagccctggagtgggcagagagtattgtggggaggcatggccagtgggactagtgttccctccatctggccacagcttttgggagatggggtgggcaggggtggtcctggctggcattgcctgagccggcagtgatgaagtggggagcttgcccttgacaggtgggggctggctggggccttaatgtgaaaagacagtggcaggcagctggagtagagcgagcccagcagccctaaaaggctgccttcatggccatctagccccagttcagggcagcatccatagcccacaagccagcgtgggtggggcgggggtggtcccacagctgggttccacctgaagagcctccgtgcctcggagcaggagaggcaggctatggctgccaccctccctcctgcctgtgtcccagtgagaactgacctgagtccccttccaaacccagacccacctcctgccccaggcccactgaagcatgttccatttctaaaaagcccagagttcagtgtgtcccaaggaaaacccaaagtggaggtgctcaggtccaggggagtccagtgggcaggacccttggcaggcaagcccctcccttcactcccaggacctaccttctgctagtaaaggactggcttcattctaattatggcccacagactgccccggagacctggaggacagcagtgctggcacttgggtgtccatgggcccgtctgccggctctgcctgtgctgcaagtgttggccgtgggtccagccaacaactccctacgtcctgtgtggggccctgcccaagtggatgaggcattccttgaggagtatcattttccctgacaatccccatcacctttaggggttccctgcttggctcctttccagctgaaaaactagacctgtgccattggggaagctggacaaagtctagggggcccgcctggtagagggtcccgggaagctggatctgtcagcctcggccctgaggcccctgttaactcaagactgtgagctgcctctaggtggtcacgtctgggagctagcttgtatggcttctgaccagtatcaggatttctgttctgagagcagcgtgggcagcaaggcagggcagcccagaggtggcagcggcaggcaatctggtcactaggtctttgtgatgccaaaaataaaagagggtggggtgggtgctttctgttcctctgattggatggagtccgccagcaggcatggggctacattccagtgcctgactatagggaggcactcctgattccatggagcagcccggactttgagaatgggctctggtttgcggggggcaggcgtaccagactgcaagaccccccagtacctcaccgtgccaaataggaagaggtggccttggtgtagccaaatggatctttttaacagtgtgcctttggggagggacccatgtccatggcttcgttgagggccatccatatgccagctgggggccagcccacagtggccatattggctgcagcaggaatggtgcccacctcggcgaattgaagggctaagagtcccagatagctaggccagagctggaagcagacagtaaggggaagagctgctcccacaggagagggagagattccagctcactgcgcagcctgggaggaggcgtggatcctggcacgctgagcctcaggcaccagcctccctgtgctcgacagcaaagtcttgactccttcctgctgagcactgtgctaccttcactgctccaaagccagactaacagctctccaagcccttggggtgactcggcttccaggagctgttggagaaatgaggatgtctgtccctgtctgcctgggcaggccagattcctccccagcagccgggtctctccagaccctgattcggtgcctttctgtttaccagctacttcaatcccaaagtttgaatctgcagataccttactcccagccactttgccttcttactgtgttgtgtgtttttcctggtgcttcaagagcgtgtgcagggcaagtgccgtcactgggaactgcaccagatgctcagacttggttgtcttatgtttaccaataaataaaagtagactttttctatttttatttgctgctatttgtgtgtgtgtttgtgtttgtgtagctaggtatctggcacttctgacgatgcattgttgcttttttcccgaaggtcccgcaggaactgtggcaatggtgtgtgtgtgaaatggtgtgttaaccgcgttttgtttgctcctgtattgaataggaagcagtggccagtctgtcttccttagagatgttagcatatttttatatgtatatattttgtaccaaaaaagagtgttccttgttttggttacactcgaaattctgacctagctggagagggctctgggccgagagctttcactaaggggagacttcaggggaggatcaagctttgaaccaaagccaatcactggcttgatttgtgttttttaattaaaaaaaaaatcattcatgtatgccacttct

SEQ ID NO: 50960 - DNA, 1957 bp, Homo sapiens
acattcgcgcaccgcaccgcgccgtgcgcggaaggcaagcccctcccttcactcccaggacctaccttctgctagtaaaggactggcttcattctaattatggcccacagactgccccggagacctggaggacagcagtgctggcacttgggtgtccatgggcccgtctgccggctctgcctgtgctgcaagtgttggccgtgggtccagccaacaactccctacgtcctgtgtggggccctgcccaagtggatgaggcattccttgaggagtatcattttccctgacaatccccatcacctttaggggttccctgcttggctcctttccagctgaaaaactagacctgtgccattggggaagctggacaaagtctagggggcccgcctggtagagggtcccgggaagctggatctgtcagcctcggccctgaggcccctgttaactcaagactgtgagctgcctctaggtggtcacgtctgggagctagcttgtatggcttctgaccagtatcaggatttctgttctgagagcagcgtgggcagcaaggcagggcagcccagaggtggcagcggcaggcaatctggtcactaggtctttgtgatgccaaaaataaaagagggtggggtgggtgctttctgttcctctgattggatggagtccgccagcaggcatggggctacattccagtgcctgactatagggaggcactcctgattccatggagcagcccggactttgagaatgggctctggtttgcggggggcaggcgtaccagactgcaagaccccccagtacctcaccgtgccaaataggaagaggtggccttggtgtagccaaatggatctttttaacagtgtgcctttggggagggacccatgtccatggcttcgttgagggccatccatatgccagctgggggccagcccacagtggccatattggctgcagcaggaatggtgcccacctcggcgaattgaagggctaagagtcccagatagctaggccagagctggaagcagacagtaaggggaagagctgctcccacaggagagggagagattccagctcactgcgcagcctgggaggaggcgtggatcctggcacgctgagcctcaggcaccagcctccctgtgctcgacagcaaagtcttgactccttcctgctgagcactgtgctaccttcactgctccaaagccagactaacagctctccaagcccttggggtgactcggcttccaggagctgttggagaaatgaggatgtctgtccctgtctgcctgggcaggccagattcctccccagcagccgggtctctccagaccctgattcggtgcctttctgtttaccagctacttcaatcccaaagtttgaatctgcagataccttactcccagccactttgccttcttactgtgttgtgtgtttttcctggtgcttcaagagcgtgtgcagggcaagtgccgtcactgggaactgcaccagatgctcagacttggttgtcttatgtttaccaataaataaaagtagactttttctatttttatttgctgctatttgtgtgtgtgtttgtgtttgtgtagctaggtatctggcacttctgacgatgcattgttgcttttttcccgaaggtcccgcaggaactgtggcaatggtgtgtgtgtgaaatggtgtgttaaccgcgttttgtttgctcctgtattgaataggaagcagtggccagtctgtcttccttagagatgttagcatatttttatatgtatatattttgtaccaaaaaagagtgttccttgttttggttacactcgaaattctgacctagctggagagggctctgggccgagagctttcactaaggggagacttcaggggaggatcaagctttgaaccaaagccaatcactggcttgatttgtgttttttaattaaaaaaaaaatcattcatgtatgccacttct

SEQ ID NO: 50961 - DNA, 4216 bp, Homo sapiens
taatggaagggagggtgtttggcatccccggaaggggctctctgcacagctgctcccgcggccccgtttctgcgtcttcccggaccccgctctttcttcgctacccctcgaggtgccccggcccgcgcgccacattgttctggatctcgggctgggcgcctgtgcccctccctgcatgctggacctgccttcccttcctcctctggctccgggccagggtttgggggaatccctctctgcaactttgcgttttatgggggtttgtttttctcccaggcagagactgtgggagtcctcttgtggccttgttttaattggggggttggagcggcagtttccctttgggtctgaggttagagtgctggcttggtggggggtggccagcctccaaaacctgggtttggactttgagaagtgccatggtgctacggtgccactgccatcggcccaagtcgaggagcggtgagggcgagccccctcgggctgccttgcaaagcggtgatcatcagcctggcgtctaatgctgccctgtcctctgctttgcagacataacagctgggagccggaggagaacatcctggacccgaggctgctcctggccttccagaagaaggaacatgagaaggaggtgcagaaccggaagagaggcaagaggccgagaggccggccaaggaagctcactgccatgtcctcctgcagccggcgctccaagctcaaggaacccgatgctccctccaaatccaagtccagcagttcctcctcttcctccacgtcatcctcctcttcctcagatgaagaggatgacagtgacttagatgctaagaggggtccccggggccgcgagacccacccagtgccgcagaagaaggcccagatcctggtggccaaacccgagctgaaggatcccatccggaagaagcggggacgaaagcccctgcccccagagcaaaaggcaacccgaagacccgtgagcctggccaaggtgctgaagaccgcccggaaggatctgggggccccggccagcaagctgccccctccactcagcgcccccgttgcaggcctggcagctctgaaggcccacgccaaggaggcctgtggcggccccagtgccatggccaccccagagaacctggccagcctaatgaagggcatggccagtagccccggccggggtggcatcagctggcagagctccatcgtgcactacatgaaccggatgacccagagccaggcccaggctgccagcaggttggcgctgaaggcccaggccaccaacaagtgcggcctcgggctggacctgaaggtgaggacgcagaaaggggagctgggaatgagccctccaggaagcaaaatcccgaaggcccccagcggtggggctgtggagcagaaagtggggaacacagggggccccccgcacacccatggtgccagcagggtgcctgctgggtgcccaggcccccagccagcacccacccaggagctgagcctccaggtcttggacttgcagagtgtcaagaatggcatgcccggggtgggtctccttgcccgccacgccaccgccaccaagggtgtcccggccaccaacccagcccctgggaagggcactgggagtggcctcattggggccagcggggccaccatgcccaccgacacaagcaaaagtgagaagctagcttccagagcagtggcgccacccacccctgccagcaagagggactgtgtcaagggcagtgctacccccagtgggcaggagagccgcacagcccccggagaagcccgcaaggcggccacactgccagagatgagcgcaggtgaggagagtagcagctcggactccgaccccgactccgcctcgccgcccagcactggacagaacccgtcagtgtccgttcagaccagccaggactggaagcccacccgcagcctcatcgagcacgtatttgtcaccgacgtcactgccaacctcatcaccgtcacagtgaaggagtctcccaccagcgtgggcttcttcaacctgaggcattactgaagccccggcgccaccagctgcgcggtcttactccccttccctgcctatggtgtcgcttggctaagtgactcccagcccaagccccctcaagagtctgggtcgggggaggaggagtgggtggcctccttgatgggcaggcttggaagggacttctcccgcaccccactctgtcccaggacatagggcagggggcctcactgccttgttggtctccaccttgttcctacctctgcaggcctctttgctctcccctcttgcctcaggaaacccggtggcacctgtggctccaggtgactgtcttgaacagagcgggcttcttcatggctgcgttgttgctgagtttgaactgctcctccctggcctgcgtgactgaatcacagctttggtccctgtcttgcaggggctgaggtgtcaggaggggacttctggcccaccttgccttcagccctggagtgggcagagagtattgtggggaggcatggccagtgggactagtgttccctccatctggccacagcttttgggagatggggtgggcaggggtggtcctggctggcattgcctgagccggcagtgatgaagtggggagcttgcccttgacaggtgggggctggctggggccttaatgtgaaaagacagtggcaggcagctggagtagagcgagcccagcagccctaaaaggctgccttcatggccatctagccccagttcagggcagcatccatagcccacaagccagcgtgggtggggcgggggtggtcccacagctgggttccacctgaagagcctccgtgcctcggagcaggagaggcaggctatggctgccaccctccctcctgcctgtgtcccagtgagaactgacctgagtccccttccaaacccagacccacctcctgccccaggcccactgaagcatgttccatttctaaaaagcccagagttcagtgtgtcccaaggaaaacccaaagtggaggtgctcaggtccaggggagtccagtgggcaggacccttggcaggcaagcccctcccttcactcccaggacctaccttctgctagtaaaggactggcttcattctaattatggcccacagactgccccggagacctggaggacagcagtgctggcacttgggtgtccatgggcccgtctgccggctctgcctgtgctgcaagtgttggccgtgggtccagccaacaactccctacgtcctgtgtggggccctgcccaagtggatgaggcattccttgaggagtatcattttccctgacaatccccatcacctttaggggttccctgcttggctcctttccagctgaaaaactagacctgtgccattggggaagctggacaaagtctagggggcccgcctggtagagggtcccgggaagctggatctgtcagcctcggccctgaggcccctgttaactcaagactgtgagctgcctctaggtggtcacgtctgggagctagcttgtatggcttctgaccagtatcaggatttctgttctgagagcagcgtgggcagcaaggcagggcagcccagaggtggcagcggcaggcaatctggtcactaggtctttgtgatgccaaaaataaaagagggtggggtgggtgctttctgttcctctgattggatggagtccgccagcaggcatggggctacattccagtgcctgactatagggaggcactcctgattccatggagcagcccggactttgagaatgggctctggtttgcggggggcaggcgtaccagactgcaagaccccccagtacctcagtgccaaataggaagaggtggccttggtgtagccaaatggatctttttaacagtgtgcctttggggagggacccatgtccatggcttcgttgagggccatccatatgccagctgggggccagcccacagtggccatattggctgcagcaggaatggtgcccacctcggcgaattgaagggctaagagtcccagatagctaggccagagctggaaggccaggacaagtcaagggggcaaagaaagcttgtctcccccaagggaagaagggaaagaatccagagtcacattggcgcagcctgggaaagagggcggtgagtccctgggcactcgagaggcctccagggaccaaagcctccctgggtctgcgaagagaaaagtttgtaccctcttcctgggtgagac

SEQ ID NO: 50962 - DNA, 283 bp, Homo sapiens
gtgatgggaattcccctggcacatggccaggtgagatgatcattcagcctgaaatgaaagaaacagcagatgtcaggaagtttttgttaatcctgccttgtgcgttagaactctcccgcatacgtcccctttcccgcacactctctctacctttctcccccatttctagctcctggtcttattcatctgtagcatcagtaaacatataccctttactgttcacatccaggtctgtaggggaaattttggttataaaaccggaagagtgtttaacctaatgtcc

SEQ ID NO: 50963 - DNA, 749 bp, Homo sapiens
aatgcagataacctgtttttcatcaaacttttatctaccacatttagcatccagagatgatttttgcctgaatcatttactttgttggtggccaaacattattttctaattctatcatttctttgccatttattaattggcattctattgtaaggagaagctttttcttcttcctatttgtttattcattttgtttaaactcatagattattttatggttataatccattgctattagtatttattttgatgcttaaattgttccaaatttaggcagaggggaactcctttctagaagctcctctgtccttttaacacatcatcatcatttttatttacttctggccacagcaagatgttctaggctcttactgttgtagccatagattctggcttttagtggtgaacaagagtaaatggtagctctatcctgtacttgcttaggcccacagagatgtcatcttgattttttttttctctgtcatacttcacattcagtccatcagcaaatcctaatggttctgccttcagaatatgtctgtatttgctactgccaacccactgtcatctctggcttaggctgctataattgcctccagactaaacttgcttctgcttttgccaccaccccactctctagtctattttcttcatacagcggccagggtaattatttttgaacgtaggttggattataccacttccttgcttagaaaacctttcatgtcttacagtcttctttagaatta

SEQ ID NO: 50964 - DNA, 633 bp, Homo sapiens
gtggtcccagctactcgggaggctgaggcagaagaatcacttgaatccgggaggtggaggttgcagtgagccgagatcgtgccacaccactccagcctgggcaacagagtgagactccatctcaaaaaaaaaaaaaaattctaaggctgatgccgagggttctagggaaaactcttcatattaagagacccagtggtggtgaatagactgttgatgtcggtcattatgtgagtacttttggaaaaataaaacagcagtacaaatactcagcacgcatttactcagcattctgctgtattatgatttaacaaaatattggctttgattcaggtggatctgggttcaagtcttgatctgtcatttactaacttctcctttgggcaggttgccctcaaagcttgtttcctttcatgctagtgagttattataggtactctagtagaaatctacatggacttcagtgggaactgaaaggaggcagtagttatgttcttcctgactgaaagaatttttttttctcctcccgagtaagttgcagacataatgtgttaatatccctttactcctaattttttgtgtgtatttcctaaaaacaaattaagtactattatctaatttagttgtcacgtctct

SEQ ID NO: 50965 - DNA, 733 bp, Homo sapiens
gtaagttgcagacataatgtgttaatatccctttactcctaattttttgtgtgtatttcctaaaaacagaaatgttctcatacatgaccatggtccaatcatcaaatcaggaatttaacacaaattaagtactattatctaatttagttgtcacgtctctctagtctccttccaattgggaacagttcctcagtctttatctttcatgaccttgacagttttgaagtgcacaggtcatttatagaatgtcatcactttgagcttgttttatttttcatgattagaaaattccacaggtgtgctgtgtcctcctcagtgtgtcacatcagaaggcatgtaatatccaagttctcatcacaagtgctgctaacagtgaccacctggtttaggtggtatccatgtttcttctctaacattgctttctacctataattaagtatcttggggggacatactttgagacagaaatgcagataacctgtttttcatcaaacttttatctaccacatttagcatccagagatgatttttgcctgaatcatttactttgttggtggccaaacattattttctaattctatcatttctttgccatttattaattggcattctattgtaaggagaagctttttcttcttcctatttgtttattcattttgtttaaactcatagattattttatggttataatccattgctattagtatttattttgatgcttaaattgttccaa

SEQ ID NO: 50966 - DNA, 1463 bp, Homo sapiens
ctcaattattcagaatgctgggctgtccctacaaagcatcatatggggtctcttaacactctggttagtttcctttgtctaaaccctctttcttaaaaagtcttctttatttttagtccatttcttccttgcagcttaagattgtgtacattttattcctataagaaatgtgaatgcacaaaactttattttcatcagaaataccaccctgttgaaactgtttcttacagcacgaaaggtaatacaggtagatgaaatgatagtggaagaggaagaagaagaagaaaatgaacgtaagaatcttcaaactgcaagagtaagtggacactgaggttggaggctgggggttatcacaagacaagcaaatacaaatgcataaaatacactgttgtacaccagagctcacagtttagtagagatgatcctactttacatggcaatgacaaaagagataattgactggtgtgcaaagtgtgtagaacacagaagaggaagctagcaagcctcccctaccccactaggacatagacaggcctttcaaggtgagtgagagtctactagctagagaagaaagggaagaggaacagtattcaggatagatgggggaggcggaaaactgaagatgaggaaaccagttagaagcctatgaattcttgaactgacatgctgacactatagaatgaagggatggtttttagataggttttagaaagaagtggcatggttggtggagaaaaggaggaatcagagacaactgcatggtttctagctaaggcaaatgctatccagtgaggtgtgggacccaggtggcagagggtgctggactgggggtggtggagcacatgccaattgcatgacatgttgaccattcattacttttccaggacatctaggctagacagaaatttcagcctggagctcagggagaagagggagatttgagagatacactgcctcccagatctttaggtgtttgtcccagtgtgggagtggagatggttgtgcagggagagccaggaagggagggagtcagggtggacactagagggagggtagagagaggagctcctaaggcagactgccaaggaagttagagaagcaggaaagacagatccatcacggaggacaagggaggagagaatatatggaagataaggagtgattcttgccagggacctcccaggccccaggaagggagcactgcagggtttgcctttgattgggcacctgggacgccctgagtgaccttcacagcagccctttatgtaaagtagtggggtacaagccaggctgcaatcagttcaaaagagatttacctttaatcttggtcaaaatcctctattttgaaaacccagccagtggaagtccttattcaattagttatgttctgaactttttaagtcattgaattctgagatacaccttattatatttagtattaactatccaaagcttgttcttaa

SEQ ID NO: 50967 - DNA, 818 bp, Homo sapiens
aataatagttttaaaaaagtttttatcttgaaatattgttcctcatattttggtggaataagcctggtgctttctggctatgtttgtcataggctgacctggatatcaccgaaataaacaaactaacagcagaagctattcagacacccctgaaatctgccaaaagtgagtacctttcaaaactccttgttgtacagaaagaactgaggctcaggttgcttgggttgggctgctcaggcagggccttgttggtagagcctcttcccttttaatgtctgggttcttaatcttgtaaatccaaaaacttgcttttggatggtgcatttagttaattttttttcccccgaacagcaattcaaacccagaaatttagttaattttagggcaggactgcctaaaaacccaaactcaagaccccgtgtgcgagcctaaaatgaaaagtgaaaaaaggggggaaaaaagctgtgcctagaaacccaaacattgttgccctgccttactttcctccccgggttaaatagatgacaagatttagagaggtgttaaaagactggtaacacccaactgagacgctccctgatgtaatcaacaaagttgaaagcgaattgaaaaaggaatgactttctctgcatataattcaaaattactcaattcaggccaggtgcggtactcacgcctgtaatcccagcactttgggaggccaagctgtgaggattacttgagcccaggagttcaagaccagcctgggcaatgtagtgagaccttgtctctgaaaaaaaaaagaaagaaagaaaggaaaggaaaggaaaggaaaggaa

SEQ ID NO: 50968 - DNA, 2463 bp, Homo sapiens
  misc_feature (69)..(69): n is a, c, g, or t
accctgggccggcaggaacttgcttgtgattggatgttgtgggacggcggcttctcattcgtcaggcgngactgtggagtttgaattgggtggcggttgactgtagagccgctctctctcactggcacagcgaggttttgctcagcccttgtctcgggaccgcaggtacgtgcctggcgacttcttcgggtggtccccgtccgccctcctcgtccctacccagtttcttgcttccctgccccatctccgccgctccccgcagcctccgccgagcgccatggctcctaggaagggcagtagtcgggtggccaagaccaactccttacggaggcggaagctcgcctcctttctgaaagacttcgaccgtgaagtggaaatacgaatcaagcaaattgagtcagacaggcagaacctcctcaaggaggtggataacctctacaacatcgagatcctgcggctccccaaggctctgcgcgagatgaactggcttgactacttcgcccttggaggaaacaaacaggccctggaagaggcggcaacagctgacctggatatcaccgaaataaacaaactaacagcagaagctattcagacacccctgaaatctgccaaaacacgaaaggtaatacaggtagatgaaatgatagtggaagaggaagaagaagaagaaaatgaacgtaagaatcttcaaactgcaagagtcaaaaggtgtcctccatccaagaagagaactcagtccatacaaggaaaaggaaaagggaaaaggtcaagccgtgctaacactgttaccccagccgtgggccgattggaggtgtccatggtcaaaccaactccaggcctgacacccaggtttgactcaagggtcttcaagacccctggcctgcgtactccagcagcaggagagcggatttacaacatctcagggaatggcagccctcttgctgacagcaaagagatcttcctcactgtgccagtgggcggcggagagagcctgcgattattggccagtgacttgcagaggcacagtattgcccagctggatccagaggccttgggaaacattaagaagctctccaaccgtctcgcccaaatctgcagcagcatacggacccacaaatgagacaccaaagttgacaggatggacttttaatgggcacttctgggaccctgaagagacttcttcccttcaggcttattgtttgagtgtgaagttccagagcaaggagccatgttcctctaagggaattcaggaattcagacgtgctagtcccacaccagttaggtagagctgtctgttcaccctcccatcccagctgatcccagtcactgcttgctggggccatgccatggaagcttcccatcagtctcccagctgaatcctccctgctctctgagctgctgccttttgcctcctgcaactcaacatcctcttcaccctgccctgcctgcagttgagggggcgaagaagaaccctgtgttctcaggaagactgcctccaccaccgctacccagagaacctctgcatctggcatttctgctctctatgcttgagaccgggaggtttaggctcagataagtgagctctgggccatgagagggtaggtccagaaggtggggggaactgtacagatcagcagagcaggacagttggcagcagtgacctcagtagggaacatgtccgtctaccctctcgcactcatgacacctccccctaccagccctcctcttcctcctcctcctcctcctgtgggaggtggtcagtgggacttagggatctttcacctgctgtgcccagtagttctgaagtctgcttgtggagcagtgttttatgtttatccctgtttactgaagaccaaatactggtttggagacaacttccatgtcttgctcttctacctccctagttagtggaaatttggataagggaactgtagggcccagattctggaggttttatgtcattggccacagaataactgtctctaagctatccatggtccagtggtccctgccaagtctgtagacttcagagagcacttctctcttatggggttcatgggaacaggggcgggtgtgacttgcttggtggcctcattccatgtgtgcctgtgcctggggcatggactttgttaagcagagtcagcagtgaggtcctcattctccagccagcctctctgccctggagaatcatgtgctatgttctaagaatttgagaactagagtcctcatccccaggcttgaaggcacatggctttctcatgtagggctctctgtggtatttgttattattttgcaacaagaccattttagtaaaacagtcctgttcaagttgtattcttttaagttcttttattctcctttccctgagatttttgtatatattgttctgagtaatggtatctttgagctgattgttctaatcagagctggtacctactttcaataaattctggttttgtgttt

SEQ ID NO: 50969 - DNA, 2366 bp, Homo sapiens
  misc_feature (69)..(69): n is a, c, g, or t
accctgggccggcaggaacttgcttgtgattggatgttgtgggacggcggcttctcattcgtcaggcgngactgtggagtttgaattgggtggcggttgactgtagagccgctctctctcactggcacagcgaggttttgctcagcccttgtctcgggaccgcagcctccgccgagcgccatggctcctaggaagggcagtagtcgggtggccaagaccaactccttacggaggcggaagctcgcctcctttctgaaagacttcgaccgtgaagtggaaatacgaatcaagcaaattgagtcagacaggcagaacctcctcaaggaggtggataacctctacaacatcgagatcctgcggctccccaaggctctgcgcgagatgaactggcttgactacttcgcccttggaggaaacaaacaggccctggaagaggcggcaacagctgacctggatatcaccgaaataaacaaactaacagcagaagctattcagacacccctgaaatctgccaaaacacgaaaggtaatacaggtagatgaaatgatagtggaagaggaagaagaagaagaaaatgaacgtaagaatcttcaaactgcaagagtcaaaaggtgtcctccatccaagaagagaactcagtccatacaaggaaaaggaaaagggaaaaggtcaagccgtgctaacactgttaccccagccgtgggccgattggaggtgtccatggtcaaaccaactccaggcctgacacccaggtttgactcaagggtcttcaagacccctggcctgcgtactccagcagcaggagagcggatttacaacatctcagggaatggcagccctcttgctgacagcaaagagatcttcctcactgtgccagtgggcggcggagagagcctgcgattattggccagtgacttgcagaggcacagtattgcccagctggatccagaggccttgggaaacattaagaagctctccaaccgtctcgcccaaatctgcagcagcatacggacccacaaatgagacaccaaagttgacaggatggacttttaatgggcacttctgggaccctgaagagacttcttcccttcaggcttattgtttgagtgtgaagttccagagcaaggagccatgttcctctaagggaattcaggaattcagacgtgctagtcccacaccagttaggtagagctgtctgttcaccctcccatcccagctgatcccagtcactgcttgctggggccatgccatggaagcttcccatcagtctcccagctgaatcctccctgctctctgagctgctgccttttgcctcctgcaactcaacatcctcttcaccctgccctgcctgcagttgagggggcgaagaagaaccctgtgttctcaggaagactgcctccaccaccgctacccagagaacctctgcatctggcatttctgctctctatgcttgagaccgggaggtttaggctcagataagtgagctctgggccatgagagggtaggtccagaaggtggggggaactgtacagatcagcagagcaggacagttggcagcagtgacctcagtagggaacatgtccgtctaccctctcgcactcatgacacctccccctaccagccctcctcttcctcctcctcctcctcctgtgggaggtggtcagtgggacttagggatctttcacctgctgtgcccagtagttctgaagtctgcttgtggagcagtgttttatgtttatccctgtttactgaagaccaaatactggtttggagacaacttccatgtcttgctcttctacctccctagttagtggaaatttggataagggaactgtagggcccagattctggaggttttatgtcattggccacagaataactgtctctaagctatccatggtccagtggtccctgccaagtctgtagacttcagagagcacttctctcttatggggttcatgggaacaggggcgggtgtgacttgcttggtggcctcattccatgtgtgcctgtgcctggggcatggactttgttaagcagagtcagcagtgaggtcctcattctccagccagcctctctgccctggagaatcatgtgctatgttctaagaatttgagaactagagtcctcatccccaggcttgaaggcacatggctttctcatgtagggctctctgtggtatttgttattattttgcaacaagaccattttagtaaaacagtcctgttcaagttgtattcttttaagttcttttattctcctttccctgagatttttgtatatattgttctgagtaatggtatctttgagctgattgttctaatcagagctggtacctactttcaataaattctggttttgtgttt

SEQ ID NO: 50970 - DNA, 917 bp, Homo sapiens
  misc_feature (5)..(7): n is a, c, g, or t
  misc_feature (25)..(25): n is a, c, g, or t
  misc_feature (846)..(846): n is a, c, g, or t
  misc_feature (852)..(852): n is a, c, g, or t
ccacnnngcaggaaaaaaaaaaagncaaaacgaactgtgctaggtacgaggctgggtgttggttgactgtagagccgctctctctcactggcacagcgaggttttgctcagcccttgtctcgggaccgcaggtacgtgcctggcgacttcttcgggtggtccccgtccgccctcctcgtccctacccagtttcttgcttccctgccccatctccgccgctccccgcagcctccgccgagcgccatggctcctaggaagggcagtagtcgggtggccaagaccaactccttacggaggcggaagctcgcctcctttctgaaagacttcgaccgtgaagtggaaatacgaatcaagcaaattgagtcagacaggcagaacctcctcaaggaggtggataacctctacaacatcgagatcctgcggctccccaaggctctgcgcgagatgaactggcttgactacttcgcccttggaggaaacaaacaggccctggaagaggcggcaacagctgacctggatatcaccgaaataaacaaactaacagcagaagctattcagacacccctgaaatctgccaaaacacgaaaggtaatacaggtagatgaaatgatagtggaagaggaagaagaagaagaaaatgaacgtaagaatcttcaaactgcaagagtcaaaaggtgtcctccatccaagaagagaactcagtccatacaaggaaaaggaaaagggaaaaggtcaagccgtgctaacactgttaccccagccgtgggccgattggaggtgtccatggtcaaaccaactccaggcctgacacccaggtttgactcaaggctccagggtcttccagancctggncggttatcagccagcagagacggttacacttcgggatggagccttgtcgaaaaagaatctcaggc

SEQ ID NO: 50971 - DNA, 2429 bp, Homo sapiens
  misc_feature (5)..(7): n is a, c, g, or t
  misc_feature (25)..(25): n is a, c, g, or t
ccacnnngcaggaaaaaaaaaaagncaaaacgaactgtgctaggtacgaggctgggtgttggttgactgtagagccgctctctctcactggcacagcgaggttttgctcagcccttgtctcgggaccgcaggtacgtgcctggcgacttcttcgggtggtccccgtccgccctcctcgtccctacccagtttcttgcttccctgccccatctccgccgctccccgcagcctccgccgagcgccatggctcctaggaagggcagtagtcgggtggccaagaccaactccttacggaggcggaagctcgcctcctttctgaaagacttcgaccgtgaagtggaaatacgaatcaagcaaattgagtcagacaggcagaacctcctcaaggaggtggataacctctacaacatcgagatcctgcggctccccaaggctctgcgcgagatgaactggcttgactacttcgcccttggaggaaacaaacaggccctggaagaggcggcaacagctgacctggatatcaccgaaataaacaaactaacagcagaagctattcagacacccctgaaatctgccaaaacacgaaaggtaatacaggtagatgaaatgatagtggaagaggaagaagaagaagaaaatgaacgtaagaatcttcaaactgcaagagtcaaaaggtgtcctccatccaagaagagaactcagtccatacaaggaaaaggaaaagggaaaaggtcaagccgtgctaacactgttaccccagccgtgggccgattggaggtgtccatggtcaaaccaactccaggcctgacacccaggtttgactcaagggtcttcaagacccctggcctgcgtactccagcagcaggagagcggatttacaacatctcagggaatggcagccctcttgctgacagcaaagagatcttcctcactgtgccagtgggcggcggagagagcctgcgattattggccagtgacttgcagaggcacagtattgcccagctggatccagaggccttgggaaacattaagaagctctccaaccgtctcgcccaaatctgcagcagcatacggacccacaaatgagacaccaaagttgacaggatggacttttaatgggcacttctgggaccctgaagagacttcttcccttcaggcttattgtttgagtgtgaagttccagagcaaggagccatgttcctctaagggaattcaggaattcagacgtgctagtcccacaccagttaggtagagctgtctgttcaccctcccatcccagctgatcccagtcactgcttgctggggccatgccatggaagcttcccatcagtctcccagctgaatcctccctgctctctgagctgctgccttttgcctcctgcaactcaacatcctcttcaccctgccctgcctgcagttgagggggcgaagaagaaccctgtgttctcaggaagactgcctccaccaccgctacccagagaacctctgcatctggcatttctgctctctatgcttgagaccgggaggtttaggctcagataagtgagctctgggccatgagagggtaggtccagaaggtggggggaactgtacagatcagcagagcaggacagttggcagcagtgacctcagtagggaacatgtccgtctaccctctcgcactcatgacacctccccctaccagccctcctcttcctcctcctcctcctcctgtgggaggtggtcagtgggacttagggatctttcacctgctgtgcccagtagttctgaagtctgcttgtggagcagtgttttatgtttatccctgtttactgaagaccaaatactggtttggagacaacttccatgtcttgctcttctacctccctagttagtggaaatttggataagggaactgtagggcccagattctggaggttttatgtcattggccacagaataactgtctctaagctatccatggtccagtggtccctgccaagtctgtagacttcagagagcacttctctcttatggggttcatgggaacaggggcgggtgtgacttgcttggtggcctcattccatgtgtgcctgtgcctggggcatggactttgttaagcagagtcagcagtgaggtcctcattctccagccagcctctctgccctggagaatcatgtgctatgttctaagaatttgagaactagagtcctcatccccaggcttgaaggcacatggctttctcatgtagggctctctgtggtatttgttattattttgcaacaagaccattttagtaaaacagtcctgttcaagttgtattcttttaagttcttttattctcctttccctgagatttttgtatatattgttctgagtaatggtatctttgagctgattgttctaatcagagctggtacctactttcaataaattctggttttgtgttt

SEQ ID NO: 50972 - DNA, 2516 bp, Homo sapiens
  misc_feature (69)..(69): n is a, c, g, or t
accctgggccggcaggaacttgcttgtgattggatgttgtgggacggcggcttctcattcgtcaggcgngactgtggagtttgaattgggtggcggttgactgtagagccgctctctctcactggcacagcgaggttttgctcagcccttgtctcgggaccgcaggtacgtgcctggcgacttcttcgggtggtccccgtccgccctcctcgtccctacccagtttcttgcttccctgccccatctccgccgctccccgcagcctccgccgagcgccatggctcctaggaagggcagtagtcgggtggccaagaccaactccttacggaggcggaagctcgcctcctttctgaaagacttcgaccgtgaagtggaaatacgaatcaagcaaattgagtcagacaggcagaacctcctcaaggaggtggataacctctacaacatcgagatcctgcggctccccaaggctctgcgcgagatgaactggcttgactacttcgcccttggaggaaacaaacaggccctggaagaggcggcaacagctgacctggatatcaccgaaataaacaaactaacagcagaagctattcagacacccctgaaatctgccaaaacacgaaaggtaatacaggtagatgaaatgatagtggaagaggaagaagaagaagaaaatgaacgtaagaatcttcaaactgcaagagtcaaaaggtgtcctccatccaagaagagaactcagtccatacaaggaaaaggaaaagggaaaaggtcaagccgtgctaacactgttaccccagccgtgggccgattggaggtgtccatggtcaaaccaactccaggcctgacacccaggtttgactcaagggtcttcaagacccctggcctgcgtactccagcagcaggagagcggatttacaacatctcagggaatggcagccctcttgctgacagcaaagagatcttcctcactgtgccagtgggcggcggagagagcctgcgattattggccagtgacttgcagaggcacagtattgcccagctggatccagaggccttgggaaacattaagaagctctccaaccgtctcgcccaaatctgcagcagcatacggacccacaaatgagacaccaaagttgacaggatggacttttaatgggcacttctgggaccctgaagagacttcttcccttcaggcttattgtttgagtgtgaagttccagagcaaggagccatgttcctctaagggaattcaggaattcagacgtgctagtcccacaccagttaggtagagctgtctgttcaccctcccatcccagctgatcccagtcactgcttgctggggccatgccatggaagcttcccatcagtctcccagctgaatcctccctgctctctgagctgctgccttttgcctcctgcaactcaacatcctcttcaccctgccctgcctgcagttgagggggcgaagaagaaccctgtgttctcaggaagactgcctccaccaccgctacccagagaacctctgcatctggcatttctgctctctatgcttgagaccgggaggtttaggctcagataagtgagctctgggccatgagagggtaggtccagaaggtggggggaactgtacagatcagcagagcaggacagttggcagcagtgacctcagtagggaacatgtccgtctaccctctcgcactcatgacacctccccctaccagccctcctcttcctcctcctcctcctcctgtgggaggtggtcagtgggacttagggatctttcacctgctgtgcccagtagttctgaagtctgcttgtggagcagtgttttatgtttatccctgtttactgaagaccaaatactggtttggagacaacttccatgtcttgctcttctacctccctagttagtggaaatttggataagggaactgtagggcccagattctggaggttttatgtcattggccacagaataactgtctctaagctatccatggtccagtggtccctgccaagtctgtagacttcagagagcacttctctcttatggggttcatgggaacaggggcgggtgtgacttgcttggtggcctcattccatgtgtgcctgtgcctggggcatggactttgttaagcagagtcagcagtgaggtcctcattctccagccagcctctctgccctggagaatcatgtgctatgttctaagaatttgagaactagagtcctcatccccaggcttgaaggcacatggctttctcatgtagggctctctgtggtatttgttattattttgcaacaagaccattttagtaaaacagtcctgttcaagttgtattcttttaagttcttttattctcctttccctgagatttttgtatatattgttctgagtaatggtatctttgagctgattgttctaatcagagctggtacctactttcaataaattctggttttgtgtttaaaaaaaaaagaacgacatagtagtcgttcaatccctaacgactacaacaaca

SEQ ID NO: 50973 - DNA, 2430 bp, Homo sapiens
  misc_feature (5)..(7): n is a, c, g, or t
  misc_feature (25)..(25): n is a, c, g, or t
  misc_feature (734)..(734): n is a, c, g, or t
  misc_feature (739)..(740): n is a, c, g, or t
  misc_feature (752)..(753): n is a, c, g, or t
  misc_feature (757)..(758): n is a, c, g, or t
  misc_feature (774)..(774): n is a, c, g, or t
ccacnnngcaggaaaaaaaaaaagncaaaacgaactgtgctaggtacgaggctgggtgttggttgactgtagagccgctctctctcactggcacagcgaggttttgctcagcccttgtctcgggaccgcaggtacgtgcctggcgacttcttcgggtggtccccgtccgccctcctcgtccctacccagtttcttgcttccctgccccatctccgccgctccccgcagcctccgccgagcgccatggctcctaggaagggcagtagtcgggtggccaagaccaactccttacggaggcggaagctcgcctcctttctgaaagacttcgaccgtgaagtggaaatacgaatcaagcaaattgagtcagacaggcagaacctcctcaaggaggtggataacctctacaacatcgagatcctgcggctccccaaggctctgcgcgagatgaactggcttgactacttcgcccttggaggaaacaaacaggccctggaagaggcggcaacagctgacctggatatcaccgaaataaacaaactaacagcagaagctattcagacacccctgaaatctgccaaaacacgaaaggtaatacaggtagatgaaatgatagtggaagaggaagaagaagaagaaaatgaacgtaagaatcttcaaactgcaagagtcaaaaggtgtcctccatccaagaagagaactcagtccatacaaggaaaaggaaaagggaaaagccngggannggccagccgtgnnacannttacccagcgtgggcnatggaggtgtcatgggtcaaacgaattcaggctgaccaccaggtttgattcacgggtcttcaagacccctggcctgcgtactccagcagcaggagagcggatttacaacatctcagggaatggcagccctcttgctgacagcaaagagatcttcctcactgtgccagtgggcggcggagagagcctgcgattattggccagtgacttgcagaggcacagtattgcccagctggatccagaggccttgggaaacattaagaagctctccaaccgtctcgcccaaatctgcagcagcatacggacccacaaatgagacaccaaagttgacaggatggacttttaatgggcacttctgggaccctgaagagacttcttcccttcaggcttattgtttgagtgtgaagttccagagcaaggagccatgttcctctaagggaattcaggaattcagacgtgctagtcccacaccagttaggtagagctgtctgttcaccctcccatcccagctgatcccagtcactgcttgctggggccatgccatggaagcttcccatcagtctcccagctgaatcctccctgctctctgagctgctgccttttgcctcctgcaactcaacatcctcttcaccctgccctgcctgcagttgagggggcgaagaagaaccctgtgttctcaggaagactgcctccaccaccgctacccagagaacctctgcatctggcatttctgctctctatgcttgagaccgggaggtttaggctcagataagtgagctctgggccatgagagggtaggtccagaaggtggggggaactgtacagatcagcagagcaggacagttggcagcagtgacctcagtagggaacatgtccgtctaccctctcgcactcatgacacctccccctaccagccctcctcttcctcctcctcctcctcctgtgggaggtggtcagtgggacttagggatctttcacctgctgtgcccagtagttctgaagtctgcttgtggagcagtgttttatgtttatccctgtttactgaagaccaaatactggtttggagacaacttccatgtcttgctcttctacctccctagttagtggaaatttggataagggaactgtagggcccagattctggaggttttatgtcattggccacagaataactgtctctaagctatccatggtccagtggtccctgccaagtctgtagacttcagagagcacttctctcttatggggttcatgggaacaggggcgggtgtgacttgcttggtggcctcattccatgtgtgcctgtgcctggggcatggactttgttaagcagagtcagcagtgaggtcctcattctccagccagcctctctgccctggagaatcatgtgctatgttctaagaatttgagaactagagtcctcatccccaggcttgaaggcacatggctttctcatgtagggctctctgtggtatttgttattattttgcaacaagaccattttagtaaaacagtcctgttcaagttgtattcttttaagttcttttattctcctttccctgagatttttgtatatattgttctgagtaatggtatctttgagctgattgttctaatcagagctggtacctactttcaataaattctggttttgtgttt

SEQ ID NO: 50974 - DNA, 2378 bp, Homo sapiens
  misc_feature (682)..(682): n is a, c, g, or t
  misc_feature (687)..(688): n is a, c, g, or t
  misc_feature (700)..(701): n is a, c, g, or t
  misc_feature (705)..(706): n is a, c, g, or t
  misc_feature (722)..(722): n is a, c, g, or t
aagagctattcataggtcggtccctgggtttatttcgtacggggcgaggttttgctcagcccttgtctcgggaccgcaggtacgtgcctggcgacttcttcgggtggtccccgtccgccctcctcgtccctacccagtttcttgcttccctgccccatctccgccgctccccgcagcctccgccgagcgccatggctcctaggaagggcagtagtcgggtggccaagaccaactccttacggaggcggaagctcgcctcctttctgaaagacttcgaccgtgaagtggaaatacgaatcaagcaaattgagtcagacaggcagaacctcctcaaggaggtggataacctctacaacatcgagatcctgcggctccccaaggctctgcgcgagatgaactggcttgactacttcgcccttggaggaaacaaacaggccctggaagaggcggcaacagctgacctggatatcaccgaaataaacaaactaacagcagaagctattcagacacccctgaaatctgccaaaacacgaaaggtaatacaggtagatgaaatgatagtggaagaggaagaagaagaagaaaatgaacgtaagaatcttcaaactgcaagagtcaaaaggtgtcctccatccaagaagagaactcagtccatacaaggaaaaggaaaagggaaaagccngggannggccagccgtgnnacannttacccagcgtgggcnatggaggtgtcatgggtcaaacgaattcaggctgaccaccaggtttgattcacgggtcttcaagacccctggcctgcgtactccagcagcaggagagcggatttacaacatctcagggaatggcagccctcttgctgacagcaaagagatcttcctcactgtgccagtgggcggcggagagagcctgcgattattggccagtgacttgcagaggcacagtattgcccagctggatccagaggccttgggaaacattaagaagctctccaaccgtctcgcccaaatctgcagcagcatacggacccacaaatgagacaccaaagttgacaggatggacttttaatgggcacttctgggaccctgaagagacttcttcccttcaggcttattgtttgagtgtgaagttccagagcaaggagccatgttcctctaagggaattcaggaattcagacgtgctagtcccacaccagttaggtagagctgtctgttcaccctcccatcccagctgatcccagtcactgcttgctggggccatgccatggaagcttcccatcagtctcccagctgaatcctccctgctctctgagctgctgccttttgcctcctgcaactcaacatcctcttcaccctgccctgcctgcagttgagggggcgaagaagaaccctgtgttctcaggaagactgcctccaccaccgctacccagagaacctctgcatctggcatttctgctctctatgcttgagaccgggaggtttaggctcagataagtgagctctgggccatgagagggtaggtccagaaggtggggggaactgtacagatcagcagagcaggacagttggcagcagtgacctcagtagggaacatgtccgtctaccctctcgcactcatgacacctccccctaccagccctcctcttcctcctcctcctcctcctgtgggaggtggtcagtgggacttagggatctttcacctgctgtgcccagtagttctgaagtctgcttgtggagcagtgttttatgtttatccctgtttactgaagaccaaatactggtttggagacaacttccatgtcttgctcttctacctccctagttagtggaaatttggataagggaactgtagggcccagattctggaggttttatgtcattggccacagaataactgtctctaagctatccatggtccagtggtccctgccaagtctgtagacttcagagagcacttctctcttatggggttcatgggaacaggggcgggtgtgacttgcttggtggcctcattccatgtgtgcctgtgcctggggcatggactttgttaagcagagtcagcagtgaggtcctcattctccagccagcctctctgccctggagaatcatgtgctatgttctaagaatttgagaactagagtcctcatccccaggcttgaaggcacatggctttctcatgtagggctctctgtggtatttgttattattttgcaacaagaccattttagtaaaacagtcctgttcaagttgtattcttttaagttcttttattctcctttccctgagatttttgtatatattgttctgagtaatggtatctttgagctgattgttctaatcagagctggtacctactttcaataaattctggttttgtgttt

SEQ ID NO: 50975 - DNA, 2108 bp, Homo sapiens
cgggcagatgacctgaggtcaggagttcgagaccagcctgaccaacatggagaaaccctgtctctactaaaaatacaaaaaagttagccgggcgtggtggcgcatgtctaaaccctctttcttaaaaagtcttctttatttttagtccatttcttccttgcagcttaagattgtgtacattttattcctataagaaatgtgaatgcacaaaactttattttcatcagaaataccaccctgttgaaactgtttcttacagcacgaaaggtaatacaggtagatgaaatgatagtggaagaggaagaagaagaagaaaatgaacgtaagaatcttcaaactgcaagagtcaaaaggtgtcctccatccaagaagagaactcagtccatacaaggaaaaggaaaagggaaaaggtcaagccgtgctaacactgttaccccagccgtgggccgattggaggtgtccatggtcaaaccaactccaggcctgacacccaggtttgactcaagggtcttcaagacccctggcctgcgtactccagcagcaggagagcggatttacaacatctcagggaatggcagccctcttgctgacagcaaagagatcttcctcactgtgccagtgggcggcggagagagcctgcgattattggccagtgacttgcagaggcacagtattgcccagctggatccagaggccttgggaaacattaagaagctctccaaccgtctcgcccaaatctgcagcagcatacggacccacaaatgagacaccaaagttgacaggatggacttttaatgggcacttctgggaccctgaagagacttcttcccttcaggcttattgtttgagtgtgaagttccagagcaaggagccatgttcctctaagggaattcaggaattcagacgtgctagtcccacaccagttaggtagagctgtctgttcaccctcccatcccagctgatcccagtcactgcttgctggggccatgccatggaagcttcccatcagtctcccagctgaatcctccctgctctctgagctgctgccttttgcctcctgcaactcaacatcctcttcaccctgccctgcctgcagttgagggggcgaagaagaaccctgtgttctcaggaagactgcctccaccaccgctacccagagaacctctgcatctggcatttctgctctctatgcttgagaccgggaggtttaggctcagataagtgagctctgggccatgagagggtaggtccagaaggtggggggaactgtacagatcagcagagcaggacagttggcagcagtgacctcagtagggaacatgtccgtctaccctctcgcactcatgacacctccccctaccagccctcctcttcctcctcctcctcctcctgtgggaggtggtcagtgggacttagggatctttcacctgctgtgcccagtagttctgaagtctgcttgtggagcagtgttttatgtttatccctgtttactgaagaccaaatactggtttggagacaacttccatgtcttgctcttctacctccctagttagtggaaatttggataagggaactgtagggcccagattctggaggttttatgtcattggccacagaataactgtctctaagctatccatggtccagtggtccctgccaagtctgtagacttcagagagcacttctctcttatggggttcatgggaacaggggcgggtgtgacttgcttggtggcctcattccatgtgtgcctgtgcctggggcatggactttgttaagcagagtcagcagtgaggtcctcattctccagccagcctctctgccctggagaatcatgtgctatgttctaagaatttgagaactagagtcctcatccccaggcttgaaggcacatggctttctcatgtagggctctctgtggtatttgttattattttgcaacaagaccattttagtaaaacagtcctgttcaagttgtattcttttaagttcttttattctcctttccctgagatttttgtatatattgttctgagtaatggtatctttgagctgattgttctaatcagagctggtacctactttcaataaattctggttttgtgttt

SEQ ID NO: 50976 - DNA, 876 bp, Homo sapiens
  misc_feature (5)..(7): n is a, c, g, or t
  misc_feature (25)..(25): n is a, c, g, or t
ccacnnngcaggaaaaaaaaaaagncaaaacgaactgtgctaggtacgaggctgggtgttggttgactgtagagccgctctctctcactggcacagcgaggttttgctcagcccttgtctcgggaccgcaggtacgtgcctggcgacttcttcgggtggtccccgtccgccctcctcgtccctacccagtttcttgcttccctgccccatctccgccgctccccgcagcctccgccgagcgccatggctcctaggaagggcagtagtcgggtggccaagaccaactccttacggaggcggaagctcgcctcctttctgaaagacttcgaccgtgaagtggaaatacgaatcaagcaaattgagtcagacaggcagaacctcctcaaggaggtggataacctctacaacatcgagatcctgcggctccccaaggctctgcgcgagatgaactggcttgactacttcgcccttggaggaaacaaacaggccctggaagaggcggcaacagctgacctggatatcaccgaaataaacaaactaacagcagaagctattcagacacccctgaaatctgccaaaacacgaaaggtaatacaggtagatgaaatgatagtggaagaggaagaagaagaagaaaatgaacgtaagaatcttcaaactgcaagagtcaaaaggtgtcctccatccaagaagagaactcagtccatacaaggaaaaggaaaagggaaaagggtcttcaagacccctggcctgcgtactccagcagcaggagagcggatttacaacatctcagggaatggcagccctcttgctgacagcaaagagatcttcctcactgtgccagtgggcggcggagaggtgaagtatttccaaggg

SEQ ID NO: 50977 - DNA, 1847 bp, Homo sapiens
  misc_feature (69)..(69): n is a, c, g, or t
accctgggccggcaggaacttgcttgtgattggatgttgtgggacggcggcttctcattcgtcaggcgngactgtggagtttgaattgggtggcggttgactgtagagccgctctctctcactggcacagcgaggttttgctcagcccttgtctcgggaccgcaggtacgtgcctggcgacttcttcgggtggtccccgtccgccctcctcgtccctacccagtttcttgcttccctgccccatctccgccgctccccgcagcctccgccgagcgccatggctcctaggaagggcagtagtcgggtggccaagaccaactccttacggaggcggaagctcgcctcctttctgaaagacttcgaccgtgaagtggaaatacgaatcaagcaaattgagtcagacaggcagaacctcctcaaggaggtggataacctctacaacatcgagatcctgcggctccccaaggctctgcgcgagatgaactggcttgactacttcgcccttggaggaaacaaacaggccctggaagaggcggcaacagctgacctggatatcaccgaaataaacaaactaacagcagaagctattcagacacccctgaaatctgccaaaacacgaaaggtaatacaggtagatgaaatgatagtggaagaggaagaagaagaagaaaatgaacgtaagaatcttcaaactgcaagagtaagtggacactgaggttggaggctgggggttatcacaagacaagcaaatacaaatgcataaaatacactgttgtacaccagagctcacagtttagtagagatgatcctactttacatggcaatgacaaaagagataattgactggtgtgcaaagtgtgtagaacacagaagaggaagctagcaagcctcccctaccccactaggacatagacaggcctttcaaggtgagtgagagtctactagctagagaagaaagggaagaggaacagtattcaggatagatgggggaggcggaaaactgaagatgaggaaaccagttagaagcctatgaattcttgaactgacatgctgacactatagaatgaagggatggtttttagataggttttagaaagaagtggcatggttggtggagaaaaggaggaatcagagacaactgcatggtttctagctaaggcaaatgctatccagtgaggtgtgggacccaggtggcagagggtgctggactgggggtggtggagcacatgccaattgcatgacatgttgaccattcattacttttccaggacatctaggctagacagaaatttcagcctggagctcagggagaagagggagatttgagagatacactgcctcccagatctttaggtgtttgtcccagtgtgggagtggagatggttgtgcagggagagccaggaagggagggagtcagggtggacactagagggagggtagagagaggagctcctaaggcagactgccaaggaagttagagaagcaggaaagacagatccatcacggaggacaagggaggagagaatatatggaagataaggagtgattcttgccagggacctcccaggccccaggaagggagcactgcagggtttgcctttgattgggcacctgggacgccctgagtgaccttcacagcagccctttatgtaaagtagtggggtacaagccaggctgcaatcagttcaaaagagatttacctttaatcttggtcaaaatcctctattttgaaaacccagccagtggaagtccttattcaattagttatgttctgaactttttaagtcattgaattctgagatacaccttattatatttagtattaactatccaaagcttgttcttaa

SEQ ID NO: 50978 - DNA, 1226 bp, Homo sapiens
  misc_feature (69)..(69): n is a, c, g, or t
accctgggccggcaggaacttgcttgtgattggatgttgtgggacggcggcttctcattcgtcaggcgngactgtggagtttgaattgggtggcggttgactgtagagccgctctctctcactggcacagcgaggttttgctcagcccttgtctcgggaccgcaggtacgtgcctggcgacttcttcgggtggtccccgtccgccctcctcgtccctacccagtttcttgcttccctgccccatctccgccgctccccgcagcctccgccgagcgccatggctcctaggaagggcagtagtcgggtggccaagaccaactccttacggaggcggaagctcgcctcctttctgaaagacttcgaccgtgaagtggaaatacgaatcaagcaaattgagtcagacaggcagaacctcctcaaggaggtggataacctctacaacatcgagatcctgcggctccccaaggctctgcgcgagatgaactggcttgactacttcggctgacctggatatcaccgaaataaacaaactaacagcagaagctattcagacacccctgaaatctgccaaaagtgagtacctttcaaaactccttgttgtacagaaagaactgaggctcaggttgcttgggttgggctgctcaggcagggccttgttggtagagcctcttcccttttaatgtctgggttcttaatcttgtaaatccaaaaacttgcttttggatggtgcatttagttaattttttttcccccgaacagcaattcaaacccagaaatttagttaattttagggcaggactgcctaaaaacccaaactcaagaccccgtgtgcgagcctaaaatgaaaagtgaaaaaaggggggaaaaaagctgtgcctagaaacccaaacattgttgccctgccttactttcctccccgggttaaatagatgacaagatttagagaggtgttaaaagactggtaacacccaactgagacgctccctgatgtaatcaacaaagttgaaagcgaattgaaaaaggaatgactttctctgcatataattcaaaattactcaattcaggccaggtgcggtactcacgcctgtaatcccagcactttgggaggccaagctgtgaggattacttgagcccaggagttcaagaccagcctgggcaatgtagtgagaccttgtctctgaaaaaaaaaagaaagaaagaaaggaaaggaaaggaaaggaaaggaa

SEQ ID NO: 50979 - DNA, 485 bp, Homo sapiens
agggattctgaagcaagctgagctcagtgtctctgggctgcatggagcgagttgctgacctcagcccctgtgaggggaggacggtttgtttcagacatactctgcagggcatttcttagatgatgtgcgtgccttttgtgcccaggtaatccagcctccaccctagtgatagtgctgatgaagtcattgtctccttagagctaatatccttcctgcctgtcttgccacttctccatcccagccattccccaccactaagtgcaggatatcaggggaacctaggggttccggccctaagggccatggccagtttaacccactcccctttctattcagagcctgcgattattggccagtgacttgcagaggcacagtattgcccagctggatccagaggccttgggaaacattaagaagctctcccgtaagtctcatattcatctccacacataggatgcctccagtagctttcttgggctaccttt

SEQ ID NO: 50980 - DNA, 2343 bp, Homo sapiens
  misc_feature (5)..(7): n is a, c, g, or t
  misc_feature (25)..(25): n is a, c, g, or t
  misc_feature (734)..(734): n is a, c, g, or t
  misc_feature (739)..(740): n is a, c, g, or t
  misc_feature (752)..(753): n is a, c, g, or t
  misc_feature (757)..(758): n is a, c, g, or t
  misc_feature (774)..(774): n is a, c, g, or t
ccacnnngcaggaaaaaaaaaaagncaaaacgaactgtgctaggtacgaggctgggtgttggttgactgtagagccgctctctctcactggcacagcgaggttttgctcagcccttgtctcgggaccgcaggtacgtgcctggcgacttcttcgggtggtccccgtccgccctcctcgtccctacccagtttcttgcttccctgccccatctccgccgctccccgcagcctccgccgagcgccatggctcctaggaagggcagtagtcgggtggccaagaccaactccttacggaggcggaagctcgcctcctttctgaaagacttcgaccgtgaagtggaaatacgaatcaagcaaattgagtcagacaggcagaacctcctcaaggaggtggataacctctacaacatcgagatcctgcggctccccaaggctctgcgcgagatgaactggcttgactacttcgcccttggaggaaacaaacaggccctggaagaggcggcaacagctgacctggatatcaccgaaataaacaaactaacagcagaagctattcagacacccctgaaatctgccaaaacacgaaaggtaatacaggtagatgaaatgatagtggaagaggaagaagaagaagaaaatgaacgtaagaatcttcaaactgcaagagtcaaaaggtgtcctccatccaagaagagaactcagtccatacaaggaaaaggaaaagggaaaagccngggannggccagccgtgnnacannttacccagcgtgggcnatggaggtgtcatgggtcaaacgaattcaggctgaccaccaggtttgattcacgggtcttcaagacccctggcctgcgtactccagcagcaggagagcggatttacaacatctcagggaatggcagccctcttgctgacagcaaagagatcttcctcactgtgccagtgggcggcggagagaaccgtctcgcccaaatctgcagcagcatacggacccacaaatgagacaccaaagttgacaggatggacttttaatgggcacttctgggaccctgaagagacttcttcccttcaggcttattgtttgagtgtgaagttccagagcaaggagccatgttcctctaagggaattcaggaattcagacgtgctagtcccacaccagttaggtagagctgtctgttcaccctcccatcccagctgatcccagtcactgcttgctggggccatgccatggaagcttcccatcagtctcccagctgaatcctccctgctctctgagctgctgccttttgcctcctgcaactcaacatcctcttcaccctgccctgcctgcagttgagggggcgaagaagaaccctgtgttctcaggaagactgcctccaccaccgctacccagagaacctctgcatctggcatttctgctctctatgcttgagaccgggaggtttaggctcagataagtgagctctgggccatgagagggtaggtccagaaggtggggggaactgtacagatcagcagagcaggacagttggcagcagtgacctcagtagggaacatgtccgtctaccctctcgcactcatgacacctccccctaccagccctcctcttcctcctcctcctcctcctgtgggaggtggtcagtgggacttagggatctttcacctgctgtgcccagtagttctgaagtctgcttgtggagcagtgttttatgtttatccctgtttactgaagaccaaatactggtttggagacaacttccatgtcttgctcttctacctccctagttagtggaaatttggataagggaactgtagggcccagattctggaggttttatgtcattggccacagaataactgtctctaagctatccatggtccagtggtccctgccaagtctgtagacttcagagagcacttctctcttatggggttcatgggaacaggggcgggtgtgacttgcttggtggcctcattccatgtgtgcctgtgcctggggcatggactttgttaagcagagtcagcagtgaggtcctcattctccagccagcctctctgccctggagaatcatgtgctatgttctaagaatttgagaactagagtcctcatccccaggcttgaaggcacatggctttctcatgtagggctctctgtggtatttgttattattttgcaacaagaccattttagtaaaacagtcctgttcaagttgtattcttttaagttcttttattctcctttccctgagatttttgtatatattgttctgagtaatggtatctttgagctgattgttctaatcagagctggtacctactttcaataaattctggttttgtgttt

SEQ ID NO: 50981 - DNA, 2422 bp, Homo sapiens
  misc_feature (69)..(69): n is a, c, g, or t
accctgggccggcaggaacttgcttgtgattggatgttgtgggacggcggcttctcattcgtcaggcgngactgtggagtttgaattgggtggcggttgactgtagagccgctctctctcactggcacagcgaggttttgctcagcccttgtctcgggaccgcaggtacgtgcctggcgacttcttcgggtggtccccgtccgccctcctcgtccctacccagtttcttgcttccctgccccatctccgccgctccccgcagcctccgccgagcgccatggctcctaggaagggcagtagtcgggtggccaagaccaactccttacggaggcggaagctcgcctcctttctgaaagacttcgaccgtgaagtggaaatacgaatcaagcaaattgagtcagacaggcagaacctcctcaaggaggtggataacctctacaacatcgagatcctgcggctccccaaggctctgcgcgagatgaactggcttgactacttcggctgacctggatatcaccgaaataaacaaactaacagcagaagctattcagacacccctgaaatctgccaaaacacgaaaggtaatacaggtagatgaaatgatagtggaagaggaagaagaagaagaaaatgaacgtaagaatcttcaaactgcaagagtcaaaaggtgtcctccatccaagaagagaactcagtccatacaaggaaaaggaaaagggaaaaggtcaagccgtgctaacactgttaccccagccgtgggccgattggaggtgtccatggtcaaaccaactccaggcctgacacccaggtttgactcaagggtcttcaagacccctggcctgcgtactccagcagcaggagagcggatttacaacatctcagggaatggcagccctcttgctgacagcaaagagatcttcctcactgtgccagtgggcggcggagagagcctgcgattattggccagtgacttgcagaggcacagtattgcccagctggatccagaggccttgggaaacattaagaagctctccaaccgtctcgcccaaatctgcagcagcatacggacccacaaatgagacaccaaagttgacaggatggacttttaatgggcacttctgggaccctgaagagacttcttcccttcaggcttattgtttgagtgtgaagttccagagcaaggagccatgttcctctaagggaattcaggaattcagacgtgctagtcccacaccagttaggtagagctgtctgttcaccctcccatcccagctgatcccagtcactgcttgctggggccatgccatggaagcttcccatcagtctcccagctgaatcctccctgctctctgagctgctgccttttgcctcctgcaactcaacatcctcttcaccctgccctgcctgcagttgagggggcgaagaagaaccctgtgttctcaggaagactgcctccaccaccgctacccagagaacctctgcatctggcatttctgctctctatgcttgagaccgggaggtttaggctcagataagtgagctctgggccatgagagggtaggtccagaaggtggggggaactgtacagatcagcagagcaggacagttggcagcagtgacctcagtagggaacatgtccgtctaccctctcgcactcatgacacctccccctaccagccctcctcttcctcctcctcctcctcctgtgggaggtggtcagtgggacttagggatctttcacctgctgtgcccagtagttctgaagtctgcttgtggagcagtgttttatgtttatccctgtttactgaagaccaaatactggtttggagacaacttccatgtcttgctcttctacctccctagttagtggaaatttggataagggaactgtagggcccagattctggaggttttatgtcattggccacagaataactgtctctaagctatccatggtccagtggtccctgccaagtctgtagacttcagagagcacttctctcttatggggttcatgggaacaggggcgggtgtgacttgcttggtggcctcattccatgtgtgcctgtgcctggggcatggactttgttaagcagagtcagcagtgaggtcctcattctccagccagcctctctgccctggagaatcatgtgctatgttctaagaatttgagaactagagtcctcatccccaggcttgaaggcacatggctttctcatgtagggctctctgtggtatttgttattattttgcaacaagaccattttagtaaaacagtcctgttcaagttgtattcttttaagttcttttattctcctttccctgagatttttgtatatattgttctgagtaatggtatctttgagctgattgttctaatcagagctggtacctactttcaataaattctggttttgtgttt

SEQ ID NO: 50982 - DNA, 1713 bp, Homo sapiens
  misc_feature (69)..(69): n is a, c, g, or t
accctgggccggcaggaacttgcttgtgattggatgttgtgggacggcggcttctcattcgtcaggcgngactgtggagtttgaattgggtggcggttgactgtagagccgctctctctcactggcacagcgaggttttgctcagcccttgtctcgggaccgcaggtacgtgcctggcgacttcttcgggtggtccccgtccgccctcctcgtccctacccagtttcttgcttccctgccccatctccgccgctccccgcagcctccgccgagcgccatggctcctaggaagggcagtagtcgggtggccaagaccaactccttacggaggcggaagctcgcctcctttctgaaagacttcgaccgtgaagtggaaatacgaatcaagcaaattgagtcagacaggcagaacctcctcaaggaggtggataacctctacaacatcgagatcctgcggctccccaaggctctgcgcgagatgaactggcttgactacttcgcccttggaggaaacaaacaggccctggaagaggcggcaacagctgacctggatatcaccgaaataaacaaactaacagcagaagctattcagacacccctgaaatctgccaaaacacgaaaggtaatacaggtagatgaaatgatagtggaagaggaagaagaagaagaaaatgaacgtaagaatcttcaaactgcaagagtcaaaaggtgtcctccatccaagaagagaactcagtccatacaaggaaaaggaaaagggaaaaggtcaagccgtgctaacactgttaccccagccgtgggccgattggaggtgtccatggtcaaaccaactccaggcctgacacccaggtttgactcaagggtcttcaagacccctggcctgcgtactccagcagcaggagagcggatttacaacatctcagggaatggcagccctcttgctgacagcaaagagatcttcctcactgtgccagtgggcggcggagagagcctgcgattattggccagtgacttgcagaggcacagtattgcccagctggatccagaggccttgggaaacattaagaagctctccaaccgtctcgcccaaatctgcagcagcatacggacccacaaatgagacaccaaagttgacaggatggacttttaatgggcacttctgggaccctgaagagacttcttcccttcaggcttattgtttgagtgtgaagttccagagcaaggagccatgttcctctaagggaattcaggaattcagacgtgctagtcccacaccagttaggtagagctgtctgttcaccctcccatcccagaggggcgggtgtgacttgcttggtggcctcattccatgtgtgcctgtgcctggggcatggactttgttaagcagagtcagcagtgaggtcctcattctccagccagcctctctgccctggagaatcatgtgctatgttctaagaatttgagaactagagtcctcatccccaggcttgaaggcacatggctttctcatgtagggctctctgtggtatttgttattattttgcaacaagaccattttagtaaaacagtcctgttcaagttgtattcttttaagttcttttattctcctttccctgagatttttgtatatattgttctgagtaatggtatctttgagctgattgttctaatcagagctggtacctactttcaataaattctggttttgtgttt

SEQ ID NO: 50983 - DNA, 1717 bp, Homo sapiens
cggcaactggaggaagcaaagggaaaaaaactccattaaaaagcccagctttcctccatgttagatgtgacttggaaaatgagaaagatttagcaaaattccaccgtatcttttgccaggctagagacagggagagcagagtaaaaccctcaggctgctgaaatttctaggctgttaggaagcccctcgaattctgtgaaaatgagggtttcttaactcacactgagagcggaaaggggcagacccttttcataactccctcaagtgtgtgttacctttctttaccagcatggtaagcaacaggacatatcccagcctcggacatgtctgtatgatccaaggtacccaaagtcagacagagtaaactcaagcctggcactggctttctgccgcttcatgtgctttggaaaaagcaggagaagcaatagcagcaggagtccccagcagctggagccgcaagaatgaactgcaaagagggaactgacagcagctgcggctgcaggggcaacgacgagaagaagatgttgaagtgtgtggtggtgggggacggtgccgtggggaaaacctgcctgctgatgagctacgccaacgacgccttcccagaggaatacgtgcccactgtgtttgaccactatgcagttactgtgactgtgggaggcaagcaacacttgctcggactgtatgacaccgcgggacaggaggactacaaccagctgaggccactctcctaccccaacacggatgtgtttttgatctgcttctctgtcgtaaaccctgcctcttaccacaatgtccagattgatctccgtgatgacccaaaaaccttggcccgtttgctgtatatgaaagagaaacctctcacttacgagcatggtgtgaagctcgcaaaagcgatcggagcacagtgctacttggaatgttcagctctgactcagaaaggtctcaaagcggtttttgatgaagcaatcctcaccattttccaccccaagaaaaagaagaaacgctgttctgagggtcacagctgctgttcaattatctgaggttgtctgggacctgcctccaccccatccagggatgagaatggcagccaatctctgtggccaagctccagccaaaaaggagggcacgaccagaaagaacctgtcaaaaaaaaaaaaaaaaacaacctacatttcaagtactatttcccttctctcccatctaattgctaaagattttctttcatacgcacacactccagtgactggaaaaacgggagttttcagtcaaagcttgacatttagagaaaacaaggactttctgcctttataaatggaaatcaactgtgtatgaactataactctgcagaggttatgaattcatcctttacaaacaataatgaacttttagtcctgtaataaatgaaatgttattaggcagctttgttgcatgattgcatagttatatcttgctaacgggccactcatttctcactgatgtggatgaaaaaatgagagcagtatgtttccaggtgtgtgcactcaacaggcaaatagctcccgaggtcaccacttccctaatgggccacaggaagtaagttgatcatgatggggagatcacgtcacccagaaccagcaactggatagagactgttgttagtgtctgggtagagcacaggctcccaggggtcttaagagctaattactgaataaaacaatctagaacaaagcaacctaaa

SEQ ID NO: 50984 - DNA, 818 bp, Homo sapiens
  misc_feature (733)..(733): n is a, c, g, or t
cggcaactggaggaagcaaagggaaaaaaactccattaaaaagcccagctttcctccatgttagatgtgacttggaaaatgagaaagatttagcaaaattccaccgtatcttttgccaggctagagacagggagagcagagtaaaaccctcaggctgctgaaatttctaggctgttaggaagcccctcgaattctgtgaaaatgagggtttcttaactcacactgagagcggaaaggggcagacccttttcataactccctcaagtgtgtgttacctttctttaccagcatggtaagcaacaggacatatcccagcctcggacatgtctgtatgatccaaggtacccaaagtcagacagagtaaactcaagcctggcactggctttctgccgcttcatgtgctttggaaaaagcaggagaagcaatagcagcaggagtccccagcagctggagccgcaagaatgaactgcaaagagggaactgacagcagctgcggctgcaggggcaacgacgagaagaagatgttgaagtgtgtggtggtgggggacggtgccgtggggaaaacctgcctgctgatgagctacgccaacgacgccttcccagaggaatacgtgcccactgtgtttgaccactatgcagtgggcacgtattcctctgggacgggtcgttgggtaactgatcagcaggaggttaggccgaagggcacgggtccgcagaggacaaatacgtggtnaacatgatgtatcggactacggttatgtcgatcttggtgcatcgggtcgtggatccgtgcctccttggaccatagtggttgacag

SEQ ID NO: 50985 - DNA, 2919 bp, Homo sapiens
cggcaactggaggaagcaaagggaaaaaaactccattaaaaagcccagctttcctccatgttagatgtgacttggaaaatgagaaagatttagcaaaattccaccgtatcttttgccaggctagagacagggagagcagagtaaaaccctcaggctgctgaaatttctaggctgttaggaagcccctcgaattctgtgaaaatgagggtttcttaactcacactgagagcggaaaggggcagacccttttcataactccctcaagtgtgtgttacctttctttaccagcatggtaagcaacaggacatatcccagcctcggacatgtctgtatgatccaaggtacccaaagtcagacagagtaaactcaagcctggcactggctttctgccgcttcatgtgctttggaaaaagcaggagaagcaatagcagcaggagtccccagcagctggagccgcaagaatgaactgcaaagagggaactgacagcagctgcggctgcaggggcaacgacgagaagaagatgttgaagtgtgtggtggtgggggacggtgccgtggggaaaacctgcctgctgatgagctacgccaacgacgccttcccagaggaatacgtgcccactgtgtttgaccactatgcagttactgtgactgtgggaggcaagcaacacttgctcggactgtatgacaccgcgggacaggaggactacaaccagctgaggccactctcctaccccaacacggatgtgtttttgatctgcttctctgtcgtaaaccctgcctcttaccacaatgtccaggaggaatgggtccccgagctcaaggactgcatgcctcacgtgccttatgtcctcatagggacccagattgatctccgtgatgacccaaaaaccttggcccgtttgctgtatatgaaagagaaacctctcacttacgagcatggtgtgaagctcgcaaaagcgatcggagcacagtgctacttggaatgttcagctctgactcagaaaggtctcaaagcggtttttgatgaagcaatcctcaccattttccaccccaagaaaaagaagaaacgctgttctgagggtcacagctgctgttcaattatctgaggttgtctgggacctgcctccaccccatccagggatgagaatggcagccaatctctgtggccaagctccagccaaaaaggagggcacgaccagaaaggaactccctttgcacggaggcttgccccatcaccctctgagccctcccaacacagcacactagtcagcccactgccacgacctccctgccagccagaagcatccgtactgcacgctgtctgagaatgctgggcctggattgcagacagtgccgctgctgatcgcatcaaaaacaaagtcaaaggccatctcacattttacaaatccccagctcatgaacgtgaagctgataggaaatcaccccagggaacccgaaaaagaaacttgattcctctattgctggccttacttgatgtcttttataaaacttgggactacaatactaacctttttttctgaatctgctgttctacccatgtgtctcacattcatttgtattatttcaagaaatgtactaatttccagttcactcaggccttactaatccataccaaattagcctaaagacaaggcattttatattcatttctattttcagcatgtttctaccaaagctattagaaccaacacgtacctctgaatgcccgattataagaagacatgagaagactttaaaagttttggaaatttacagagccatgatttttgaacctaattgaaagaaaaccatctgaattgttgcaggtccacatttttgccaaagatacactctatagatgcttagtagtggcctgatttttttccatgtattgccacgacaaactaaaaatgaactgtgtttaagaatgtagtatttctgtttttcatccaagttgattgggggaagaatatggcaggatccatcttttacagtattttgtattcagtaaagtggacattcctgctcctcccttcccccattgcatgccctcttcctcccttgatttcactttctctcatgcccggatccttttattctccccagttataacccagttataaaagaaagatctgagcataaagatacgtgtttaaaaataactaaaagtaaaggaaagtgccttaatttttctatttgcttcaactgaaagtgcttctcagctcgccccatgtaagttctcattccatgtaaatgacattttccagttacaactggtactgagattttgcctctctctttccttactcatcctcccaaatgtctttgtgggagccatatcagtggataccaagctctgtatccatttgtcccctgccctccacaatgtgtgacatagaacagggactttggccctgggaaagcaaaagctcccagtaaggaatcctgtgcccaatgatgtaaaacaattccaaacatccaggaatttttgtatcatagagcgaattacttcctatcttttcattagaggctatgaggacttctaattagtcttagttgcttataagtgccctggaatcacccaggtaggcacttaatttttttttcagttgcatgagcaaagtgcttcttagtagtgtgaaattacaacaactttaagactttccagattcaagctcccactgttggaaaaagccagcctttctaatctcttctgctactggaataagcacttaagaattgcgtgatagccaaccgtggactagtagccaaccgtggagtagtactagtccacggttggctgctccataggtatgagccagggatcctttcctggtccctaagatcaaaacccatggagcagccagcgttagatgccccacccacctgtactctggagagactgtgctggggacatgt

SEQ ID NO: 50986 - DNA, 2034 bp, Homo sapiens
cggcaactggaggaagcaaagggaaaaaaactccattaaaaagcccagctttcctccatgttagatgtgacttggaaaatgagaaagatttagcaaaattccaccgtatcttttgccaggctagagacagggagagcagagtaaaaccctcaggctgctgaaatttctaggctgttaggaagcccctcgaattctgtgaaaatgagggtttcttaactcacactgagagcggaaaggggcagacccttttcataactccctcaagtgtgtgttacctttctttaccagcatggtaagcaacaggacatatcccagcctcggacatgtctgtatgatccaaggtacccaaagtcagacagagtaaactcaagcctggcactggctttctgccgcttcatgtgctttggaaaaagcaggagaagcaatagcagcaggagtccccagcagctggagccgcaagaatgaactgcaaagagggaactgacagcagctgcggctgcaggggcaacgacgagaagaagatgttgaagtgtgtggtggtgggggacggtgccgtggggaaaacctgcctgctgatgagctacgccaacgacgccttcccagaggaatacgtgcccactgtgtttgaccactatgcagttactgtgactgtgggaggcaagcaacacttgctcggactgtatgacaccgcgggacaggaggactacaaccagctgaggccactctcctaccccaacacggatgtgtttttgatctgcttctctgtcgtaaaccctgcctcttaccacaatgtccaggaggaatgggtccccgagctcaaggactgcatgcctcacgtgccttatgtcctcatagggacccagattgatctccgtgatgacccaaaaaccttggcccgtttgctgtatatgaaagagaaacctctcacttacgagcatggtgtgaagctcgcaaaagcgatcggagcacagtgctacttggaatgttcagctctgactcagaaaggtctcaaagcggtttttgatgaagcaatcctcaccattttccaccccaagaaaaagaagaaacgctgttctgagggtcacagctgctgttcaattatctgaggttgtctgggacctgcctccaccccatccagggatgagaatggcagccaatctctgtggccaagctccagccaaaaaggagggcacgaccagaaaggaactccctttgcacggaggcttgccccatcaccctctgagccctcccaacacagcacactagtcacctgggtaatatagtgagatcctgtgtctctataaaaaaattaaaaattagtcagttgtagtgacacatacctgtagtcccagctactcaggaggctgaggtggaaggatcacttgagcccagaaggtaaggctgcagtgagctgtgactgtgccactacactccagcctgagtgacagagaaagaacctgtcaaaaaaaaaaaaaaaaacaacctacatttcaagtactatttcccttctctcccatctaattgctaaagattttctttcatacgcacacactccagtgactggaaaaacgggagttttcagtcaaagcttgacatttagagaaaacaaggactttctgcctttataaatggaaatcaactgtgtatgaactataactctgcagaggttatgaattcatcctttacaaacaataatgaacttttagtcctgtaataaatgaaatgttattaggcagctttgttgcatgattgcatagttatatcttgctaacgggccactcatttctcactgatgtggatgaaaaaatgagagcagtatgtttccaggtgtgtgcactcaacaggcaaatagctcccgaggtcaccacttccctaatgggccacaggaagtaagttgatcatgatggggagatcacgtcacccagaaccagcaactggatagagactgttgttagtgtctgggtagagcacaggctcccaggggtcttaagagctaattactgaataaaacaatctagaacaaagcaacctaaa

SEQ ID NO: 50987 - DNA, 1297 bp, Homo sapiens
cggcaactggaggaagcaaagggaaaaaaactccattaaaaagcccagctttcctccatgttagatgtgacttggaaaatgagaaagatttagcaaaattccaccgtatcttttgccaggctagagacagggagagcagagtaaaaccctcaggctgctgaaatttctaggctgttaggaagcccctcgaattctgtgaaaatgagggtttcttaactcacactgagagcggaaaggggcagacccttttcataactccctcaagtgtgtgttacctttctttaccagcatggtaagcaacaggacatatcccagcctcggacatgtctgtatgatccaaggtacccaaagtcagacagagtaaactcaagcctggcactggctttctgccgcttcatgtgctttggaaaaagcaggagaagcaatagcagcaggagtccccagcagctggagccgcaagaatgaactgcaaagagggaactgacagcagctgcggctgcaggggcaacgacgagaagaagatgttgaagtgtgtggtggtgggggacggtgccgtggggaaaacctgcctgctgatgagctacgccaacgacgccttcccagaggaatacgtgcccactgtgtttgaccactatgcagggcctcactctgtcatccaggctggagtacatgagctgtgactgtgccactacactccagcctgagtgacagagaaagaacctgtcaaaaaaaaaaaaaaaaacaacctacatttcaagtactatttcccttctctcccatctaattgctaaagattttctttcatacgcacacactccagtgactggaaaaacgggagttttcagtcaaagcttgacatttagagaaaacaaggactttctgcctttataaatggaaatcaactgtgtatgaactataactctgcagaggttatgaattcatcctttacaaacaataatgaacttttagtcctgtaataaatgaaatgttattaggcagctttgttgcatgattgcatagttatatcttgctaacgggccactcatttctcactgatgtggatgaaaaaatgagagcagtatgtttccaggtgtgtgcactcaacaggcaaatagctcccgaggtcaccacttccctaatgggccacaggaagtaagttgatcatgatggggagatcacgtcacccagaaccagcaactggatagagactgttgttagtgtctgggtagagcacaggctcccaggggtcttaagagctaattactgaataaaacaatctagaacaaagcaacctaaa

SEQ ID NO: 50988 - DNA, 1924 bp, Homo sapiens
cggcaactggaggaagcaaagggaaaaaaactccattaaaaagcccagctttcctccatgttagatgtgacttggaaaatgagaaagatttagcaaaattccaccgtatcttttgccaggctagagacagggagagcagagtaaaaccctcaggctgctgaaatttctaggctgttaggaagcccctcgaattctgtgaaaatgagggtttcttaactcacactgagagcggaaaggggcagacccttttcataactccctcaagtgtgtgttacctttctttaccagcatggtaagcaacaggacatatcccagcctcggacatgtctgtatgatccaaggtacccaaagtcagacagagtaaactcaagcctggcactggctttctgccgcttcatgtgctttggaaaaagcaggagaagcaatagcagcaggagtccccagcagctggagccgcaagaatgaactgcaaagagggaactgacagcagctgcggctgcaggggcaacgacgagaagaagatgttgaagtgtgtggtggtgggggacggtgccgtggggaaaacctgcctgctgatgagctacgccaacgacgccttcccagaggaatacgtgcccactgtgtttgaccactatgcagttactgtgactgtgggaggcaagcaacacttgctcggactgtatgacaccgcgggacaggaggactacaaccagctgaggccactctcctaccccaacacggatgtgtttttgatctgcttctctgtcgtaaaccctgcctcttaccacaatgtccaggaggaatgggtccccgagctcaaggactgcatgcctcacgtgccttatgtcctcatagggacccagattgatctccgtgatgacccaaaaaccttggcccgtttgctgtatatgaaagagaaacctctcacttacgagcatggtgtgaagctcgcaaaagcgatcggagcacagtgctacttggaatgttcagctctgactcagaaaggtctcaaagcggtttttgatgaagcaatcctcaccattttccaccccaagaaaaagaagaaacgctgttctgagggtcacagctgctgttcaattatctgaggttgtctgggacctgcctccaccccatccagggatgagaatggcagccaatctctgtggccaagctccagccaaaaaggagggcacgaccagaaaggaactccctttgcacggaggcttgccccatcaccctctgagccctcccaacacagcacactagtcagcccactgccacgacctccctgccagccagaagcatccgtactgcacgctgtctgagaatgctgggcctggattgcagacagtgccgctgctgatcgcatcaaaaacaaagtcaaaggccatctcacattttacaaatccccagctcatgaacgtgaagctgataggaaatcaccccagggaacccgaaaaagaaacttgattcctctattgctggccttacttgatgtcttttataaaacttgggactacaatactaacctttttttctgaatctgctgttctacccatgtgtctcacattcatttgtattatttcaagaaatgtactaatttccagttcactcaggccttactaatccataccaaattagcctaaagacaaggcattttatattcatttctattttcagcatgtttctaccaaagctattagaaccaacacgtacctctgaatgcccgattataagaagacatgagaagactttaaaagttttggaaatttacagagccatgatttttgaacctaattgaaagaaaaccatctgaattgttgcaggtccacatttttgccaaagatacactctatagatgcttagtagtggcctgatttttttccatgtattgccacgacaaactaaaaatgaactgtgttta

SEQ ID NO: 50989 - DNA, 998 bp, Homo sapiens
cggcaactggaggaagcaaagggaaaaaaactccattaaaaagcccagctttcctccatgttagatgtgacttggaaaatgagaaagatttagcaaaattccaccgtatcttttgccaggctagagacagggagagcagagtaaaaccctcaggctgctgaaatttctaggctgttaggaagcccctcgaattctgtgaaaatgagggtttcttaactcacactgagagcggaaaggggcagacccttttcataactccctcaagtgtgtgttacctttctttaccagcatggtaagcaacaggacatatcccagcctcggacatgtctgtatgatccaaggtacccaaagtcagacagagtaaactcaagcctggcactggctttctgccgcttcatgtgctttggaaaaagcaggagaagcaatagcagcaggagtccccagcagctggagccgcaagaatgaactgcaaagagggaactgacagcagctgcggctgcaggggcaacgacgagaagaagatgttgaagtgtgtggtggtgggggacggtgccgtggggaaaacctgcctgctgatgagctacgccaacgacgccttcccagaggaatacgtgcccactgtgtttgaccactatgcagttactgtgactgtgggaggcaagcaacacttgctcggactgtatgacaccgcgggacaggaggactacaaccagctgaggccactctcctaccccaacacggatgtgtttttgatctgcttctctgtcgtaaaccctgcctcttaccacaatgtccaggaggaatgggtccccgagctcaaggactgcatgcctcacgtgccttatgtcctcatagggacccagattgatctccgtgatgacccaaaaaccttggcccgtttgctgtatatgaaagagaaacctctcacttacgagcatggtgtgaagctcgcaaaagcggtacagtcagatttgaatttcattttaaatgtatgctga

SEQ ID NO: 50990 - DNA, 3601 bp, Homo sapiens
cggcaactggaggaagcaaagggaaaaaaactccattaaaaagcccagctttcctccatgttagatgtgacttggaaaatgagaaagatttagcaaaattccaccgtatcttttgccaggctagagacagggagagcagagtaaaaccctcaggctgctgaaatttctaggctgttaggaagcccctcgaattctgtgaaaatgagggtttcttaactcacactgagagcggaaaggggcagacccttttcataactccctcaagtgtgtgttacctttctttaccagcatggtaagcaacaggacatatcccagcctcggacatgtctgtatgatccaaggtacccaaagtcagacagagtaaactcaagcctggcactggctttctgccgcttcatgtgctttggaaaaagcaggagaagcaatagcagcaggagtccccagcagctggagccgcaagaatgaactgcaaagagggaactgacagcagctgcggctgcaggggcaacgacgagaagaagatgttgaagtgtgtggtggtgggggacggtgccgtggggaaaacctgcctgctgatgagctacgccaacgacgccttcccagaggaatacgtgcccactgtgtttgaccactatgcagttactgtgactgtgggaggcaagcaacacttgctcggactgtatgacaccgcgggacaggaggactacaaccagctgaggccactctcctaccccaacacggatgtgtttttgatctgcttctctgtcgtaaaccctgcctcttaccacaatgtccaggaggaatgggtccccgagctcaaggactgcatgcctcacgtgccttatgtcctcatagggacccagattgatctccgtgatgacccaaaaaccttggcccgtttgctgtatatgaaagagaaacctctcacttacgagcatggtgtgaagctcgcaaaagcgatcggagcacagtgctacttggaatgttcagctctgactcagaaaggtctcaaagcggtttttgatgaagcaatcctcaccattttccaccccaagaaaaagaagaaacgctgttctgagggtcacagctgctgttcaattatctgaggttgtctgggacctgcctccaccccatccagggatgagaatggcagccaatctctgtggccaagctccagccaaaaaggagggcacgaccagaaaggaactccctttgcacggaggcttgccccatcaccctctgagccctcccaacacagcacactagtcagcccactgccacgacctccctgccagccagaagcatccgtactgcacgctgtctgagaatgctgggcctggattgcagacagtgccgctgctgatcgcatcaaaaacaaagtcaaaggccatctcacattttacaaatccccagctcatgaacgtgaagctgataggaaatcaccccagggaacccgaaaaagaaacttgattcctctattgctggccttacttgatgtcttttataaaacttgggactacaatactaacctttttttctgaatctgctgttctacccatgtgtctcacattcatttgtattatttcaagaaatgtactaatttccagttcactcaggccttactaatccataccaaattagcctaaagacaaggcattttatattcatttctattttcagcatgtttctaccaaagctattagaaccaacacgtacctctgaatgcccgattataagaagacatgagaagactttaaaagttttggaaatttacagagccatgatttttgaacctaattgaaagaaaaccatctgaattgttgcaggtccacatttttgccaaagatacactctatagatgcttagtagtggcctgatttttttccatgtattgccacgacaaactaaaaatgaactgtgtttaagaatgtagtatttctgtttttcatccaagttgattgggggaagaatatggcaggatccatcttttacagtattttgtattcagtaaagtggacattcctgctcctcccttcccccattgcatgccctcttcctcccttgatttcactttctctcatgcccggatccttttattctccccagttataacccagttataaaagaaagatctgagcataaagatacgtgtttaaaaataactaaaagtaaaggaaagtgccttaatttttctatttgcttcaactgaaagtgcttctcagctcgccccatgtaagttctcattccatgtaaatgacattttccagttacaactggtactgagattttgcctctctctttccttactcatcctcccaaatgtctttgtgggagccatatcagtggataccaagctctgtatccatttgtcccctgccctccacaatgtgtgacatagaacagggactttggccctgggaaagcaaaagctcccagtaaggaatcctgtgcccaatgatgtaaaacaattccaaacatccaggaatttttgtatcatagagcgaattacttcctatcttttcattagaggctatgaggacttctaattagtcttagttgcttataagtgccctggaatcacccaggtaggcacttaatttttttttcagttgcatgagcaaagtgcttcttagtagtgtgaaattacaacaactttaagactttccagattcaagctcccactgttggaaaaagccagcctttctaatctcttctgctactggaataagcacttaagaattgcgtgatagccaggcaccgtggctcatgcctgtaatcccaacacttagggaggctgaggtgggtgggccgcttgagctcaggagttcaagaccagcctgggtaatatagtgagatcctgtgtctctataaaaaaattaaaaattagtcagttgtagtgacacatacctgtagtcccagctactcaggaggctgaggtggaaggatcacttgagcccagaaggtaaggctgcagtgagctgtgactgtgccactacactccagcctgagtgacagagaaagaacctgtcaaaaaaaaaaaaaaaaacaacctacatttcaagtactatttcccttctctcccatctaattgctaaagattttctttcatacgcacacactccagtgactggaaaaacgggagttttcagtcaaagcttgacatttagagaaaacaaggactttctgcctttataaatggaaatcaactgtgtatgaactataactctgcagaggttatgaattcatcctttacaaacaataatgaacttttagtcctgtaataaatgaaatgttattaggcagctttgttgcatgattgcatagttatatcttgctaacgggccactcatttctcactgatgtggatgaaaaaatgagagcagtatgtttccaggtgtgtgcactcaacaggcaaatagctcccgaggtcaccacttccctaatgggccacaggaagtaagttgatcatgatggggagatcacgtcacccagaaccagcaactggatagagactgttgttagtgtctgggtagagcacaggctcccaggggtcttaagagctaattactgaataaaacaatctagaacaaagcaacctaaa

SEQ ID NO: 50991 - DNA, 2940 bp, Homo sapiens
caggggtggaccacaggcagtacgggacgtgggagccacaacactgctcgaactgtaggacaccgcgggaattgatctccgtgatgacccaaaaaccttggcccgtttgctgtatatgaaagagaaacctctcacttacgagcatggtgtgaagctcgcaaaagcgaaatgtctgaattggaagagacaagcttgggctcctcccgctccatcgaaaggcaaagcctgacatgctgtcagctgcacactgggggcaggaggatggggagtgccctgcccctcctgcaggactccaggtatcggagcacagtgctacttggaatgttcagctctgactcagaaaggtctcaaagcggtttttgatgaagcaatcctcaccattttccaccccaagaaaaagaagaaacgctgttctgagggtcacagctgctgttcaattatctgaggttgtctgggacctgcctccaccccatccagggatgagaatggcagccaatctctgtggccaagctccagccaaaaaggagggcacgaccagaaaggaactccctttgcacggaggcttgccccatcaccctctgagccctcccaacacagcacactagtcagcccactgccacgacctccctgccagccagaagcatccgtactgcacgctgtctgagaatgctgggcctggattgcagacagtgccgctgctgatcgcatcaaaaacaaagtcaaaggccatctcacattttacaaatccccagctcatgaacgtgaagctgataggaaatcaccccagggaacccgaaaaagaaacttgattcctctattgctggccttacttgatgtcttttataaaacttgggactacaatactaacctttttttctgaatctgctgttctacccatgtgtctcacattcatttgtattatttcaagaaatgtactaatttccagttcactcaggccttactaatccataccaaattagcctaaagacaaggcattttatattcatttctattttcagcatgtttctaccaaagctattagaaccaacacgtacctctgaatgcccgattataagaagacatgagaagactttaaaagttttggaaatttacagagccatgatttttgaacctaattgaaagaaaaccatctgaattgttgcaggtccacatttttgccaaagatacactctatagatgcttagtagtggcctgatttttttccatgtattgccacgacaaactaaaaatgaactgtgtttaagaatgtagtatttctgtttttcatccaagttgattgggggaagaatatggcaggatccatcttttacagtattttgtattcagtaaagtggacattcctgctcctcccttcccccattgcatgccctcttcctcccttgatttcactttctctcatgcccggatccttttattctccccagttataacccagttataaaagaaagatctgagcataaagatacgtgtttaaaaataactaaaagtaaaggaaagtgccttaatttttctatttgcttcaactgaaagtgcttctcagctcgccccatgtaagttctcattccatgtaaatgacattttccagttacaactggtactgagattttgcctctctctttccttactcatcctcccaaatgtctttgtgggagccatatcagtggataccaagctctgtatccatttgtcccctgccctccacaatgtgtgacatagaacagggactttggccctgggaaagcaaaagctcccagtaaggaatcctgtgcccaatgatgtaaaacaattccaaacatccaggaatttttgtatcatagagcgaattacttcctatcttttcattagaggctatgaggacttctaattagtcttagttgcttataagtgccctggaatcacccaggtaggcacttaatttttttttcagttgcatgagcaaagtgcttcttagtagtgtgaaattacaacaactttaagactttccagattcaagctcccactgttggaaaaagccagcctttctaatctcttctgctactggaataagcacttaagaattgcgtgatagccaggcaccgtggctcatgcctgtaatcccaacacttagggaggctgaggtgggtgggccgcttgagctcaggagttcaagaccagcctgggtaatatagtgagatcctgtgtctctataaaaaaattaaaaattagtcagttgtagtgacacatacctgtagtcccagctactcaggaggctgaggtggaaggatcacttgagcccagaaggtaaggctgcagtgagctgtgactgtgccactacactccagcctgagtgacagagaaagaacctgtcaaaaaaaaaaaaaaaaacaacctacatttcaagtactatttcccttctctcccatctaattgctaaagattttctttcatacgcacacactccagtgactggaaaaacgggagttttcagtcaaagcttgacatttagagaaaacaaggactttctgcctttataaatggaaatcaactgtgtatgaactataactctgcagaggttatgaattcatcctttacaaacaataatgaacttttagtcctgtaataaatgaaatgttattaggcagctttgttgcatgattgcatagttatatcttgctaacgggccactcatttctcactgatgtggatgaaaaaatgagagcagtatgtttccaggtgtgtgcactcaacaggcaaatagctcccgaggtcaccacttccctaatgggccacaggaagtaagttgatcatgatggggagatcacgtcacccagaaccagcaactggatagagactgttgttagtgtctgggtagagcacaggctcccaggggtcttaagagctaattactgaataaaacaatctagaacaaagcaacctaaa

SEQ ID NO: 50992 - DNA, 243 bp, Homo sapiens
gcaaggagcaaatccttttatgatgtaagtggcccaccccaattttgtatctcctttgataaaaagtgtgtataatgtaaagtagttttgcatattcttgtgctgcacatgggctgaatttttaaattttttttaaaaacttgaagcagaaccttgtaatttgtgtaaatgacaagtgtaaaatcctaccataaaatgctaaaaatatgcactgtttcaaataaaaccaagaaatgcagcatt

SEQ ID NO: 50993 - DNA, 447 bp, Homo sapiens
agaaaattgatgccatcaggtatatatctttttcaaggtcagaatatgtgattaacacttaaaattttatatgttgagtctttatagactttaatatgtttctaactctaaaaattaattttttactgagttttttattatataactattctgtatatatgtataattcaataattatttttatttatttaagaatttagcttgggttaaatcatataacatctgctttgaattggaagattgcaatgaaatttttattcagctttttagaactctcttctcagtgatcaagtaagttattttttaagcatttctgtttgtctctttttcttgattatgtattcagatgttgtatactctacatgtacactaagatatttcagaagttataaggattgttttccttagaaaacttaacataaaggggaaagtaaaaattctgttgtc

SEQ ID NO: 50994 - DNA, 279 bp, Homo sapiens
atagagcctgtggtccgctctgaaagagaaagcctaaagatttatagtttatttttgcttctaaagagtataattttatttgattggatcttttgaatcattttgaataatggattaggccaatcccaagacattcatctaaaggagaattttcttttattgtagtttaggaagtggacgggaggctgggtacggtgactcaacatctgtaatcccagctactcgggaggtctgaggtgggaggatcacttgaccgagatcctctagatcgacccacat

SEQ ID NO: 50995 - DNA, 6686 bp, Homo sapiens
ctgaccgatagaggccggtagaggactgtgaaccaaaagttgtcccccaggatggacttcaccgcgcagcccaagcctgccactgccctctgtggcgtcgtgagtgccgacgggaagatcgcttaccctccgggggtaaaagagatcaccgacaagatcaccacggacgagatgatcaaacgcctgaagatggtagtgaaaacctttatggatatggatcaggactcagaagatgaaaaacagcagtatctcccactagccttgcatcttgcatctgaattcttcctcaggaaccccaataaagatgtgcgtctccttgtagcatgttgtttggctgatatctttcgtatctatgccccagaagctccatatacttcccatgataaacttaaggacatatttttgtttattaccagacaattaaaaggtttggaggatacaaagagtccacagtttaatagatacttttatttattagagaatttagcttgggttaaatcatataacatctgctttgaattggaagattgcaatgaaatttttattcagctttttagaactctcttctcagtgatcaacaatagccacaataagaaggtacaaatgcacatgctagatttgatgagttctatcatcatggaaggtgatggagttactcaagaattattggactccattcttattaacctcattcctgcacataagaacttaaataaacagtcctttgaccttgcaaaagtgctattgaaaagaacagtccagactattgaggcatgcattgccaattttttcaatcaagtcctggtgctgggaagatcatcagtaagtgatttgtcagaacatgtatttgatctgattcaggaactttttgctatagatcctcatttattattatccgtcatgccacagcttgaattcaaactaaagagcaatgatggagaagagcgattagctgttgttcgacttctagctaaattgtttggctccaaagattctgatttggcaacacagaatcgtcctctttggcaatgttttcttggacgatttaatgatattcatgttcctgtgagattagaaagtgtgaaatttgccagtcattgtttaatgaatcacccagatttagcgaaggatctcacagaatatttaaaggttagatcacatgatccagaagaagctattcgtcatgatgtcattgttactataataacagctgccaagagggacctggccttagtaaatgatcagctgcttggctttgtaagggaaagaacactggataaacggtggcgagtaagaaaagaagctatgatgggtctggctcagctttataagaaatactgtcttcatggtgaagcaggaaaggaagctgcagagaaagtcagctggataaaggacaaacttctgcatatttattatcagaacagcattgacgacaaactgttggtagagaaaatctttgctcagtatcttgtcccccacaacctggaaacagaagagagaatgaaatgcttatattacttatatgctagtttggatccaaatgctgtaaaagctctcaacgaaatgtggaagtgtcagaacatgcttcggagccatgtacgcgaactattggatttgcacaagcagcctacatcagaggctaactgttctgccatgtttggaaaactgatgaccatagcaaagaatttgcctgaccccgggaaagcacaagattttgtgaagaaatttaaccaggttctcggcgatgatgagaaacttcggtctcagttggagttattaattagcccaacctgttcttgcaaacaagcagatatttgtgtgagagaaatagcccggaaacttgcaaatcctaagcaaccaacaaatccttttctagagatggtcaaatttctgttggaaagaatcgcacctgtgcacattgattcagaagccataagtgcactagtgaaattgatgaataagtcaatagaggggacagcagatgatgaagaggagggtgtaagtccagatacagctatccgttcaggacttgaacttcttaaggttctgtcttttacacatcctacctcgttccactctgcagagacatatgagtccttgttacagtgcctaagaatggaggatgacaaggtagcagaagctgctattcaaatttttagaaatacaggtcacaaaatagaaacagaccttccccagatacgatcgaccttaattcccattttacatcaaaaagcaaagaggggtactccacaccaagcaaaacaggctgtgcactgtatacacgccatattcacaaataaagaagtccagcttgcacagatttttgagccactcagtaggagtctgaatgctgatgtgccagaacaacttataactccattagtttcattgggccacatttctatgttagcaccagatcagtttgcttccccaatgaaatctgtagtagcaaattttattgtgaaagatctgctaatgaatgacaggtcaacaggtgaaaagaatggaaaactgtggtctccagatgaagaggtttcccctgaagtactagcaaaggtacaggcaattaaacttctggtaaggtggctgttgggtatgaaaaacaaccagtctaaatctgccaattcaacccttcggttattatcagcgatgttggttagtgagggtgacctgacagagcaaaagaggatcagtaaatctgatatgtctcgcttgcgattagctgctggtagtgccataatgaagcttgctcaggaaccttgttaccatgaaattattaccccagaacagtttcagctctgtgcacttgttattaatgatgagtgttaccaagtaaggcagatatttgctcagaagctgcataaggcacttgtgaagttactgctcccattggagtatatggcgatctttgccttgtgtgccaaagatcctgtgaaggagagaagagcacacgcacgacaatgtttactgaaaaatatcagtatacgcagggaatacattaagcagaatcctatggctactgagaaattattatcactgttgcctgaatatgtagttccatacatgattcacctgctagcccatgatccagattttacaagatcacaagatgttgatcagcttcgtgatatcaaagagtgcctatggttcatgcttgaagttttaatgacaaagaatgaaaacaatagccatgcctttatgaagaagatggcagagaacatcaagttaaccagagatgcccagtctccagatgaatccaagacaaatgaaaaactgtatacagtatgtgatgtggctctctgtgttataaatagtaaaagtgctttgtgcaatgcagattcaccaaaggacccagtcctcccaatgaaattttttacacaacctgaaaaggacttctgtaacgataagagttatatttcagaagagacaagagtacttctgttaacaggaaagccaaagcctgctggagtactaggtgcagtaaataagcctttatcagcaacgggaaggaaaccctatgttagaagcactggcactgagactggaagcaatattaatgtaaattcagagctgaacccttcaaccggaaatcgatcaagggaacagagttcagaggcagcagaaactggagttagtgaaaatgaagagaaccctgtgaggattatttcagtcacacctgtaaagaatattgacccagtaaagaataaggaaattaattctgatcaggctacccagggcaacatcagcagtgaccgaggaaagaaaagaacagtaacagcagctggtgcagagaatatccaacaaaaaacagatgagaaagtagatgaatcgggacctcccgccccttccaaacccaggagaggacgtcgacccaagtctgaatctcagggcaatgctaccaaaaatgatgatctaaataaacctattaacaagggaaggaagagagctgcagtgggtcaggagagccctgggggtttggaagcaggtaatgccaaagcacccaaactgcaagatttagccaaaaaggcagcaccagcagaaagacaaattgacttacaaaggtaaaaatgcatttgcaaagggagaaaatgaaggccaaacagaagcaggctccagcttctgcaaaaacttggattcacaaatgtccctgaacagaaaatgaagctcacttcagaacacacactctctgccttgaaaactaaagagactattacttccttttcacatgaccacaagtcctctgatggaaatgtacagcagaaactcttgagagagaggctaaaagcaactctgttctcccccttcccctagacttttcttacgaaaagtcaataattaagcaaattgcttaacacttggttccagttcctgcctatctggagtttaaatgcgtaatacaccattaatttccacgctgcagtttttattttaaagaaagtaacaagatgtctttacactgacactgaaaattcatccattttagagccaggaattcccatgttacacaggaaaaaatagaagtctactgaattaattttttaaaagaaaagagatcagattaaatatttctttgtttttccttttggaaacttttatgtataattctttctgcctgcctacttttctgcaaaaatgagatgtacagatttcggttccctgctatgaaaagtgatgtggtagcaattttataaatgttgctttctgatttttatcagagtgagaaaattaaaattattgatttgcaagtagtaaacagttcatattttgatttcccctcattttagtttaatataatttgcaataaatgtacatattgttgtttgtttcataaagcatatcactttaaaatggtttttactcctgtgattatgttggaatatttggaattttaaaggagtaaagactgtccagcatttggttttataatgtttgtcaccagatttttattaatgtaaaaaaaatcaatttttaaaaaatagttggactttggcagcttttaaggaaagttggaggtgttttaggattgctatcaattttcagcattgtgctatttggaaataagtgttttgcttttgtctgatggtctgggctcatttttatgtttattttagaaaactgttgcatcaatatattatgtttcttggcattgttcagcataggtaatgtgtgcactttatgtgtacacataatcatatttaagttttttgcataaaataaatgcttctagatgtcatggcagtctttttaatctttttatcatatgctttcttgtgaattttttcatgttaaagagctaaagtcataacatgattacagtcaactctccattatctatataaaatagtgactaagcctcaggtttttaattttgtgataacaaaataacgaaggcatgtaagacctgattctggaggaacatgaaatttgtcttttctcatgtccagagttctatcctgcccccactgtccactgtagggtcatccgcaaagccctagcagaatgtgctcactccatttccttacacgtttctagcatgggtcagaggaaacaacatttgtgttataacttcgtcttgataggctgtagtgtacatgggatgtaaaacaaacaagtgtatcaaaggtggatgattctgttagagtgaagtttgagagtaaatgtcacttacgtttctcatagataatcaagagttggctgtgtattgactgaaagatgggtaattattttaaatatgcatttacacacatttaggtatcagaagatgcttagggaacaatggataccaatgatagaaaatgatacctttacaggggcagaaaaatccccactcttccttattgcctcttcagaaccctttagaaagtataaaatattgcctccaacatgctgaaaaagagtatctatgcataagtatcagagaagtccctcaagcaatcagtaggtgtgttctatttagagagagtttaaagttctcttagcatcagacaacttgattcctaaggtttccagtgtgtcaccaacaaaaagtgcattgatagggacctttgtctcttcctccctttgattaattgcccggcatcacagtttactagattaccaagtgttacatcatattaaataaaatgtagcagaaccatctgcatcaatatattcctgtttagatttttgcaggagagaagttaaaaggatttgctccttgtatgatgtaagtggcccaccccaattttgtaacatgatgcaagtgtctggcactaagggaagcaagagtagggttgtggaaagaccaagctgatggggagggacttgtttacgggaatttttttagttttccttttcaaaggaaaacattaaaatcccttaggaatttggtattcacatctcagagaactacaacacaaaagtgcagacttatatttgagaattaatgttaaccctttgtgtctagtttgaagcttcttgtatttgtctaaaacaacaagccagaattttgtatctcctttgataaaaagtgtgtataatgtaaagtagttttgcatattcttgtgctgcacatgggctgaatttttaaattttttttaaaaacttgaagcagaaccttgtaatttgtgtaaatgacaagtgtaaaatcctaccataaaatgctaaaaatatgcactgtttcaaataaaaccaagaaatgcagcatt

SEQ ID NO: 50996 - DNA, 5436 bp, Homo sapiens
cggacgcgtgggtcgagaacactggtataaacggtggcgagtaagaaaagaagctatgatgggtctggctcagctttataagaaatactgtcttcatggtgaagcaggaaaggaagctgcagagaaagtcagctggataaaggacaaacttctgcatatttattatcagaacagcattgacgacaaactgttggtagagaaaatctttgctcagtatcttgtcccccacaacctggaaacagaagagagaatgaaatgcttatattacttatatgctagtttggatccaaatgctgtaaaagctctcaacgaaatgtggaagtgtcagaacatgcttcggagccatgtacgcgaactattggatttgcacaagcagcctacatcagaggctaactgttctgccatgtttggaaaactgatgaccatagcaaagaatttgcctgaccccgggaaagcacaagattttgtgaagaaatttaaccaggttctcggcgatgatgagaaacttcggtctcagttggagttattaattagcccaacctgttcttgcaaacaagcagatatttgtgtgagagaaatagcccggaaacttgcaaatcctaagcaaccaacaaatccttttctagagatggtcaaatttctgttggaaagaatcgcacctgtgcacattgattcagaagccataagtgcactagtgaaattgatgaataagtcaatagaggggacagcagatgatgaagaggagggtgtaagtccagatacagctatccgttcaggacttgaacttcttaaggttctgtcttttacacatcctacctcgttccactctgcagagacatatgagtccttgttacagtgcctaagaatggaggatgacaaggtagcagaagctgctattcaaatttttagaaatacaggtcacaaaatagaaacagaccttccccagatacgatcgaccttaattcccattttacatcaaaaagcaaagaggggtactccacaccaagcaaaacaggctgtgcactgtatacacgccatattcacaaataaagaagtccagcttgcacagatttttgagccactcagtaggagtctgaatgctgatgtgccagaacaacttataactccattagtttcattgggccacatttctatgttagcaccagatcagtttgcttccccaatgaaatctgtagtagcaaattttattgtgaaagatctgctaatgaatgacaggtcaacaggtgaaaagaatggaaaactgtggtctccagatgaagaggtttcccctgaagtactagcaaaggtacaggcaattaaacttctggtaaggtggctgttgggtatgaaaaacaaccagtctaaatctgccaattcaacccttcggttattatcagcgatgttggttagtgagggtgacctgacagagcaaaagaggatcagtaaatctgatatgtctcgcttgcgattagctgctggtagtgccataatgaagcttgctcaggaaccttgttaccatgaaattattaccccagaacagtttcagctctgtgcacttgttattaatgatgagtgttaccaagtaaggcagatatttgctcagaagctgcataaggcacttgtgaagttactgctcccattggagtatatggcgatctttgccttgtgtgccaaagatcctgtgaaggagagaagagcacacgcacgacaatgtttactgaaaaatatcagtatacgcagggaatacattaagcagaatcctatggctactgagaaattattatcactgttgcctgaatatgtagttccatacatgattcacctgctagcccatgatccagattttacaagatcacaagatgttgatcagcttcgtgatatcaaagagtgcctatggttcatgcttgaagttttaatgacaaagaatgaaaacaatagccatgcctttatgaagaagatggcagagaacatcaagttaaccagagatgcccagtctccagatgaatccaagacaaatgaaaaactgtatacagtatgtgatgtggctctctgtgttataaatagtaaaagtgctttgtgcaatgcagattcaccaaaggacccagtcctcccaatgaaattttttacacaacctgaaaaggacttctgtaacgataagagttatatttcagaagagacaagagtacttctgttaacaggaaagccaaagcctgctggagtactaggtgcagtaaataagcctttatcagcaacgggaaggaaaccctatgttagaagcactggcactgagactggaagcaatattaatgtaaattcagagctgaacccttcaaccggaaatcgatcaagggaacagagttcagaggcagcagaaactggagttagtgaaaatgaagagaaccctgtgaggattatttcagtcacacctgtaaagaatattgacccagtaaagaataaggaaattaattctgatcaggctacccagggcaacatcagcagtgaccgaggaaagaaaagaacagtaacagcagctggtgcagagaatatccaacaaaaaacagatgagaaagtagatgaatcgggacctcccgccccttccaaacccaggagaggacgtcgacccaagtctgaatctcagggcaatgctaccaaaaatgatgatctaaataaacctattaacaagggaaggaagagagctgcagtgggtcaggagagccctgggggtttggaagcaggtaatgccaaagcacccaaactgcaagatttagccaaaaaggcagcaccagcagaaagacaaattgacttacaaaggtaaaaatgcatttgcaaagggagaaaatgaaggccaaacagaagcaggctccagcttctgcaaaaacttggattcacaaatgtccctgaacagaaaatgaagctcacttcagaacacacactctctgccttgaaaactaaagagactattacttccttttcacatgaccacaagtcctctgatggaaatgtacagcagaaactcttgagagagaggctaaaagcaactctgttctcccccttcccctagacttttcttacgaaaagtcaataattaagcaaattgcttaacacttggttccagttcctgcctatctggagtttaaatgcgtaatacaccattaatttccacgctgcagtttttattttaaagaaagtaacaagatgtctttacactgacactgaaaattcatccattttagagccaggaattcccatgttacacaggaaaaaatagaagtctactgaattaattttttaaaagaaaagagatcagattaaatatttctttgtttttccttttggaaacttttatgtataattctttctgcctgcctacttttctgcaaaaatgagatgtacagatttcggttccctgctatgaaaagtgatgtggtagcaattttataaatgttgctttctgatttttatcagagtgagaaaattaaaattattgatttgcaagtagtaaacagttcatattttgatttcccctcattttagtttaatataatttgcaataaatgtacatattgttgtttgtttcataaagcatatcactttaaaatggtttttactcctgtgattatgttggaatatttggaattttaaaggagtaaagactgtccagcatttggttttataatgtttgtcaccagatttttattaatgtaaaaaaaatcaatttttaaaaaatagttggactttggcagcttttaaggaaagttggaggtgttttaggattgctatcaattttcagcattgtgctatttggaaataagtgttttgcttttgtctgatggtctgggctcatttttatgtttattttagaaaactgttgcatcaatatattatgtttcttggcattgttcagcataggtaatgtgtgcactttatgtgtacacataatcatatttaagttttttgcataaaataaatgcttctagatgtcatggcagtctttttaatctttttatcatatgctttcttgtgaattttttcatgttaaagagctaaagtcataacatgattacagtcaactctccattatctatataaaatagtgactaagcctcaggtttttaattttgtgataacaaaataacgaaggcatgtaagacctgattctggaggaacatgaaatttgtcttttctcatgtccagagttctatcctgcccccactgtccactgtagggtcatccgcaaagccctagcagaatgtgctcactccatttccttacacgtttctagcatgggtcagaggaaacaacatttgtgttataacttcgtcttgataggctgtagtgtacatgggatgtaaaacaaacaagtgtatcaaaggtggatgattctgttagagtgaagtttgagagtaaatgtcacttacgtttctcatagataatcaagagttggctgtgtattgactgaaagatgggtaattattttaaatatgcatttacacacatttaggtatcagaagatgcttagggaacaatggataccaatgatagaaaatgatacctttacaggggcagaaaaatccccactcttccttattgcctcttcagaaccctttagaaagtataaaatattgcctccaacatgctgaaaaagagtatctatgcataagtatcagagaagtccctcaagcaatcagtaggtgtgttctatttagagagagtttaaagttctcttagcatcagacaacttgattcctaaggtttccagtgtgtcaccaacaaaaagtgcattgatagggacctttgtctcttcctccctttgattaattgcccggcatcacagtttactagattaccaagtgttacatcatattaaataaaatgtagcagaaccatctgcatcaatatattcctgtttagatttttgcaggagagaagttaaaaggatttgctccttgtatgatgtaagtggcccaccccaattttgtaacatgatgcaagtgtctggcactaagggaagcaagagtagggttgtggaaagaccaagctgatggggagggacttgtttacgggaatttttttagttttccttttcaaaggaaaacattaaaatcccttaggaatttggtattcacatctcagagaactacaacacaaaagtgcagacttatatttgagaattaatgttaaccctttgtgtctagtttgaagcttcttgtatttgtctaaaacaacaagccagaattttgtatctcctttgataaaaagtgtgtataatgtaaagtagttttgcatattcttgtgctgcacatgggctgaatttttaaattttttttaaaaacttgaagcagaaccttgtaatttgtgtaaatgacaagtgtaaaatcctaccataaaatgctaaaaatatgcactgtttcaaataaaaccaagaaatgcagcatt

SEQ ID NO: 50997 - DNA, 5397 bp, Homo sapiens
gattctagaggtatcccgtctcacttctgaatccctttataagaaatactgtcttcatggtgaagcaggaaaggaagctgcagagaaagtcagctggataaaggacaaacttctgcatatttattatcagaacagcattgacgacaaactgttggtagagaaaatctttgctcagtatcttgtcccccacaacctggaaacagaagagagaatgaaatgcttatattacttatatgctagtttggatccaaatgctgtaaaagctctcaacgaaatgtggaagtgtcagaacatgcttcggagccatgtacgcgaactattggatttgcacaagcagcctacatcagaggctaactgttctgccatgtttggaaaactgatgaccatagcaaagaatttgcctgaccccgggaaagcacaagattttgtgaagaaatttaaccaggttctcggcgatgatgagaaacttcggtctcagttggagttattaattagcccaacctgttcttgcaaacaagcagatatttgtgtgagagaaatagcccggaaacttgcaaatcctaagcaaccaacaaatccttttctagagatggtcaaatttctgttggaaagaatcgcacctgtgcacattgattcagaagccataagtgcactagtgaaattgatgaataagtcaatagaggggacagcagatgatgaagaggagggtgtaagtccagatacagctatccgttcaggacttgaacttcttaaggttctgtcttttacacatcctacctcgttccactctgcagagacatatgagtccttgttacagtgcctaagaatggaggatgacaaggtagcagaagctgctattcaaatttttagaaatacaggtcacaaaatagaaacagaccttccccagatacgatcgaccttaattcccattttacatcaaaaagcaaagaggggtactccacaccaagcaaaacaggctgtgcactgtatacacgccatattcacaaataaagaagtccagcttgcacagatttttgagccactcagtaggagtctgaatgctgatgtgccagaacaacttataactccattagtttcattgggccacatttctatgttagcaccagatcagtttgcttccccaatgaaatctgtagtagcaaattttattgtgaaagatctgctaatgaatgacaggtcaacaggtgaaaagaatggaaaactgtggtctccagatgaagaggtttcccctgaagtactagcaaaggtacaggcaattaaacttctggtaaggtggctgttgggtatgaaaaacaaccagtctaaatctgccaattcaacccttcggttattatcagcgatgttggttagtgagggtgacctgacagagcaaaagaggatcagtaaatctgatatgtctcgcttgcgattagctgctggtagtgccataatgaagcttgctcaggaaccttgttaccatgaaattattaccccagaacagtttcagctctgtgcacttgttattaatgatgagtgttaccaagtaaggcagatatttgctcagaagctgcataaggcacttgtgaagttactgctcccattggagtatatggcgatctttgccttgtgtgccaaagatcctgtgaaggagagaagagcacacgcacgacaatgtttactgaaaaatatcagtatacgcagggaatacattaagcagaatcctatggctactgagaaattattatcactgttgcctgaatatgtagttccatacatgattcacctgctagcccatgatccagattttacaagatcacaagatgttgatcagcttcgtgatatcaaagagtgcctatggttcatgcttgaagttttaatgacaaagaatgaaaacaatagccatgcctttatgaagaagatggcagagaacatcaagttaaccagagatgcccagtctccagatgaatccaagacaaatgaaaaactgtatacagtatgtgatgtggctctctgtgttataaatagtaaaagtgctttgtgcaatgcagattcaccaaaggacccagtcctcccaatgaaattttttacacaacctgaaaaggacttctgtaacgataagagttatatttcagaagagacaagagtacttctgttaacaggaaagccaaagcctgctggagtactaggtgcagtaaataagcctttatcagcaacgggaaggaaaccctatgttagaagcactggcactgagactggaagcaatattaatgtaaattcagagctgaacccttcaaccggaaatcgatcaagggaacagagttcagaggcagcagaaactggagttagtgaaaatgaagagaaccctgtgaggattatttcagtcacacctgtaaagaatattgacccagtaaagaataaggaaattaattctgatcaggctacccagggcaacatcagcagtgaccgaggaaagaaaagaacagtaacagcagctggtgcagagaatatccaacaaaaaacagatgagaaagtagatgaatcgggacctcccgccccttccaaacccaggagaggacgtcgacccaagtctgaatctcagggcaatgctaccaaaaatgatgatctaaataaacctattaacaagggaaggaagagagctgcagtgggtcaggagagccctgggggtttggaagcaggtaatgccaaagcacccaaactgcaagatttagccaaaaaggcagcaccagcagaaagacaaattgacttacaaaggtaaaaatgcatttgcaaagggagaaaatgaaggccaaacagaagcaggctccagcttctgcaaaaacttggattcacaaatgtccctgaacagaaaatgaagctcacttcagaacacacactctctgccttgaaaactaaagagactattacttccttttcacatgaccacaagtcctctgatggaaatgtacagcagaaactcttgagagagaggctaaaagcaactctgttctcccccttcccctagacttttcttacgaaaagtcaataattaagcaaattgcttaacacttggttccagttcctgcctatctggagtttaaatgcgtaatacaccattaatttccacgctgcagtttttattttaaagaaagtaacaagatgtctttacactgacactgaaaattcatccattttagagccaggaattcccatgttacacaggaaaaaatagaagtctactgaattaattttttaaaagaaaagagatcagattaaatatttctttgtttttccttttggaaacttttatgtataattctttctgcctgcctacttttctgcaaaaatgagatgtacagatttcggttccctgctatgaaaagtgatgtggtagcaattttataaatgttgctttctgatttttatcagagtgagaaaattaaaattattgatttgcaagtagtaaacagttcatattttgatttcccctcattttagtttaatataatttgcaataaatgtacatattgttgtttgtttcataaagcatatcactttaaaatggtttttactcctgtgattatgttggaatatttggaattttaaaggagtaaagactgtccagcatttggttttataatgtttgtcaccagatttttattaatgtaaaaaaaatcaatttttaaaaaatagttggactttggcagcttttaaggaaagttggaggtgttttaggattgctatcaattttcagcattgtgctatttggaaataagtgttttgcttttgtctgatggtctgggctcatttttatgtttattttagaaaactgttgcatcaatatattatgtttcttggcattgttcagcataggtaatgtgtgcactttatgtgtacacataatcatatttaagttttttgcataaaataaatgcttctagatgtcatggcagtctttttaatctttttatcatatgctttcttgtgaattttttcatgttaaagagctaaagtcataacatgattacagtcaactctccattatctatataaaatagtgactaagcctcaggtttttaattttgtgataacaaaataacgaaggcatgtaagacctgattctggaggaacatgaaatttgtcttttctcatgtccagagttctatcctgcccccactgtccactgtagggtcatccgcaaagccctagcagaatgtgctcactccatttccttacacgtttctagcatgggtcagaggaaacaacatttgtgttataacttcgtcttgataggctgtagtgtacatgggatgtaaaacaaacaagtgtatcaaaggtggatgattctgttagagtgaagtttgagagtaaatgtcacttacgtttctcatagataatcaagagttggctgtgtattgactgaaagatgggtaattattttaaatatgcatttacacacatttaggtatcagaagatgcttagggaacaatggataccaatgatagaaaatgatacctttacaggggcagaaaaatccccactcttccttattgcctcttcagaaccctttagaaagtataaaatattgcctccaacatgctgaaaaagagtatctatgcataagtatcagagaagtccctcaagcaatcagtaggtgtgttctatttagagagagtttaaagttctcttagcatcagacaacttgattcctaaggtttccagtgtgtcaccaacaaaaagtgcattgatagggacctttgtctcttcctccctttgattaattgcccggcatcacagtttactagattaccaagtgttacatcatattaaataaaatgtagcagaaccatctgcatcaatatattcctgtttagatttttgcaggagagaagttaaaaggatttgctccttgtatgatgtaagtggcccaccccaattttgtaacatgatgcaagtgtctggcactaagggaagcaagagtagggttgtggaaagaccaagctgatggggagggacttgtttacgggaatttttttagttttccttttcaaaggaaaacattaaaatcccttaggaatttggtattcacatctcagagaactacaacacaaaagtgcagacttatatttgagaattaatgttaaccctttgtgtctagtttgaagcttcttgtatttgtctaaaacaacaagccagaattttgtatctcctttgataaaaagtgtgtataatgtaaagtagttttgcatattcttgtgctgcacatgggctgaatttttaaattttttttaaaaacttgaagcagaaccttgtaatttgtgtaaatgacaagtgtaaaatcctaccataaaatgctaaaaatatgcactgtttcaaataaaaccaagaaatgcagcatt

SEQ ID NO: 50998 - DNA, 5400 bp, Homo sapiens
ctctaatcttgtgtacccgaattacgaaatctgtgcttcatggatgcagacagctggcgaatccagagaaacacatgtcgggccgaattgctggattcagcggtctgtcgtctttattatctagtactgcatagacatgctgccgtcgctccatagacgccttcgcgtagtctctggtcccccacgacctggagtcagtattagagatctgagcttgcgtattctaactcgtatgctaattcggtctccatactgcttgtttcaagctctcaacgaaatgtggaagtgtcagaacatgcttcggagccatgtacgcgaactattggatttgcacaagcagcctacatcagaggctaactgttctgccatgtttggaaaactgatgaccatagcaaagaatttgcctgaccccgggaaagcacaagattttgtgaagaaatttaaccaggttctcggcgatgatgagaaacttcggtctcagttggagttattaattagcccaacctgttcttgcaaacaagcagatatttgtgtgagagaaatagcccggaaacttgcaaatcctaagcaaccaacaaatccttttctagagatggtcaaatttctgttggaaagaatcgcacctgtgcacattgattcagaagccataagtgcactagtgaaattgatgaataagtcaatagaggggacagcagatgatgaagaggagggtgtaagtccagatacagctatccgttcaggacttgaacttcttaaggttctgtcttttacacatcctacctcgttccactctgcagagacatatgagtccttgttacagtgcctaagaatggaggatgacaaggtagcagaagctgctattcaaatttttagaaatacaggtcacaaaatagaaacagaccttccccagatacgatcgaccttaattcccattttacatcaaaaagcaaagaggggtactccacaccaagcaaaacaggctgtgcactgtatacacgccatattcacaaataaagaagtccagcttgcacagatttttgagccactcagtaggagtctgaatgctgatgtgccagaacaacttataactccattagtttcattgggccacatttctatgttagcaccagatcagtttgcttccccaatgaaatctgtagtagcaaattttattgtgaaagatctgctaatgaatgacaggtcaacaggtgaaaagaatggaaaactgtggtctccagatgaagaggtttcccctgaagtactagcaaaggtacaggcaattaaacttctggtaaggtggctgttgggtatgaaaaacaaccagtctaaatctgccaattcaacccttcggttattatcagcgatgttggttagtgagggtgacctgacagagcaaaagaggatcagtaaatctgatatgtctcgcttgcgattagctgctggtagtgccataatgaagcttgctcaggaaccttgttaccatgaaattattaccccagaacagtttcagctctgtgcacttgttattaatgatgagtgttaccaagtaaggcagatatttgctcagaagctgcataaggcacttgtgaagttactgctcccattggagtatatggcgatctttgccttgtgtgccaaagatcctgtgaaggagagaagagcacacgcacgacaatgtttactgaaaaatatcagtatacgcagggaatacattaagcagaatcctatggctactgagaaattattatcactgttgcctgaatatgtagttccatacatgattcacctgctagcccatgatccagattttacaagatcacaagatgttgatcagcttcgtgatatcaaagagtgcctatggttcatgcttgaagttttaatgacaaagaatgaaaacaatagccatgcctttatgaagaagatggcagagaacatcaagttaaccagagatgcccagtctccagatgaatccaagacaaatgaaaaactgtatacagtatgtgatgtggctctctgtgttataaatagtaaaagtgctttgtgcaatgcagattcaccaaaggacccagtcctcccaatgaaattttttacacaacctgaaaaggacttctgtaacgataagagttatatttcagaagagacaagagtacttctgttaacaggaaagccaaagcctgctggagtactaggtgcagtaaataagcctttatcagcaacgggaaggaaaccctatgttagaagcactggcactgagactggaagcaatattaatgtaaattcagagctgaacccttcaaccggaaatcgatcaagggaacagagttcagaggcagcagaaactggagttagtgaaaatgaagagaaccctgtgaggattatttcagtcacacctgtaaagaatattgacccagtaaagaataaggaaattaattctgatcaggctacccagggcaacatcagcagtgaccgaggaaagaaaagaacagtaacagcagctggtgcagagaatatccaacaaaaaacagatgagaaagtagatgaatcgggacctcccgccccttccaaacccaggagaggacgtcgacccaagtctgaatctcagggcaatgctaccaaaaatgatgatctaaataaacctattaacaagggaaggaagagagctgcagtgggtcaggagagccctgggggtttggaagcaggtaatgccaaagcacccaaactgcaagatttagccaaaaaggcagcaccagcagaaagacaaattgacttacaaaggtaaaaatgcatttgcaaagggagaaaatgaaggccaaacagaagcaggctccagcttctgcaaaaacttggattcacaaatgtccctgaacagaaaatgaagctcacttcagaacacacactctctgccttgaaaactaaagagactattacttccttttcacatgaccacaagtcctctgatggaaatgtacagcagaaactcttgagagagaggctaaaagcaactctgttctcccccttcccctagacttttcttacgaaaagtcaataattaagcaaattgcttaacacttggttccagttcctgcctatctggagtttaaatgcgtaatacaccattaatttccacgctgcagtttttattttaaagaaagtaacaagatgtctttacactgacactgaaaattcatccattttagagccaggaattcccatgttacacaggaaaaaatagaagtctactgaattaattttttaaaagaaaagagatcagattaaatatttctttgtttttccttttggaaacttttatgtataattctttctgcctgcctacttttctgcaaaaatgagatgtacagatttcggttccctgctatgaaaagtgatgtggtagcaattttataaatgttgctttctgatttttatcagagtgagaaaattaaaattattgatttgcaagtagtaaacagttcatattttgatttcccctcattttagtttaatataatttgcaataaatgtacatattgttgtttgtttcataaagcatatcactttaaaatggtttttactcctgtgattatgttggaatatttggaattttaaaggagtaaagactgtccagcatttggttttataatgtttgtcaccagatttttattaatgtaaaaaaaatcaatttttaaaaaatagttggactttggcagcttttaaggaaagttggaggtgttttaggattgctatcaattttcagcattgtgctatttggaaataagtgttttgcttttgtctgatggtctgggctcatttttatgtttattttagaaaactgttgcatcaatatattatgtttcttggcattgttcagcataggtaatgtgtgcactttatgtgtacacataatcatatttaagttttttgcataaaataaatgcttctagatgtcatggcagtctttttaatctttttatcatatgctttcttgtgaattttttcatgttaaagagctaaagtcataacatgattacagtcaactctccattatctatataaaatagtgactaagcctcaggtttttaattttgtgataacaaaataacgaaggcatgtaagacctgattctggaggaacatgaaatttgtcttttctcatgtccagagttctatcctgcccccactgtccactgtagggtcatccgcaaagccctagcagaatgtgctcactccatttccttacacgtttctagcatgggtcagaggaaacaacatttgtgttataacttcgtcttgataggctgtagtgtacatgggatgtaaaacaaacaagtgtatcaaaggtggatgattctgttagagtgaagtttgagagtaaatgtcacttacgtttctcatagataatcaagagttggctgtgtattgactgaaagatgggtaattattttaaatatgcatttacacacatttaggtatcagaagatgcttagggaacaatggataccaatgatagaaaatgatacctttacaggggcagaaaaatccccactcttccttattgcctcttcagaaccctttagaaagtataaaatattgcctccaacatgctgaaaaagagtatctatgcataagtatcagagaagtccctcaagcaatcagtaggtgtgttctatttagagagagtttaaagttctcttagcatcagacaacttgattcctaaggtttccagtgtgtcaccaacaaaaagtgcattgatagggacctttgtctcttcctccctttgattaattgcccggcatcacagtttactagattaccaagtgttacatcatattaaataaaatgtagcagaaccatctgcatcaatatattcctgtttagatttttgcaggagagaagttaaaaggatttgctccttgtatgatgtaagtggcccaccccaattttgtaacatgatgcaagtgtctggcactaagggaagcaagagtagggttgtggaaagaccaagctgatggggagggacttgtttacgggaatttttttagttttccttttcaaaggaaaacattaaaatcccttaggaatttggtattcacatctcagagaactacaacacaaaagtgcagacttatatttgagaattaatgttaaccctttgtgtctagtttgaagcttcttgtatttgtctaaaacaacaagccagaattttgtatctcctttgataaaaagtgtgtataatgtaaagtagttttgcatattcttgtgctgcacatgggctgaatttttaaattttttttaaaaacttgaagcagaaccttgtaatttgtgtaaatgacaagtgtaaaatcctaccataaaatgctaaaaatatgcactgtttcaaataaaaccaagaaatgcagcatt

SEQ ID NO: 50999 - DNA, 6599 bp, Homo sapiens
ctgaccgatagaggccggtagaggactgtgaaccaaaagttgtcccccaggatggacttcaccgcgcagcccaagcctgccactgccctctgtggcgtcgtgagtgccgacgggaagatcgcttaccctccgggggtaaaagagatcaccgacaagatcaccacggacgagatgatcaaacgcctgaagatggtagtgaaaacctttatggatatggatcaggactcagaagatgaaaaacagcagtatctcccactagccttgcatcttgcatctgaattcttcctcaggaaccccaataaagatgtgcgtctccttgtagcatgttgtttggctgatatctttcgtatctatgccccagaagctccatatacttcccatgataaacttaaggacatatttttgtttattaccagacaattaaaaggtttggaggatacaaagagtccacagtttaatagatacttttatttattagagaatttagcttgggttaaatcatataacatctgctttgaattggaagattgcaatgaaatttttattcagctttttagaactctcttctcagtgatcaacaatagccacaataagaaggtacaaatgcacatgctagatttgatgagttctatcatcatggaaggtgatggagttactcaagaattattggactccattcttattaacctcattcctgcacataagaacttaaataaacagtcctttgaccttgcaaaagtgctattgaaaagaacagtccagactattgaggcatgcattgccaattttttcaatcaagtcctggtgctgggaagatcatcagtaagtgatttgtcagaacatgtatttgatctgattcaggaactttttgctatagatcctcatttattattatccgtcatgccacagcttgaattcaaactaaagagcaatgatggagaagagcgattagctgttgttcgacttctagctaaattgtttggctccaaagattctgatttggcaacacagaatcgtcctctttggcaatgttttcttggacgatttaatgatattcatgttcctgtgagattagaaagtgtgaaatttgccagtcattgtttaatgaatcacccagatttagcgaaggatctcacagaatatttaaaggttagatcacatgatccagaagaagctattcgtcatgatgtcattgttactataataacagctgccaagagggacctggccttagtaaatgatcagctgcttggctttgtaagggaaagaacactggataaacggtggcgagtaagaaaagaagctatgatgggtctggctcagctttataagaaatactgtcttcatggtgaagcaggaaaggaagctgcagagaaagtcagctggataaaggacaaacttctgcatatttattatcagaacagcattgacgacaaactgttggtagagaaaatctttgctcagtatcttgtcccccacaacctggaaacagaagagagaatgaaatgcttatattacttatatgctagtttggatccaaatgctgtaaaagctctcaacgaaatgtggaagtgtcagaacatgcttcggagccatgtacgcgaactattggatttgcacaagcagcctacatcagaggctaactgttctgccatgtttggaaaactgatgaccatagcaaagaatttgcctgaccccgggaaagcacaagattttgtgaagaaatttaaccaggttctcggcgatgatgagaaacttcggtctcagttggagttattaattagcccaacctgttcttgcaaacaagcagatatttgtgtgagagaaatagcccggaaacttgcaaatcctaagcaaccaacaaatccttttctagagatggtcaaatttctgttggaaagaatcgcacctgtgcacattgattcagaagccataagtgcactagtgaaattgatgaataagtcaatagaggggacagcagatgatgaagaggagggtgtaagtccagatacagctatccgttcaggacttgaacttcttaaggttctgtcttttacacatcctacctcgttccactctgcagagacatatgagtccttgttacagtgcctaagaatggaggatgacaaggtagcagaagctgctattcaaatttttagaaatacaggtcacaaaatagaaacagaccttccccagatacgatcgaccttaattcccattttacatcaaaaagcaaagaggggtactccacaccaagcaaaacaggctgtgcactgtatacacgccatattcacaaataaagaagtccagcttgcacagatttttgagccactcagtaggagtctgaatgctgatgtgccagaacaacttataactccattagtttcattgggccacatttctatgttagcaccagatcagtttgcttccccaatgaaatctgtagtagcaaattttattgtgaaagatctgctaatgaatgacaggtcaacaggtgaaaagaatggaaaactgtggtctccagatgaagaggtttcccctgaagtactagcaaaggtacaggcaattaaacttctggtaaggtggctgttgggtatgaaaaacaaccagtctaaatctgccaattcaacccttcggttattatcagcgatgttggttagtgagggtgacctgacagagcaaaagaggatcagtaaatctgatatgtctcgcttgcgattagctgctggtagtgccataatgaagcttgctcaggaaccttgttaccatgaaattattaccccagaacagtttcagctctgtgcacttgttattaatgatgagtgttaccaagtaaggcagatatttgctcagaagctgcataaggcacttgtgaagttactgctcccattggagtatatggcgatctttgccttgtgtgccaaagatcctgtgaaggagagaagagcacacgcacgacaatgtttactgaaaaatatcagtatacgcagggaatacattaagcagaatcctatggctactgagaaattattatcactgttgcctgaatatgtagttccatacatgattcacctgctagcccatgatccagattttacaagatcacaagatgttgatcagcttcgtgatatcaaagagtgcctatggttcatgcttgaagttttaatgacaaagaatgaaaacaatagccatgcctttatgaagaagatggcagagaacatcaagttaaccagagatgcccagtctccagatgaatccaagacaaatgaaaaactgtatacagtatgtgatgtggctctctgtgttataaatagtaaaagtgctttgtgcaatgcagattcaccaaaggacccagtcctcccaatgaaattttttacacaacctgaaaaggacttctgtaacgataagagttatatttcagaagagacaagagtacttctgttaacaggaaagccaaagcctgctggagtactaggtgcagtaaataagcctttatcagcaacgggaaggaaaccctatgttagaagcactggcactgagactggaagcaatattaatgtaaattcagagctgaacccttcaaccggaaatcgatcaagggaacagagttcagaggcagcagaaactggagttagtgaaaatgaagagaaccctgtgaggattatttcagtcacacctgtaaagaatattgacccagtaaagaataaggaaattaattctgatcaggctacccagggcaacatcagcagtgaccgaggaaagaaaagaacagtaacagcagctggtgcagagaatatccaacaaaaaacagatgagaaagtagatgaatcgggacctcccgccccttccaaacccaggagaggacgtcgacccaagtctgaatctcagggcaatgctaccaaaaatgatgatctaaataaacctattaacaagggaaggaagagagctgcagtgggtcaggagagccctgggggtttggaagcaggtaatgccaaagcacccaaactgcaagatttagccaaaaaggcagcaccagcagaaagacaaattgacttacaaaggtaaaaatgcatttgcaaagggagaaaatgaaggccaaacagaagcaggctccagcttctgcaaaaacttggattcacaaatgtccctgaacagaaaatgaagctcacttcagaacacacactctctgccttgaaaactaaagagactattacttccttttcacatgaccacaagtcctctgatggaaatgtacagcagaaactcttgagagagaggctaaaagcaactctgttctcccccttcccctagacttttcttacgaaaagtcaataattaagcaaattgcttaacacttggttccagttcctgcctatctggagtttaaatgcgtaatacaccattaatttccacgctgcagtttttattttaaagaaagtaacaagatgtctttacactgacactgaaaattcatccattttagagccaggaattcccatgttacacaggaaaaaatagaagtctactgaattaattttttaaaagaaaagagatcagattaaatatttctttgtttttccttttggaaacttttatgtataattctttctgcctgcctacttttctgcaaaaatgagatgtacagatttcggttccctgctatgaaaagtgatgtggtagcaattttataaatgttgctttctgatttttatcagagtgagaaaattaaaattattgatttgcaagtagtaaacagttcatattttgatttcccctcattttagtttaatataatttgcaataaatgtacatattgttgtttgtttcataaagcatatcactttaaaatggtttttactcctgtgattatgttggaatatttggaattttaaaggagtaaagactgtccagcatttggttttataatgtttgtcaccagatttttattaatgtaaaaaaaatcaatttttaaaaaatagttggactttggcagcttttaaggaaagttggaggtgttttaggattgctatcaattttcagcattgtgctatttggaaataagtgttttgcttttgtctgatggtctgggctcatttttatgtttattttagaaaactgttgcatcaatatattatgtttcttggcattgttcagcataggtaatgtgtgcactttatgtgtacacataatcatatttaagttttttgcataaaataaatgcttctagatgtcatggcagtctttttaatctttttatcatatgctttcttgtgaattttttcatgttaaagagctaaagtcataacatgattacagtcaactctccattatctatataaaatagtgactaagcctcaggtttttaattttgtgataacaaaataacgaaggcatgtaagacctgattctggaggaacatgaaatttgtcttttctcatgtccagagttctatcctgcccccactgtccactgtagggtcatccgcaaagccctagcagaatgtgctcactccatttccttacacgtttctagcatgggtcagaggaaacaacatttgtgttataacttcgtcttgataggctgtagtgtacatgggatgtaaaacaaacaagtgtatcaaaggtggatgattctgttagagtgaagtttgagagtaaatgtcacttacgtttctcatagataatcaagagttggctgtgtattgactgaaagatgggtaattattttaaatatgcatttacacacatttaggtatcagaagatgcttagggaacaatggataccaatgatagaaaatgatacctttacaggggcagaaaaatccccactcttccttattgcctcttcagaaccctttagaaagtataaaatattgcctccaacatgctgaaaaagagtatctatgcataagtatcagagaagtccctcaagcaatcagtaggtgtgttctatttagagagagtttaaagttctcttagcatcagacaacttgattcctaaggtttccagtgtgtcaccaacaaaaagtgcattgatagggacctttgtctcttcctccctttgattaattgcccggcatcacagtttactagattaccaagtgttacatcatattaaataaaatgtagcagaaccatctgcatcaatatattcctgtttagatttttgcaggagagaagttaaaaggatttgctccttgtatgatgtaagtggcccaccccaattttgtaacatgatgcaagtgtctggcactaagggaagcaagagtagggttgtggaaagaccaagctgatggggagggacttgtttacgggaatttttttagttttccttttcaaaggaaaacattaaaatcccttaggaatttggtattcacatctcagagaactacaacacaaaagtgcagacttatatttgagaattaatgttaaccctttgtgtctagtttgaagcttcttgtatttgtctaaaacaacaagccagaattttgtatctcctttgataaaaagtgtgtataatgtaaagtagttttgcatattcttgtgctgcacatgggcacacttatggagtgggatcctcaagagtcagctatcaaccgt

SEQ ID NO: 51000 - DNA, 6758 bp, Homo sapiens
ctgaccgatagaggccggtagaggactgtgaaccaaaagttgtcccccaggatggacttcaccgcgcagcccaagcctgccactgccctctgtggcgtcgtgagtgccgacgggaagatcgcttaccctccgggggtaaaagagatcaccgacaagatcaccacggacgagatgatcaaacgcctgaagatggtagtgaaaacctttatggatatggatcaggactcagaagatgaaaaacagcagtatctcccactagccttgcatcttgcatctgaattcttcctcaggaaccccaataaagatgtgcgtctccttgtagcatgttgtttggctgatatctttcgtatctatgccccagaagctccatatacttcccatgataaacttaaggacatatttttgtttattaccagacaattaaaaggtttggaggatacaaagagtccacagtttaatagatacttttatttattagagaatttagcttgggttaaatcatataacatctgctttgaattggaagattgcaatgaaatttttattcagctttttagaactctcttctcagtgatcaacaatagccacaataagaaggtacaaatgcacatgctagatttgatgagttctatcatcatggaaggtgatggagttactcaagaattattggactccattcttattaacctcattcctgcacataagaacttaaataaacagtcctttgaccttgcaaaagtgctattgaaaagaacagtccagactattgaggcatgcattgccaattttttcaatcaagtcctggtgctgggaagatcatcagtaagtgatttgtcagaacatgtatttgatctgattcaggaactttttgctatagatcctcatttattattatccgtcatgccacagcttgaattcaaactaaagagcaatgatggagaagagcgattagctgttgttcgacttctagctaaattgtttggctccaaagattctgatttggcaacacagaatcgtcctctttggcaatgttttcttggacgatttaatgatattcatgttcctgtgagattagaaagtgtgaaatttgccagtcattgtttaatgaatcacccagatttagcgaaggatctcacagaatatttaaaggttagatcacatgatccagaagaagctattcgtcatgatgtcattgttactataataacagctgccaagagggacctggccttagtaaatgatcagctgcttggctttgtaagggaaagaacactggataaacggtggcgagtaagaaaagaagctatgatgggtctggctcagctttataagaaatactgtcttcatggtgaagcaggaaaggaagctgcagagaaagtcagctggataaaggacaaacttctgcatatttattatcagaacagcattgacgacaaactgttggtagagaaaatctttgctcagtatcttgtcccccacaacctggaaacagaagagagaatgaaatgcttatattacttatatgctagtttggatccaaatgctgtaaaagctctcaacgaaatgtggaagtgtcagaacatgcttcggagccatgtacgcgaactattggatttgcacaagcagcctacatcagaggctaactgttctgccatgtttggaaaactgatgaccatagcaaagaatttgcctgaccccgggaaagcacaagattttgtgaagaaatttaaccaggttctcggcgatgatgagaaacttcggtctcagttggagttattaattagcccaacctgttcttgcaaacaagcagatatttgtgtgagagaaatagcccggaaacttgcaaatcctaagcaaccaacaaatccttttctagagatggtcaaatttctgttggaaagaatcgcacctgtgcacattgattcagaagccataagtgcactagtgaaattgatgaataagtcaatagaggggacagcagatgatgaagaggagggtgtaagtccagatacagctatccgttcaggacttgaacttcttaaggttctgtcttttacacatcctacctcgttccactctgcagagacatatgagtccttgttacagtgcctaagaatggaggatgacaaggtagcagaagctgctattcaaatttttagaaatacaggtcacaaaatagaaacagaccttccccagatacgatcgaccttaattcccattttacatcaaaaagcaaagaggggtactccacaccaagcaaaacaggctgtgcactgtatacacgccatattcacaaataaagaagtccagcttgcacagatttttgagccactcagtaggagtctgaatgctgatgtgccagaacaacttataactccattagtttcattgggccacatttctatgttagcaccagatcagtttgcttccccaatgaaatctgtagtagcaaattttattgtgaaagatctgctaatgaatgacaggtcaacaggtgaaaagaatggaaaactgtggtctccagatgaagaggtttcccctgaagtactagcaaaggtacaggcaattaaacttctggtaaggtggctgttgggtatgaaaaacaaccagtctaaatctgccaattcaacccttcggttattatcagcgatgttggttagtgagggtgacctgacagagcaaaagaggatcagtaaatctgatatgtctcgcttgcgattagctgctggtagtgccataatgaagcttgctcaggaaccttgttaccatgaaattattaccccagaacagtttcagctctgtgcacttgttattaatgatgagtgttaccaagtaaggcagatatttgctcagaagctgcataaggcacttgtgaagttactgctcccattggagtatatggcgatctttgccttgtgtgccaaagatcctgtgaaggagagaagagcacacgcacgacaatgtttactgaaaaatatcagtatacgcagggaatacattaagcagaatcctatggctactgagaaattattatcactgttgcctgaatatgtagttccatacatgattcacctgctagcccatgatccagattttacaagatcacaagatgttgatcagcttcgtgatatcaaagagtgcctatggttcatgcttgaagttttaatgacaaagaatgaaaacaatagccatgcctttatgaagaagatggcagagaacatcaagttaaccagagatgcccagtctccagatgaatccaagacaaatgaaaaactgtatacagtatgtgatgtggctctctgtgttataaatagtaaaagtgctttgtgcaatgcagattcaccaaaggacccagtcctcccaatgaaattttttacacaacctgaaaaggacttctgtaacgataagagttatatttcagaagagacaagagtacttctgttaacaggaaagccaaagcctgctggagtactaggtgcagtaaataagcctttatcagcaacgggaaggaaaccctatgttagaagcactggcactgagactggaagcaatattaatgtaaattcagagctgaacccttcaaccggaaatcgatcaagggaacagagttcagaggcagcagaaactggagttagtgaaaatgaagagaaccctgtgaggattatttcagtcacacctgtaaagaatattgacccagtaaagaataaggaaattaattctgatcaggctacccagggcaacatcagcagtgaccgaggaaagaaaagaacagtaacagcagctggtgcagagaatatccaacaaaaaacagatgagaaagtagatgaatcgggacctcccgccccttccaaacccaggagaggacgtcgacccaagtctgaatctcagggcaatgctaccaaaaatgatgatctaaataaacctattaacaagggaaggaagagagctgcagtgggtcaggagagccctgggggtttggaagcaggtaatgccaaagcacccaaactgcaagatttagccaaaaaggcagcaccagcagaaagacaaattgacttacaaaggtaaaaatgcatttgcaaagggagaaaatgaaggccaaacagaagcaggctccagcttctgcaaaaacttggattcacaaatgtccctgaacagaaaatgaagctcacttcagaacacacactctctgccttgaaaactaaagagactattacttccttttcacatgaccacaagtcctctgatggaaatgtacagcagaaactcttgagagagaggctaaaagcaactctgttctcccccttcccctagacttttcttacgaaaagtcaataattaagcaaattgcttaacacttggttccagttcctgcctatctggagtttaaatgcgtaatacaccattaatttccacgctgcagtttttattttaaagaaagtaacaagatgtctttacactgacactgaaaattcatccattttagagccaggaattcccatgttacacaggaaaaaatagaagtctactgaattaattttttaaaagaaaagagatcagattaaatatttctttgtttttccttttggaaacttttatgtataattctttctgcctgcctacttttctgcaaaaatgagatgtacagatttcggttccctgctatgaaaagtgatgtggtagcaattttataaatgttgctttctgatttttatcagagtgagaaaattaaaattattgatttgcaagtagtaaacagttcatattttgatttcccctcattttagtttaatataatttgcaataaatgtacatattgttgtttgtttcataaagcatatcactttaaaatggtttttactcctgtgattatgttggaatatttggaattttaaaggagtaaagactgtccagcatttggttttataatgtttgtcaccagatttttattaatgtaaaaaaaatcaatttttaaaaaatagttggactttggcagcttttaaggaaagttggaggtgttttaggattgctatcaattttcagcattgtgctatttggaaataagtgttttgcttttgtctgatggtctgggctcatttttatgtttattttagaaaactgttgcatcaatatattatgtttcttggcattgttcagcataggtaatgtgtgcactttatgtgtacacataatcatatttaagttttttgcataaaataaatgcttctagatgtcatggcagtctttttaatctttttatcatatgctttcttgtgaattttttcatgttaaagagctaaagtcataacatgattacagtcaactctccattatctatataaaatagtgactaagcctcaggtttttaattttgtgataacaaaataacgaaggcatgtaagacctgattctggaggaacatgaaatttgtcttttctcatgtccagagttctatcctgcccccactgtccactgtagggtcatccgcaaagccctagcagaatgtgctcactccatttccttacacgtttctagcatgggtcagaggaaacaacatttgtgttataacttcgtcttgataggctgtagtgtacatgggatgtaaaacaaacaagtgtatcaaaggtggatgattctgttagagtgaagtttgagagtaaatgtcacttacgtttctcatagataatcaagagttggctgtgtattgactgaaagatgggtaattattttaaatatgcatttacacacatttaggtatcagaagatgcttagggaacaatggataccaatgatagaaaatgatacctttacaggggcagaaaaatccccactcttccttattgcctcttcagaaccctttagaaagtataaaatattgcctccaacatgctgaaaaagagtatctatgcataagtatcagagaagtccctcaagcaatcagtaggtgtgttctatttagagagagtttaaagttctcttagcatcagacaacttgattcctaaggtttccagtgtgtcaccaacaaaaagtgcattgatagggacctttgtctcttcctccctttgattaattgcccggcatcacagtttactagattaccaagtgttacatcatattaaataaaatgtagcagaaccatctgcatcaatatattcctgtttagatttttgcaggagagaagttaaaaggatttgctccttgtatgatgtaagtggcccaccccaattttgtaacatgatgcaagtgtctggcactaagggaagcaagagtagggttgtggaaagaccaagctgatggggagggacttgtttacgggaatttttttagttttccttttcaaaggaaaacattaaaatcccttaggaatttggtattcacatctcagagaactacaacacaaaagtgcagacttatatttgagaattaatgttaaccctttgtgtctagtttgaagcttcttgtatttgtctaaaacaacaagccagaattttgtatctcctttgataaaaagtgtgtataatgtaaagtagttttgcatattcttgtgctgcacatgggctgaatttttaaattttttttaaaaacttgaagcagaaccttgtaatttgtgtaaatgacaagtgtaaaatcctaccataaaatgctaaaaatatgcactgtttcaaataaaaccaagaaatgcagcattatatagtagtgtggagccctgaatattcatgtacccctggtatgtcacaagttgataaaatgtctctgcata

SEQ ID NO: 51001 - DNA, 2819 bp, Homo sapiens
tcccgtgctggtgtcttggcattacctggctgcaaaaatgatgatctaaataaacctattaacaagggaaggaagagagctgcagtgggtcaggagagccctgggggtttggaagcaggtaatgccaaagcacccaaactgcaagatttagccaaaaaggcagcaccagcagaaagacaaattgacttacaaaggtaaaaatgcatttgcaaagggagaaaatgaaggccaaacagaagcaggctccagcttctgcaaaaacttggattcacaaatgtccctgaacagaaaatgaagctcacttcagaacacacactctctgccttgaaaactaaagagactattacttccttttcacatgaccacaagtcctctgatggaaatgtacagcagaaactcttgagagagaggctaaaagcaactctgttctcccccttcccctagacttttcttacgaaaagtcaataattaagcaaattgcttaacacttggttccagttcctgcctatctggagtttaaatgcgtaatacaccattaatttccacgctgcagtttttattttaaagaaagtaacaagatgtctttacactgacactgaaaattcatccattttagagccaggaattcccatgttacacaggaaaaaatagaagtctactgaattaattttttaaaagaaaagagatcagattaaatatttctttgtttttccttttggaaacttttatgtataattctttctgcctgcctacttttctgcaaaaatgagatgtacagatttcggttccctgctatgaaaagtgatgtggtagcaattttataaatgttgctttctgatttttatcagagtgagaaaattaaaattattgatttgcaagtagtaaacagttcatattttgatttcccctcattttagtttaatataatttgcaataaatgtacatattgttgtttgtttcataaagcatatcactttaaaatggtttttactcctgtgattatgttggaatatttggaattttaaaggagtaaagactgtccagcatttggttttataatgtttgtcaccagatttttattaatgtaaaaaaaatcaatttttaaaaaatagttggactttggcagcttttaaggaaagttggaggtgttttaggattgctatcaattttcagcattgtgctatttggaaataagtgttttgcttttgtctgatggtctgggctcatttttatgtttattttagaaaactgttgcatcaatatattatgtttcttggcattgttcagcataggtaatgtgtgcactttatgtgtacacataatcatatttaagttttttgcataaaataaatgcttctagatgtcatggcagtctttttaatctttttatcatatgctttcttgtgaattttttcatgttaaagagctaaagtcataacatgattacagtcaactctccattatctatataaaatagtgactaagcctcaggtttttaattttgtgataacaaaataacgaaggcatgtaagacctgattctggaggaacatgaaatttgtcttttctcatgtccagagttctatcctgcccccactgtccactgtagggtcatccgcaaagccctagcagaatgtgctcactccatttccttacacgtttctagcatgggtcagaggaaacaacatttgtgttataacttcgtcttgataggctgtagtgtacatgggatgtaaaacaaacaagtgtatcaaaggtggatgattctgttagagtgaagtttgagagtaaatgtcacttacgtttctcatagataatcaagagttggctgtgtattgactgaaagatgggtaattattttaaatatgcatttacacacatttaggtatcagaagatgcttagggaacaatggataccaatgatagaaaatgatacctttacaggggcagaaaaatccccactcttccttattgcctcttcagaaccctttagaaagtataaaatattgcctccaacatgctgaaaaagagtatctatgcataagtatcagagaagtccctcaagcaatcagtaggtgtgttctatttagagagagtttaaagttctcttagcatcagacaacttgattcctaaggtttccagtgtgtcaccaacaaaaagtgcattgatagggacctttgtctcttcctccctttgattaattgcccggcatcacagtttactagattaccaagtgttacatcatattaaataaaatgtagcagaaccatctgcatcaatatattcctgtttagatttttgcaggagagaagttaaaaggatttgctccttgtatgatgtaagtggcccaccccaattttgtaacatgatgcaagtgtctggcactaagggaagcaagagtagggttgtggaaagaccaagctgatggggagggacttgtttacgggaatttttttagttttccttttcaaaggaaaacattaaaatcccttaggaatttggtattcacatctcagagaactacaacacaaaagtgcagacttatatttgagaattaatgttaaccctttgtgtctagtttgaagcttcttgtatttgtctaaaacaacaagccagaattttgtatctcctttgataaaaagtgtgtataatgtaaagtagttttgcatattcttgtgctgcacatgggctgaatttttaaattttttttaaaaacttgaagcagaaccttgtaatttgtgtaaatgacaagtgtaaaatcctaccataaaatgctaaaaatatgcactgtttcaaataaaaccaagaaatgcagcatt

SEQ ID NO: 51002 - DNA, 5743 bp, Homo sapiens
ctgaccgatagaggccggtagaggactgtgaaccaaaagttgtcccccaggatggacttcaccgcgcagcccaagcctgccactgccctctgtggcgtcgtgagtgccgacgggaagatcgcttaccctccgggggtaaaagagatcaccgacaagatcaccacggacgagatgatcaaacgcctgaagatggtagtgaaaacctttatggatatggatcaggactcagaagatgaaaaacagcagtatctcccactagccttgcatcttgcatctgaattcttcctcaggaaccccaataaagatgtgcgtctccttgtagcatgttgtttggctgatatctttcgtatctatgccccagaagctccatatacttcccatgataaacttaaggacatatttttgtttattaccagacaattaaaaggtttggaggatacaaagagtccacagtttaatagatacttttatttattagagaatttagcttgggttaaatcatataacatctgctttgaattggaagattgcaatgaaatttttattcagctttttagaactctcttctcagtgatcaacaatagccacaataagaaggtacaaatgcacatgctagatttgatgagttctatcatcatggaaggtgatggagttactcaagaattattggactccattcttattaacctcattcctgcacataagaacttaaataaacagtcctttgaccttgcaaaagtgctattgaaaagaacagtccagactattgaggcatgcattgccaattttttcaatcaagtcctggtgctgggaagatcatcagtaagtgatttgtcagaacatgtatttgatctgattcaggaactttttgctatagatcctcatttattattatccgtcatgccacagcttgaattcaaactaaagagcaatgatggagaagagcgattagctgttgttcgacttctagctaaattgtttggctccaaagattctgatttggcaacacagaatcgtcctctttggcaatgttttcttggacgatttaatgatattcatgttcctgtgagattagaaagtgtgaaatttgccagtcattgtttaatgaatcacccagatttagcgaaggatctcacagaatatttaaaggttagatcacatgatccagaagaagctattcgtcatgatgtcattgttactataataacagctgccaagagggacctggccttagtaaatgatcagctgcttggctttgtaagggaaagaacactggataaacggtggcgagtaagaaaagaagctatgatgggtctggctcagctttataagaaatactgtcttcatggtgaagcaggaaaggaagctgcagagaaagtcagctggataaaggacaaacttctgcatatttattatcagaacagcattgacgacaaactgttggtagagaaaatctttgctcagtatcttgtcccccacaacctggaaacagaagagagaatgaaatgcttatattacttatatgctagtttggatccaaatgctgtaaaagctctcaacgaaatgtggaagtgtcagaacatgcttcggagccatgtacgcgaactattggatttgcacaagcagcctacatcagaggctaactgttctgccatgtttggaaaactgatgaccatagcaaagaatttgcctgaccccgggaaagcacaagattttgtgaagaaatttaaccaggttctcggcgatgatgagaaacttcggtctcagttggagttattaattagcccaacctgttcttgcaaacaagcagatatttgtgtgagagaaatagcccggaaacttgcaaatcctaagcaaccaacaaatccttttctagagatggtcaaatttctgttggaaagaatcgcacctgtgcacattgattcagaagccataagtgcactagtgaaattgatgaataagtcaatagaggggacagcagatgatgaagaggagggtgtaagtccagatacagctatccgttcaggacttgaacttcttaaggttctgtcttttacacatcctacctcgttccactctgcagagacatatgagtccttgttacagtgcctaagaatggaggatgacaaggtagcagaagctgctattcaaatttttagaaatacaggtcacaaaatagaaacagaccttccccagatacgatcgaccttaattcccattttacatcaaaaagcaaagaggggtactccacaccaagcaaaacaggctgtgcactgtatacacgccatattcacaaataaagaagtccagcttgcacagatttttgagccactcagtaggagtctgaatgctgatgtgccagaacaacttataactccattagtttcattgggccacatttctatgttagcaccagatcagtttgcttccccaatgaaatctgtagtagcaaattttattgtgaaagatctgctaatgaatgacaggtcaacaggtgaaaagaatggaaaactgtggtctccagatgaagaggtttcccctgaagtactagcaaaggtacaggcaattaaacttctggtaaggtggctgttgggtatgaaaaacaaccagtctaaatctgccaattcaacccttcggttattatcagcgatgttggttagtgagggtgacctgacagagcaaaagaggatcagtaaatctgatatgtctcgcttgcgattagctgctggtagtgccataatgaagcttgctcaggaaccttgttaccatgaaattattaccccagaacagtttcagctctgtgcacttgttattaatgatgagtgttaccaagtaaggcagatatttgctcagaagctgcataaggcacttgtgaagttactgctcccattggagtatatggcgatctttgccttgtgtgccaaagatcctgtgaaggagagaagagcacacgcacgacaatgtttactgaaaaatatcagtatacgcagggaatacattaagcagaatcctatggctactgagaaattattatcactgttgcctgaatatgtagttccatacatgattcacctgctagcccatgatccagattttacaagatcacaagatgttgatcagcttcgtgatatcaaagagtgcctatggttcatgcttgaagttttaatgacaaagaatgaaaacaatagccatgcctttatgaagaagatggcagagaacatcaagttaaccagagatgcccagtctccagatgaatccaagacaaatgaaaaactgtatacagtatgtgatgtggctctctgtgttataaatagtaaaagtgctttgtgcaatgcagattcaccaaaggacccagtcctcccaatgaaattttttacacaacctgaaaaggacttctgtaacgataagagttatatttcagaagagacaagagtacttctgttaacaggaaagccaaagcctgctggagtactaggtgcagtaaataagcctttatcagcaacgggaaggaaaccctatgttagaagcactggcactgagactggaagcaatattaatgtaaattcagagctgaacccttcaaccggaaatcgatcaagggaacagagttcagaggcagcagaaactggagttagtgaaaatgaagagaaccctgtgaggattatttcagtcacacctgtaaagaatattgacccagtaaagaataaggaaattaattctgatcaggctacccagggcaacatcagcagtgaccgaggaaagaaaagaacagtaacagcagctggtgcagagaatatccaacaaaaaacagatgagaaagtagatgaatcgggacctcccgccccttccaaacccaggagaggacgtcgacccaagtctgaatctcagggcaatgctaccaaaaatgatgatctaaataaacctattaacaagggaaggaagagagctgcagtgggtcaggagagccctgggggtttggaagcaggtaatgccaaagcacccaaactgcaagatttagccaaaaaggcagcaccagcagaaagacaaattgacttacaaaggtaaaaatgcatttgcaaagggagaaaatgaaggccaaacagaagcaggctccagcttctgcaaaaacttggattcacaaatgtccctgaacagaaaatgaagctcacttcagaacacacactctctgccttgaaaactaaagagactattacttccttttcacatgaccacaagtcctctgatggaaatgtacagcagaaactcttgagagagaggctaaaagcaactctgttctcccccttcccctagacttttcttacgaaaagtcaataattaagcaaattgcttaacacttggttccagttcctgcctatctggagtttaaatgcgtaatacaccattaatttccacgctgcagtttttattttaaagaaagtaacaagatgtctttacactgacactgaaaattcatccattttagagccaggaattcccatgttacacaggaaaaaatagaagtctactgaattaattttttaaaagaaaagagatcagattaaatatttctttgtttttccttttggaaacttttatgtataattctttctgcctgcctacttttctgcaaaaatgagatgtacagatttcggttccctgctatgaaaagtgatgtggtagcaattttataaatgttgctttctgatttttatcagagtgagaaaattaaaattattgatttgcaagtagtaaacagttcatattttgatttcccctcattttagtttaatataatttgcaataaatgtacatattgttgtttgtttcataaagcatatcactttaaaatggtttttactcctgtgattatgttggaatatttggaattttaaaggagtaaagactgtccagcatttggttttataatgtttgtcaccagatttttattaatgtaaaaaaaatcaatttttaaaaaatagttggactttggcagcttttaaggaaagttggaggtgttttaggattgctatcaattttcagcattgtgctatttggaaataagtgttttgcttttgtctgatggtctgggctcatttttatgtttattttagaaaactgttgcatcaatatattatgtttcttggcattgttcagcataggtaatgtgtgcactttatgtgtacacataatcatatttaagttttttgcataaaataaatgcttctagatgtcatggcagtctttttaatctttttatcatatgctttcttgtgaattttttcatgttaaagagctaaagtcataacatgattacagtcaactctccattatctatataaaatagtgactaagcctcaggtttttaattttgtgataacaaaataacgaaggcatgtaagacctgattctggaggaacatgaaatttgtcttttctcatgtccagagttctatcctgcccccactgtccactgtagggtcatccgcaaagccctagcagaatgtgctcactccatttccttacacgtttctagcatgggtcagaggaaacaacatttgtgttataacttcgtcttgataggctgtagtgtacatgggatgtaaaacaaacaagtgtatcaaaggtggatgattctgttagagtgaagtttgagagtaaatgtcacttcagagaactttggggttcttaagatactagtaagtcagttcagaattggttttcctaaattatggtggtaaatggca

SEQ ID NO: 51003 - DNA, 2639 bp, Homo sapiens
atcattttcgtttggtttatatcttctccacatcttttctaactttgcgttctattcttaaccctaaggtaaaaatgcatttgcaaagggagaaaatgaaggccaaacagaagcaggctccagcttctgcaaaaacttggattcacaaatgtccctgaacagaaaatgaagctcacttcagaacacacactctctgccttgaaaactaaagagactattacttccttttcacatgaccacaagtcctctgatggaaatgtacagcagaaactcttgagagagaggctaaaagcaactctgttctcccccttcccctagacttttcttacgtggagtttaaatgcgtaatacaccattaatttccacgctgcagtttttattttaaagaaagtaacaagatgtctttacactgacactgaaaattcatccattttagagccaggaattcccatgttacacaggaaaaaatagaagtctactgaattaattttttaaaagaaaagagatcagattaaatatttctttgtttttccttttggaaacttttatgtataattctttctgcctgcctacttttctgcaaaaatgagatgtacagatttcggttccctgctatgaaaagtgatgtggtagcaattttataaatgttgctttctgatttttatcagagtgagaaaattaaaattattgatttgcaagtagtaaacagttcatattttgatttcccctcattttagtttaatataatttgcaataaatgtacatattgttgtttgtttcataaagcatatcactttaaaatggtttttactcctgtgattatgttggaatatttggaattttaaaggagtaaagactgtccagcatttggttttataatgtttgtcaccagatttttattaatgtaaaaaaaatcaatttttaaaaaatagttggactttggcagcttttaaggaaagttggaggtgttttaggattgctatcaattttcagcattgtgctatttggaaataagtgttttgcttttgtctgatggtctgggctcatttttatgtttattttagaaaactgttgcatcaatatattatgtttcttggcattgttcagcataggtaatgtgtgcactttatgtgtacacataatcatatttaagttttttgcataaaataaatgcttctagatgtcatggcagtctttttaatctttttatcatatgctttcttgtgaattttttcatgttaaagagctaaagtcataacatgattacagtcaactctccattatctatataaaatagtgactaagcctcaggtttttaattttgtgataacaaaataacgaaggcatgtaagacctgattctggaggaacatgaaatttgtcttttctcatgtccagagttctatcctgcccccactgtccactgtagggtcatccgcaaagccctagcagaatgtgctcactccatttccttacacgtttctagcatgggtcagaggaaacaacatttgtgttataacttcgtcttgataggctgtagtgtacatgggatgtaaaacaaacaagtgtatcaaaggtggatgattctgttagagtgaagtttgagagtaaatgtcacttacgtttctcatagataatcaagagttggctgtgtattgactgaaagatgggtaattattttaaatatgcatttacacacatttaggtatcagaagatgcttagggaacaatggataccaatgatagaaaatgatacctttacaggggcagaaaaatccccactcttccttattgcctcttcagaaccctttagaaagtataaaatattgcctccaacatgctgaaaaagagtatctatgcataagtatcagagaagtccctcaagcaatcagtaggtgtgttctatttagagagagtttaaagttctcttagcatcagacaacttgattcctaaggtttccagtgtgtcaccaacaaaaagtgcattgatagggacctttgtctcttcctccctttgattaattgcccggcatcacagtttactagattaccaagtgttacatcatattaaataaaatgtagcagaaccatctgcatcaatatattcctgtttagatttttgcaggagagaagttaaaaggatttgctccttgtatgatgtaagtggcccaccccaattttgtaacatgatgcaagtgtctggcactaagggaagcaagagtagggttgtggaaagaccaagctgatggggagggacttgtttacgggaatttttttagttttccttttcaaaggaaaacattaaaatcccttaggaatttggtattcacatctcagagaactacaacacaaaagtgcagacttatatttgagaattaatgttaaccctttgtgtctagtttgaagcttcttgtatttgtctaaaacaacaagccagaattttgtatctcctttgataaaaagtgtgtataatgtaaagtagttttgcatattcttgtgctgcacatgggctgaatttttaaattttttttaaaaacttgaagcagaaccttgtaatttgtgtaaatgacaagtgtaaaatcctaccataaaatgctaaaaatatgcactgtttcaaataaaaccaagaaatgcagcatt

SEQ ID NO: 51004 - DNA, 1195 bp, Homo sapiens
gggattctgcggtgttctagaggatcccatccggtgatgagcatgggtcagaggaaacaacatttgtgttataacttcgtcttgataggctgtagtgtacatgggatgtaaaacaaacaagtgtatcaaaggtggatgattctgttagagtgaagtttgagagtaaatgtcacttacgtttctcatagataatcaagagttggctgtgtattgactgaaagatgggtaattattttaaatatgcatttacacacatttaggtatcagaagatgcttagggaacaatggataccaatgatagaaaatgatacctttacaggggcagaaaaatccccactcttccttattgcctcttcagaaccctttagaaagtataaaatattgcctccaacatgctgaaaaagagtatctatgcataagtatcagagaagtccctcaagcaatcagtaggtgtgttctatttagagagagtttaaagttctcttagcatcagacaacttgattcctaaggtttccagtgtgtcaccaacaaaaagtgcattgatagggacctttgtctcttcctccctttgattaattgcccggcatcacagtttactagattaccaagtgttacatcatattaaataaaatgtagcagaaccatctgcatcaatatattcctgtttagatttttgcaggagagaagttaaaaggatttgctccttgtatgatgtaagtggcccaccccaattttgtaacatgatgcaagtgtctggcactaagggaagcaagagtagggttgtggaaagaccaagctgatggggagggacttgtttacgggaatttttttagttttccttttcaaaggaaaacattaaaatcccttaggaatttggtattcacatctcagagaactacaacacaaaagtgcagacttatatttgagaattaatgttaaccctttgtgtctagtttgaagcttcttgtatttgtctaaaacaacaagccagaattttgtatctcctttgataaaaagtgtgtataatgtaaagtagttttgcatattcttgtgctgcacatgggctgaatttttaaattttttttaaaaacttgaagcagaaccttgtaatttgtgtaaatgacaagtgtaaaatcctaccataaaatgctaaaaatatgcactgtttcaaataaaaccaagaaatgcagcatt

SEQ ID NO: 51005 - DNA, 4918 bp, Homo sapiens
ctgaccgatagaggccggtagaggactgtgaaccaaaagttgtcccccaggatggacttcaccgcgcagcccaagcctgccactgccctctgtggcgtcgtgagtgccgacgggaagatcgcttaccctccgggggtaaaagagatcaccgacaagatcaccacggacgagatgatcaaacgcctgaagatggtagtgaaaacctttatggatatggatcaggactcagaagatgaaaaacagcagtatctcccactagccttgcatcttgcatctgaattcttcctcaggaaccccaataaagatgtgcgtctccttgtagcatgttgtttggctgatatctttcgtatctatgccccagaagctccatatacttcccatgataaacttaaggacatatttttgtttattaccagacaattaaaaggtttggaggatacaaagagtccacagtttaatagatacttttatttattagagaatttagcttgggttaaatcatataacatctgctttgaattggaagattgcaatgaaatttttattcagctttttagaactctcttctcagtgatcaacaatagccacaataagaaggtacaaatgcacatgctagatttgatgagttctatcatcatggaaggtgatggagttactcaagaattattggactccattcttattaacctcattcctgcacataagaacttaaataaacagtcctttgaccttgcaaaagtgctattgaaaagaacagtccagactattgaggcatgcattgccaattttttcaatcaagtcctggtgctgggaagatcatcagtaagtgatttgtcagaacatgtatttgatctgattcaggaactttttgctatagatcctcatttattattatccgtcatgccacagcttgaattcaaactaaagagcaatgatggagaagagcgattagctgttgttcgacttctagctaaattgtttggctccaaagattctgatttggcaacacagaatcgtcctctttggcaatgttttcttggacgatttaatgatattcatgttcctgtgagattagaaagtgtgaaatttgccagtcattgtttaatgaatcacccagatttagcgaaggatctcacagaatatttaaaggttagatcacatgatccagaagaagctattcgtcatgatgtcattgttactataataacagctgccaagagggacctggccttagtaaatgatcagctgcttggctttgtaagggaaagaacactggataaacggtggcgagtaagaaaagaagctatgatgggtctggctcagctttataagaaatactgtcttcatggtgaagcaggaaaggaagctgcagagaaagtcagctggataaaggacaaacttctgcatatttattatcagaacagcattgacgacaaactgttggtagagaaaatctttgctcagtatcttgtcccccacaacctggaaacagaagagagaatgaaatgcttatattacttatatgctagtttggatccaaatgctgtaaaagctctcaacgaaatgtggaagtgtcagaacatgcttcggagccatgtacgcgaactattggatttgcacaagcagcctacatcagaggctaactgttctgccatgtttggaaaactgatgaccatagcaaagaatttgcctgaccccgggaaagcacaagattttgtgaagaaatttaaccaggttctcggcgatgatgagaaacttcggtctcagttggagttattaattagcccaacctgttcttgcaaacaagcagatatttgtgtgagagaaatagcccggaaacttgcaaatcctaagcaaccaacaaatccttttctagagatggtcaaatttctgttggaaagaatcgcacctgtgcacattgattcagaagccataagtgcactagtgaaattgatgaataagtcaatagaggggacagcagatgatgaagaggagggtgtaagtccagatacagctatccgttcaggacttgaacttcttaaggttctgtcttttacacatcctacctcgttccactctgcagagacatatgagtccttgttacagtgcctaagaatggaggatgacaaggtagcagaagctgctattcaaatttttagaaatacaggtcacaaaatagaaacagaccttccccagatacgatcgaccttaattcccattttacatcaaaaagcaaagaggggtactccacaccaagcaaaacaggctgtgcactgtatacacgccatattcacaaataaagaagtccagcttgcacagatttttgagccactcagtaggagtctgaatgctgatgtgccagaacaacttataactccattagtttcattgggccacatttctatgttagcaccagatcagtttgcttccccaatgaaatctgtagtagcaaattttattgtgaaagatctgctaatgaatgacaggtcaacaggtgaaaagaatggaaaactgtggtctccagatgaagaggtttcccctgaagtactagcaaaggtacaggcaattaaacttctggtaaggtggctgttgggtatgaaaaacaaccagtctaaatctgccaattcaacccttcggttattatcagcgatgttggttagtgagggtgacctgacagagcaaaagaggatcagtaaatctgatatgtctcgcttgcgattagctgctggtagtgccataatgaagcttgctcaggaaccttgttaccatgaaattattaccccagaacagtttcagctctgtgcacttgttattaatgatgagtgttaccaagtaaggcagatatttgctcagaagctgcataaggcacttgtgaagttactgctcccattggagtatatggcgatctttgccttgtgtgccaaagatcctgtgaaggagagaagagcacacgcacgacaatgtttactgaaaaatatcagtatacgcagggaatacattaagcagaatcctatggctactgagaaattattatcactgttgcctgaatatgtagttccatacatgattcacctgctagcccatgatccagattttacaagatcacaagatgttgatcagcttcgtgatatcaaagagtgcctatggttcatgcttgaagttttaatgacaaagaatgaaaacaatagccatgcctttatgaagaagatggcagagaacatcaagttaaccagagatgcccagtctccagatgaatccaagacaaatgaaaaactgtatacagtatgtgatgtggctctctgtgttataaatagtaaaagtgctttgtgcaatgcagattcaccaaaggacccagtcctcccaatgaaattttttacacaacctgaaaaggacttctgtaacgataagagttatatttcagaagagacaagagtacttctgttaacaggaaagccaaagcctgctggagtactaggtgcagtaaataagcctttatcagcaacgggaaggaaaccctatgttagaagcactggcactgagactggaagcaatattaatgtaaattcagagctgaacccttcaaccggaaatcgatcaagggaacagagttcagaggcagcagaaactggagttagtgaaaatgaagagaaccctgtgaggattatttcagtcacacctgtaaagaatattgacccagtaaagaataaggaaattaattctgatcaggctacccagggcaacatcagcagtgaccgaggaaagaaaagaacagtaacagcagctggtgcagagaatatccaacaaaaaacagatgagaaagtagatgaatcgggacctcccgccccttccaaacccaggagaggacgtcgacccaagtctgaatctcagggcaatgctaccaaaaatgatgatctaaataaacctattaacaagggaaggaagagagctgcagtgggtcaggagagccctgggggtttggaagcaggtaatgccaaagcacccaaactgcaagatttagccaaaaaggcagcaccagcagaaagacaaattgacttacaaaggtaatgtacgccattcttcctcaagtgggaatttagacattttgttttattcgtagtatattcttagtgccagtcaccccaaacacctaagcatttgagagagaaacctgcatctggttttcctgggtccgtttataatagcatctgttattatctcataacttccagttttaaggcacaaatttgaagaaaaatcttttttctttgtgtaatttttatttaggatatggtattttgatatttctatttttattaacaagacaaatatttcttttgcttagtgcctttcaagtggttgcagaggtttacataaaattaagggctaccttttggatacaaggtcccagaaatggagaaaacagtcacgaaatgtcaataggtaataggtcccactctttaattcttcgtgttatagttaattctaacacaggtcaacaacttacatcttccccaccctgcccagaaaaacaacttaccaaactgttcatctttgatcattcttgtgctgagatttcagacttttcctgttggaaatctagaaggtggctcctttcaccttggccttagaacttaactcatcctccttttttccttacatacctaactcatttacccctgaattagactgtaggcatttgagtttcttctagggaagagtcccagatttgatcagctcaggatacccccactatcctgcttcagtatttttataaaactcaatgtcaggccatgctcagtggctcatgcctgtaatcccaacactttgggaggcctaggtgggtggatcacctgaggtcaggagttcaagaccagcctgaccaacatggtgaaaccccatctctactaaaaaaaaaaaa

SEQ ID NO: 51006 - DNA, 3792 bp, Homo sapiens
ctgaccgatagaggccggtagaggactgtgaaccaaaagttgtcccccaggatggacttcaccgcgcagcccaagcctgccactgccctctgtggcgtcgtgagtgccgacgggaagatcgcttaccctccgggggtaaaagagatcaccgacaagatcaccacggacgagatgatcaaacgcctgaagatggtagtgaaaacctttatggatatggatcaggactcagaagatgaaaaacagcagtatctcccactagccttgcatcttgcatctgaattcttcctcaggaaccccaataaagatgtgcgtctccttgtagcatgttgtttggctgatatctttcgtatctatgccccagaagctccatatacttcccatgataaacttaaggacatatttttgtttattaccagacaattaaaaggtttggaggatacaaagagtccacagtttaatagatacttttatttattagagaatttagcttgggttaaatcatataacatctgctttgaattggaagattgcaatgaaatttttattcagctttttagaactctcttctcagtgatcaacaatagccacaataagaaggtacaaatgcacatgctagatttgatgagttctatcatcatggaaggtgatggagttactcaagaattattggactccattcttattaacctcattcctgcacataagaacttaaataaacagtcctttgaccttgcaaaagtgctattgaaaagaacagtccagactattgaggcatgcattgccaattttttcaatcaagtcctggtgctgggaagatcatcagtaagtgatttgtcagaacatgtatttgatctgattcaggaactttttgctatagatcctcatttattattatccgtcatgccacagcttgaattcaaactaaagagcaatgatggagaagagcgattagctgttgttcgacttctagctaaattgtttggctccaaagattctgatttggcaacacagaatcgtcctctttggcaatgttttcttggacgatttaatgatattcatgttcctgtgagattagaaagtgtgaaatttgccagtcattgtttaatgaatcacccagatttagcgaaggatctcacagaatatttaaaggttagatcacatgatccagaagaagctattcgtcatgatgtcattgttactataataacagctgccaagagggacctggccttagtaaatgatcagctgcttggctttgtaagggaaagaacactggataaacggtggcgagtaagaaaagaagctatgatgggtctggctcagctttataagaaatactgtcttcatggtgaagcaggaaaggaagctgcagagaaagtcagctggataaaggacaaacttctgcatatttattatcagaacagcattgacgacaaactgttggtagagaaaatctttgctcagtatcttgtcccccacaacctggaaacagaagagagaatgaaatgcttatattacttatatgctagtttggatccaaatgctgtaaaagctctcaacgaaatgtggaagtgtcagaacatgcttcggagccatgtacgcgaactattggatttgcacaagcagcctacatcagaggctaactgttctgccatgtttggaaaactgatgaccatagcaaagaatttgcctgaccccgggaaagcacaagattttgtgaagaaatttaaccaggttctcggcgatgatgagaaacttcggtctcagttggagttattaattagcccaacctgttcttgcaaacaagcagatatttgtgtgagagaaatagcccggaaacttgcaaatcctaagcaaccaacaaatccttttctagagatggtcaaatttctgttggaaagaatcgcacctgtgcacattgattcagaagccataagtgcactagtgaaattgatgaataagtcaatagaggggacagcagatgatgaagaggagggtgtaagtccagatacagctatccgttcaggacttgaacttcttaaggttctgtcttttacacatcctacctcgttccactctgcagagacatatgagtccttgttacagtgcctaagaatggaggatgacaaggtagcagaagctgctattcaaatttttagaaatacaggtcacaaaatagaaacagaccttccccagatacgatcgaccttaattcccattttacatcaaaaagcaaagaggggtactccacaccaagcaaaacaggctgtgcactgtatacacgccatattcacaaataaagaagtccagcttgcacagatttttgagccactcagtaggagtctgaatgctgatgtgccagaacaacttataactccattagtttcattgggccacatttctatgttagcaccagatcagtttgcttccccaatgaaatctgtagtagcaaattttattgtgaaagatctgctaatgaatgacaggtcaacaggtgaaaagaatggaaaactgtggtctccagatgaagaggtttcccctgaagtactagcaaaggtacaggcaattaaacttctggtaaggtggctgttgggtatgaaaaacaaccagtctaaatctgccaattcaacccttcggttattatcagcgatgttggttagtgagggtgacctgacagagcaaaagaggatcagtaaatctgatatgtctcgcttgcgattagctgctggtagtgccataatgaagcttgctcaggaaccttgttaccatgaaattattaccccagaacagtttcagctctgtgcacttgttattaatgatgagtgttaccaagtaaggcagatatttgctcagaagctgcataaggcacttgtgaagttactgctcccattggagtatatggcgatctttgccttgtgtgccaaagatcctgtgaaggagagaagagcacacgcacgacaatgtttactgaaaaatatcagtatacgcagggaatacattaagcagaatcctatggctactgagaaattattatcactgttgcctgaatatgtagttccatacatgattcacctgctagcccatgatccagattttacaagatcacaagatgttgatcagcttcgtgatatcaaagagtgcctatggttcatgcttgaagttttaatgacaaagaatgaaaacaatagccatgcctttatgaagaagatggcagagaacatcaagttaaccagagatgcccagtctccagatgaatccaagacaaatgaaaaactgtatacagtatgtgatgtggctctctgtgttataaatagtaaaagtgctttgtgcaatgcagattcaccaaaggacccagtcctcccaatgaaattttttacacaacctgaaaaggacttctgtaacgataagagttatatttcagaagagacaagagtacttctgttaacaggaaagccaaagcctgctggagtactaggtgcagtaaataagcctttatcagcaacgggaaggaaaccctatgttagaagcactggcactgagactggaagcaatattaatgtaaattcagagctgaacccttcaaccggaaatcgatcaagggaacagagttcagaggcagcagaaactggagttagtgaaaatgaagagaaccctgtgaggattatttcagtcacacctgtaaagaatattgacccagtaaagaataagtttaaaaaaggggggaaaaaaaaaaatttttttaaaaaaaattttttttccctttgggggaaaattttcccaaaggggggggcc

SEQ ID NO: 51007 - DNA, 2386 bp, Homo sapiens
ctgaccgatagaggccggtagaggactgtgaaccaaaagttgtcccccaggatggacttcaccgcgcagcccaagcctgccactgccctctgtggcgtcgtgagtgccgacgggaagatcgcttaccctccgggggtaaaagagatcaccgacaagatcaccacggacgagatgatcaaacgcctgaagatggtagtgaaaacctttatggatatggatcaggactcagaagatgaaaaacagcagtatctcccactagccttgcatcttgcatctgaattcttcctcaggaaccccaataaagatgtgcgtctccttgtagcatgttgtttggctgatatctttcgtatctatgccccagaagctccatatacttcccatgataaacttaaggacatatttttgtttattaccagacaattaaaaggtttggaggatacaaagagtccacagtttaatagatacttttatttattagagaatttagcttgggttaaatcatataacatctgctttgaattggaagattgcaatgaaatttttattcagctttttagaactctcttctcagtgatcaacaatagccacaataagaaggtacaaatgcacatgctagatttgatgagttctatcatcatggaaggtgatggagttactcaagaattattggactccattcttattaacctcattcctgcacataagaacttaaataaacagtcctttgaccttgcaaaagtgctattgaaaagaacagtccagactattgaggcatgcattgccaattttttcaatcaagtcctggtgctgggaagatcatcagtaagtgatttgtcagaacatgtatttgatctgattcaggaactttttgctatagatcctcatttattattatccgtcatgccacagcttgaattcaaactaaagagcaatgatggagaagagcgattagctgttgttcgacttctagctaaattgtttggctccaaagattctgatttggcaacacagaatcgtcctctttggcaatgttttcttggacgatttaatgatattcatgttcctgtgagattagaaagtgtgaaatttgccagtcattgtttaatgaatcacccagatttagcgaaggatctcacagaatatttaaaggttagatcacatgatccagaagaagctattcgtcatgatgtcattgttactataataacagctgccaagagggacctggccttagtaaatgatcagctgcttggctttgtaagggaaagaacactggataaacggtggcgagtaagaaaagaagctatgatgggtctggctcagctttataagaaatactgtcttcatggtgaagcaggaaaggaagctgcagagaaagtcagctggataaaggacaaacttctgcatatttattatcagaacagcattgacgacaaactgttggtagagaaaatctttgctcagtatcttgtcccccacaacctggaaacagaagagagaatgaaatgcttatattacttatatgctagtttggatccaaatgctgtaaaagctctcaacgaaatgtggaagtgtcagaacatgcttcggagccatgtacgcgaactattggatttgcacaagcagcctacatcagaggctaactgttctgccatgtttggaaaactgatgaccatagcaaagaatttgcctgaccccgggaaagcacaagattttgtgaagaaatttaaccaggttctcggcgatgatgagaaacttcggtctcagttggagttattaattagcccaacctgttcttgcaaacaagcagatatttgtgtggttagtaaatcatacttcacactttttctctagctttacttacagaaatatgtattttattaaagcctgttttacatacagtgatttgtgtaaatgtaacaatattgtgagctctgaattactttggagtatatctattgtcaagttaattctctatttaccattcactctcagccacattccaggaaaataactaaagaactaagccagggagattggtcttaggaattttacaagataaagtactttgaacttagtagacattcattgagtaatgataagtattttctgaatgcttgtgtacatgtgcattttcttctttcatgtattagaatggaaataatcgtcaataaattagtagtagtaacattgccatatatctggtttcatttacagataaagtaaattcctatctagacttttgtcttcattcttctcttgaactcatttaaaaccaatattcttaaagctatcaggagggaaaacttatgcattcatttattcagctttttttttttttttcctgagatagtcttgcttttgtcacccaggctggagttcagtg

SEQ ID NO: 51008 - DNA, 1317 bp, Homo sapiens
ctgaccgatagaggccggtagaggactgtgaaccaaaagttgtcccccaggatggacttcaccgcgcagcccaagcctgccactgccctctgtggcgtcgtgagtgccgacgggaagatcgcttaccctccgggggtaaaagagatcaccgacaagatcaccacggacgagatgatcaaacgcctgaagatggtagtgaaaacctttatggatatggatcaggactcagaagatgaaaaacagcagtatctcccactagccttgcatcttgcatctgaattcttcctcaggaaccccaataaagatgtgcgtctccttgtagcatgttgtttggctgatatctttcgtatctatgccccagaagctccatatacttcccatgataaacttaaggacatatttttgtttattaccagacaattaaaaggtttggaggatacaaagagtccacagtttaatagatacttttatttattagagaatttagcttgggttaaatcatataacatctgctttgaattggaagattgcaatgaaatttttattcagctttttagaactctcttctcagtgatcaacaatagccacaataagaaggtacaaatgcacatgctagatttgatgagttctatcatcatggaaggtgatggagttactcaagaattattggactccattcttattaacctcattcctgcacataagaacttaaataaacagtcctttgaccttgcaaaagtgctattgaaaagaacagtccagactattgaggcatgcattgccaattttttcaatcaagtcctggtgctgggaagatcatcagtaagtgatttgtcagaacatgtatttgatctgattcaggaactttttgctatagatcctcatttattattatccgtcatgccacagcttgaattcaaactaaagagcaatgatggagaagagcgattagctgttgttcgacttctagctaaattgtttggctccaaagattctgatttggcaacacagaatcgtcctctttggcaatgttttcttggacgatttaatgatattcatgttcctgtgagattagaaagtgtgaaatttgccagtcattgtttaatgaatcacccagatttagcgaaggatctcacaggtaagctagctggtttattacacatattagcataaccatacaactatattgtagatatgacttgtgacctaacttcactttccaagtaggttttaactctggtatggtctcgtgttttcatttgttgtgcactaagaaatgatttcatgttcatgtaataaaattacatttaaaatctc

SEQ ID NO: 51009 - DNA, 599 bp, Homo sapiens
tccgttcaggacttgaacttcttaaggtatttttgaaacagttttgttgccatgtatttccgtggggtcataatttgccttcccttcaggatatgcaagagtcaggcttatttcacaggaaactatttgaaagatttaaaacttgtgttggaaattagatgatgtaaaagtaatgtttttacaacataatataataatgtaattattttacattataaattaatatttgtttcactgtttatcatttccatgccttctatgcttggtagtgattactgtacaatctattcttaacttagtaatagcaagatgtgactttagactttgtggacagggtatgtgactaaatctagaggagggaatatcatcattaaagggagtatttcttggtatatttgtgggattcttgggagactggcatgactagaaaaaaggggtgctttggggaatgatgggagacaaggttggttccagattgtcgagtgccactgggtaagaaaggtagtgtcacgggcttttaacctggcttacaaccagctgcagcccttgatagagctttcattggattgagtaaaagaagggaagaaattgaaggcaaa

SEQ ID NO: 51010 - DNA, 412 bp, Homo sapiens
tcatattttagtgaagcaaaattcatattttattacagatttgaagactacagtattctaatgttactatctcataaattaacatttatttgtaactttccatgtttttattatttttcagaacttaaataaacagtcctttgaccttgcaaaagtgctattgaaaagaacagtccagactattgaggcatgcattgccaatgtatgtatttctttctatgtttattctatattttgtaattcttaatccattgtattaatttattagaacctcttacataaaagtttatttagcttataaatataaaataacttatgtccagatgtgaccagggttagagaaatgcagcataagtttcatgacgtttttaaagggtggatattactataagaaaagtcgtctgcaactccc

SEQ ID NO: 51011 - DNA, 425 bp, Homo sapiens
aatgaagatagtttttgccccgatgcaaggtggagatagtgagtaaagtgaaagcacgatagtagaagaaattataatgagatatagagcctgtggtccgctctgaaagagaaagcctaaagatttatagtttatttttgcttctaaagagtataattttatttgattggatcttttgaatcattttgaataatggattaggccaatcccaagacattcatctaaaggagaattttcttttattgtagtttgtacacaaataataaagttacatactattagtgtgttgtgaaagaaaagtatttgtgtctaaattaatgtgtttttttttttaacaggacatatttttgtttattaccagacaattaaaaggtttggaggatacaaagagtccacagtttaatagatacttttatttattagag

SEQ ID NO: 51012 - DNA, 314 bp, Homo sapiens
ctgaccgatagaggccggtagaggactgtgaaccaaaagttgtcccccaggatggacttcaccgcgcagcccaagcctgccactgccctctgtggcgtcgtgagtgccgacgggaagatcgcttaccctccgggggtaaaagagatcaccgacaagatcaccacggacgagatgatcaaacgcctgaaggggaaaaccaactgccttttcacttgagctgtctagaaaggcccatgtagtgtggaactgaagcctttcaacaacagcaagtgtcaacttagaaccgtaagaatgagttaccttcaaaacacacc

SEQ ID NO: 51013 - DNA, 5795 bp, Homo sapiens
ctgaccgatagaggccggtagaggactgtgaaccaaaagttgtcccccaggatggacttcaccgcgcagcccaagcctgccactgccctctgtggcgtcgtgagtgccgacgggaagatcgcttaccctccgggggtaaaagagatcaccgacaagatcaccacggacgagatgatcaaacgcctgaagatggtagtgaaaacctttatggatatggatcaggactcagaagatgaaaaacagcagtatctcccactagccttgcatcttgcatctgaattcttcctcaggaaccccaataaagatgtgcgtctccttgtagcatgttgtttggctgatatctttcgtatctatgccccagaagctccatatacttcccatgataaacttaagtggcgagtaagaaaagaagctatgatgggtctggctcagctttataagaaatactgtcttcatggtgaagcaggaaaggaagctgcagagaaagtcagctggataaaggacaaacttctgcatatttattatcagaacagcattgacgacaaactgttggtagagaaaatctttgctcagtatcttgtcccccacaacctggaaacagaagagagaatgaaatgcttatattacttatatgctagtttggatccaaatgctgtaaaagctctcaacgaaatgtggaagtgtcagaacatgcttcggagccatgtacgcgaactattggatttgcacaagcagcctacatcagaggctaactgttctgccatgtttggaaaactgatgaccatagcaaagaatttgcctgaccccgggaaagcacaagattttgtgaagaaatttaaccaggttctcggcgatgatgagaaacttcggtctcagttggagttattaattagcccaacctgttcttgcaaacaagcagatatttgtgtgagagaaatagcccggaaacttgcaaatcctaagcaaccaacaaatccttttctagagatggtcaaatttctgttggaaagaatcgcacctgtgcacattgattcagaagccataagtgcactagtgaaattgatgaataagtcaatagaggggacagcagatgatgaagaggagggtgtaagtccagatacagctatccgttcaggacttgaacttcttaaggttctgtcttttacacatcctacctcgttccactctgcagagacatatgagtccttgttacagtgcctaagaatggaggatgacaaggtagcagaagctgctattcaaatttttagaaatacaggtcacaaaatagaaacagaccttccccagatacgatcgaccttaattcccattttacatcaaaaagcaaagaggggtactccacaccaagcaaaacaggctgtgcactgtatacacgccatattcacaaataaagaagtccagcttgcacagatttttgagccactcagtaggagtctgaatgctgatgtgccagaacaacttataactccattagtttcattgggccacatttctatgttagcaccagatcagtttgcttccccaatgaaatctgtagtagcaaattttattgtgaaagatctgctaatgaatgacaggtcaacaggtgaaaagaatggaaaactgtggtctccagatgaagaggtttcccctgaagtactagcaaaggtacaggcaattaaacttctggtaaggtggctgttgggtatgaaaaacaaccagtctaaatctgccaattcaacccttcggttattatcagcgatgttggttagtgagggtgacctgacagagcaaaagaggatcagtaaatctgatatgtctcgcttgcgattagctgctggtagtgccataatgaagcttgctcaggaaccttgttaccatgaaattattaccccagaacagtttcagctctgtgcacttgttattaatgatgagtgttaccaagtaaggcagatatttgctcagaagctgcataaggcacttgtgaagttactgctcccattggagtatatggcgatctttgccttgtgtgccaaagatcctgtgaaggagagaagagcacacgcacgacaatgtttactgaaaaatatcagtatacgcagggaatacattaagcagaatcctatggctactgagaaattattatcactgttgcctgaatatgtagttccatacatgattcacctgctagcccatgatccagattttacaagatcacaagatgttgatcagcttcgtgatatcaaagagtgcctatggttcatgcttgaagttttaatgacaaagaatgaaaacaatagccatgcctttatgaagaagatggcagagaacatcaagttaaccagagatgcccagtctccagatgaatccaagacaaatgaaaaactgtatacagtatgtgatgtggctctctgtgttataaatagtaaaagtgctttgtgcaatgcagattcaccaaaggacccagtcctcccaatgaaattttttacacaacctgaaaaggacttctgtaacgataagagttatatttcagaagagacaagagtacttctgttaacaggaaagccaaagcctgctggagtactaggtgcagtaaataagcctttatcagcaacgggaaggaaaccctatgttagaagcactggcactgagactggaagcaatattaatgtaaattcagagctgaacccttcaaccggaaatcgatcaagggaacagagttcagaggcagcagaaactggagttagtgaaaatgaagagaaccctgtgaggattatttcagtcacacctgtaaagaatattgacccagtaaagaataaggaaattaattctgatcaggctacccagggcaacatcagcagtgaccgaggaaagaaaagaacagtaacagcagctggtgcagagaatatccaacaaaaaacagatgagaaagtagatgaatcgggacctcccgccccttccaaacccaggagaggacgtcgacccaagtctgaatctcagggcaatgctaccaaaaatgatgatctaaataaacctattaacaagggaaggaagagagctgcagtgggtcaggagagccctgggggtttggaagcaggtaatgccaaagcacccaaactgcaagatttagccaaaaaggcagcaccagcagaaagacaaattgacttacaaaggtaaaaatgcatttgcaaagggagaaaatgaaggccaaacagaagcaggctccagcttctgcaaaaacttggattcacaaatgtccctgaacagaaaatgaagctcacttcagaacacacactctctgccttgaaaactaaagagactattacttccttttcacatgaccacaagtcctctgatggaaatgtacagcagaaactcttgagagagaggctaaaagcaactctgttctcccccttcccctagacttttcttacgaaaagtcaataattaagcaaattgcttaacacttggttccagttcctgcctatctggagtttaaatgcgtaatacaccattaatttccacgctgcagtttttattttaaagaaagtaacaagatgtctttacactgacactgaaaattcatccattttagagccaggaattcccatgttacacaggaaaaaatagaagtctactgaattaattttttaaaagaaaagagatcagattaaatatttctttgtttttccttttggaaacttttatgtataattctttctgcctgcctacttttctgcaaaaatgagatgtacagatttcggttccctgctatgaaaagtgatgtggtagcaattttataaatgttgctttctgatttttatcagagtgagaaaattaaaattattgatttgcaagtagtaaacagttcatattttgatttcccctcattttagtttaatataatttgcaataaatgtacatattgttgtttgtttcataaagcatatcactttaaaatggtttttactcctgtgattatgttggaatatttggaattttaaaggagtaaagactgtccagcatttggttttataatgtttgtcaccagatttttattaatgtaaaaaaaatcaatttttaaaaaatagttggactttggcagcttttaaggaaagttggaggtgttttaggattgctatcaattttcagcattgtgctatttggaaataagtgttttgcttttgtctgatggtctgggctcatttttatgtttattttagaaaactgttgcatcaatatattatgtttcttggcattgttcagcataggtaatgtgtgcactttatgtgtacacataatcatatttaagttttttgcataaaataaatgcttctagatgtcatggcagtctttttaatctttttatcatatgctttcttgtgaattttttcatgttaaagagctaaagtcataacatgattacagtcaactctccattatctatataaaatagtgactaagcctcaggtttttaattttgtgataacaaaataacgaaggcatgtaagacctgattctggaggaacatgaaatttgtcttttctcatgtccagagttctatcctgcccccactgtccactgtagggtcatccgcaaagccctagcagaatgtgctcactccatttccttacacgtttctagcatgggtcagaggaaacaacatttgtgttataacttcgtcttgataggctgtagtgtacatgggatgtaaaacaaacaagtgtatcaaaggtggatgattctgttagagtgaagtttgagagtaaatgtcacttacgtttctcatagataatcaagagttggctgtgtattgactgaaagatgggtaattattttaaatatgcatttacacacatttaggtatcagaagatgcttagggaacaatggataccaatgatagaaaatgatacctttacaggggcagaaaaatccccactcttccttattgcctcttcagaaccctttagaaagtataaaatattgcctccaacatgctgaaaaagagtatctatgcataagtatcagagaagtccctcaagcaatcagtaggtgtgttctatttagagagagtttaaagttctcttagcatcagacaacttgattcctaaggtttccagtgtgtcaccaacaaaaagtgcattgatagggacctttgtctcttcctccctttgattaattgcccggcatcacagtttactagattaccaagtgttacatcatattaaataaaatgtagcagaaccatctgcatcaatatattcctgtttagatttttgcaggagagaagttaaaaggatttgctccttgtatgatgtaagtggcccaccccaattttgtaacatgatgcaagtgtctggcactaagggaagcaagagtagggttgtggaaagaccaagctgatggggagggacttgtttacgggaatttttttagttttccttttcaaaggaaaacattaaaatcccttaggaatttggtattcacatctcagagaactacaacacaaaagtgcagacttatatttgagaattaatgttaaccctttgtgtctagtttgaagcttcttgtatttgtctaaaacaacaagccagaattttgtatctcctttgataaaaagtgtgtataatgtaaagtagttttgcatattcttgtgctgcacatgggctgaatttttaaattttttttaaaaacttgaagcagaaccttgtaatttgtgtaaatgacaagtgtaaaatcctaccataaaatgctaaaaatatgcactgtttcaaataaaaccaagaaatgcagcatt

SEQ ID NO: 51014 - DNA, 6650 bp, Homo sapiens
ctgaccgatagaggccggtagaggactgtgaaccaaaagttgtcccccaggatggacttcaccgcgcagcccaagcctgccactgccctctgtggcgtcgtgagtgccgacgggaagatcgcttaccctccgggggtaaaagagatcaccgacaagatcaccacggacgagatgatcaaacgcctgaagatggtagtgaaaacctttatggatatggatcaggactcagaagatgaaaaacagcagtatctcccactagccttgcatcttgcatctgaattcttcctcaggaaccccaataaagatgtgcgtctccttgtagcatgttgtttggctgatatctttcgtatctatgccccagaagctccatatacttcccatgataaacttaaggacatatttttgtttattaccagacaattaaaaggtttggaggatacaaagagtccacagtttaatagatacttttatttattagagaatttagcttgggttaaatcatataacatctgctttgaattggaagattgcaatgaaatttttattcagctttttagaactctcttctcagtgatcaacaatagccacaataagaaggtacaaatgcacatgctagatttgatgagttctatcatcatggaaggtgatggagttactcaagaattattggactccattcttattaacctcattcctgcacataagaacttaaataaacagtcctttgaccttgcaaaagtgctattgaaaagaacagtccagactattgaggcatgcattgccaattttttcaatcaagtcctggtgctgggaagatcatcagtaagtgatttgtcagaacatgtatttgatctgattcaggaactttttgctatagatcctcatttattattatccgtcatgccacagcttgaattcaaactaaagagcaatgatggagaagagcgattagctgttgttcgacttctagctaaattgtttggctccaaagattctgatttggcaacacagaatcgtcctctttggcaatgttttcttggacgatttaatgatattcatgttcctgtgagattagaaagtgtgaaatttgccagtcattgtttaatgaatcacccagatttagcgaaggatctcacagaatatttaaaggttagatcacatgatccagaagaagctattcgtcatgatgtcattgttactataataacagctgccaagagggacctggccttagtaaatgatcagctgcttggctttgtaagggaaagaacactggataaacggtggcgagtaagaaaagaagctatgatgggtctggctcagctttataagaaatactgtcttcatggtgaagcaggaaaggaagctgcagagaaagtcagctggataaaggacaaacttctgcatatttattatcagaacagcattgacgacaaactgttggtagagaaaatctttgctcagtatcttgtcccccacaacctggaaacagaagagagaatgaaatgcttatattacttatatgctagtttggatccaaatgctgtaaaagctctcaacgaaatgtggaagtgtcagaacatgcttcggagccatgtacgcgaactattggatttgcacaagcagcctacatcagaggctaactgttctgccatgtttggaaaactgatgaccatagcaaagaatttgcctgaccccgggaaagcacaagattttgtgaagaaatttaaccaggttctcggcgatgatgagaaacttcggtctcagttggagttattaattagcccaacctgttcttgcaaacaagcagatatttgtgtgagagaaatagcccggaaacttgcaaatcctaagcaaccaacaaatccttttctagagatggtcaaatttctgttggaaagaatcgcacctgtgcacattgattcagaagccataagtgcactagtgaaattgatgaataagtcaatagaggggacagcagatgatgaagaggagggtgtaagtccagatacagctatccgttcaggacttgaacttcttaaggttctgtcttttacacatcctacctcgttccactctgcagagacatatgagtccttgttacagtgcctaagaatggaggatgacaaggtagcagaagctgctattcaaatttttagaaatacaggtcacaaaatagaaacagaccttccccagatacgatcgaccttaattcccattttacatcaaaaagcaaagaggggtactccacaccaagcaaaacaggctgtgcactgtatacacgccatattcacaaataaagaagtccagcttgcacagatttttgagccactcagtaggagtctgaatgctgatgtgccagaacaacttataactccattagtttcattgggccacatttctatgttagcaccagatcagtttgcttccccaatgaaatctgtagtagcaaattttattgtgaaagatctgctaatgaatgacaggtcaacaggtgaaaagaatggaaaactgtggtctccagatgaagaggtttcccctgaagtactagcaaaggtacaggcaattaaacttctggtaaggtggctgttgggtatgaaaaacaaccagtctaaatctgccaattcaacccttcggttattatcagcgatgttggttagtgagggtgacctgacagagcaaaagaggatcagtaaatctgatatgtctcgcttgcgattagctgctggtagtgccataatgaagcttgctcaggaaccttgttaccatgaaattattaccccagaacagtttcagctctgtgcacttgttattaatgatgagtgttaccaagtaaggcagatatttgctcagaagctgcataaggcacttgtgaagttactgctcccattggagtatatggcgatctttgccttgtgtgccaaagatcctgtgaaggagagaagagcacacgcacgacaatgtttactgaaaaatatcagtatacgcagggaatacattaagcagaatcctatggctactgagaaattattatcactgttgcctgaatatgtagttccatacatgattcacctgctagcccatgatccagattttacaagatcacaagatgttgatcagcttcgtgatatcaaagagtgcctatggttcatgcttgaagttttaatgacaaagaatgaaaacaatagccatgcctttatgaagaagatggcagagaacatcaagttaaccagagatgcccagtctccagatgaatccaagacaaatgaaaaactgtatacagtatgtgatgtggctctctgtgttataaatagtaaaagtgctttgtgcaatgcagattcaccaaaggacccagtcctcccaatgaaattttttacacaacctgaaaaggacttctgtaacgataagagttatatttcagaagagacaagagtacttctgttaacaggaaagccaaagcctgctggagtactaggtgcagtaaataagcctttatcagcaacgggaaggaaaccctatgttagaagcactggcactgagactggaagcaatattaatgtaaattcagagctgaacccttcaaccggaaatcgatcaagggaacagagttcagaggcagcagaaactggagttagtgaaaatgaagagaaccctgtgaggattatttcagtcacacctgtaaagaatattgacccagtaaagaataaggaaattaattctgatcaggctacccagggcaacatcagcagtgaccgaggaaagaaaagaacagtaacagcagctggtgcagagaatatccaacaaaaaacagatgagaaagtagatgaatcgggacctcccgccccttccaaacccaggagaggacgtcgacccaagtctgaatctcagggcaatgctaccaaaaatgatgatctaaataaacctattaacaagggaaggaagagagctgcagtgggtcaggagagccctgggggtttggaagcaggtaatgccaaagcacccaaactgcaagatttagccaaaaaggcagcaccagcagaaagacaaattgacttacaaaggtaaaaatgcatttgcaaagggagaaaatgaaggccaaacagaagcaggctccagcttctgcaaaaacttggattcacaaatgtccctgaacagaaaatgaagctcacttcagaacacacactctctgccttgaaaactaaagagactattacttccttttcacatgaccacaagtcctctgatggaaatgtacagcagaaactcttgagagagaggctaaaagcaactctgttctcccccttcccctagacttttcttacgaaaagtcaataattaagcaaattgcttaacacttggttccagttcctgcctatctggagtttaaatgcgtaatacaccattaatttccacgctgcagtttttattttaaagaaagtaacaagatgtctttacactgacactgaaaattcatccattttagagccaggaattcccatgttacacaggaaaaaatagaagtctaaatatttctttgtttttccttttggaaacttttatgtataattctttctgcctgcctacttttctgcaaaaatgagatgtacagatttcggttccctgctatgaaaagtgatgtggtagcaattttataaatgttgctttctgatttttatcagagtgagaaaattaaaattattgatttgcaagtagtaaacagttcatattttgatttcccctcattttagtttaatataatttgcaataaatgtacatattgttgtttgtttcataaagcatatcactttaaaatggtttttactcctgtgattatgttggaatatttggaattttaaaggagtaaagactgtccagcatttggttttataatgtttgtcaccagatttttattaatgtaaaaaaaatcaatttttaaaaaatagttggactttggcagcttttaaggaaagttggaggtgttttaggattgctatcaattttcagcattgtgctatttggaaataagtgttttgcttttgtctgatggtctgggctcatttttatgtttattttagaaaactgttgcatcaatatattatgtttcttggcattgttcagcataggtaatgtgtgcactttatgtgtacacataatcatatttaagttttttgcataaaataaatgcttctagatgtcatggcagtctttttaatctttttatcatatgctttcttgtgaattttttcatgttaaagagctaaagtcataacatgattacagtcaactctccattatctatataaaatagtgactaagcctcaggtttttaattttgtgataacaaaataacgaaggcatgtaagacctgattctggaggaacatgaaatttgtcttttctcatgtccagagttctatcctgcccccactgtccactgtagggtcatccgcaaagccctagcagaatgtgctcactccatttccttacacgtttctagcatgggtcagaggaaacaacatttgtgttataacttcgtcttgataggctgtagtgtacatgggatgtaaaacaaacaagtgtatcaaaggtggatgattctgttagagtgaagtttgagagtaaatgtcacttacgtttctcatagataatcaagagttggctgtgtattgactgaaagatgggtaattattttaaatatgcatttacacacatttaggtatcagaagatgcttagggaacaatggataccaatgatagaaaatgatacctttacaggggcagaaaaatccccactcttccttattgcctcttcagaaccctttagaaagtataaaatattgcctccaacatgctgaaaaagagtatctatgcataagtatcagagaagtccctcaagcaatcagtaggtgtgttctatttagagagagtttaaagttctcttagcatcagacaacttgattcctaaggtttccagtgtgtcaccaacaaaaagtgcattgatagggacctttgtctcttcctccctttgattaattgcccggcatcacagtttactagattaccaagtgttacatcatattaaataaaatgtagcagaaccatctgcatcaatatattcctgtttagatttttgcaggagagaagttaaaaggatttgctccttgtatgatgtaagtggcccaccccaattttgtaacatgatgcaagtgtctggcactaagggaagcaagagtagggttgtggaaagaccaagctgatggggagggacttgtttacgggaatttttttagttttccttttcaaaggaaaacattaaaatcccttaggaatttggtattcacatctcagagaactacaacacaaaagtgcagacttatatttgagaattaatgttaaccctttgtgtctagtttgaagcttcttgtatttgtctaaaacaacaagccagaattttgtatctcctttgataaaaagtgtgtataatgtaaagtagttttgcatattcttgtgctgcacatgggctgaatttttaaattttttttaaaaacttgaagcagaaccttgtaatttgtgtaaatgacaagtgtaaaatcctaccataaaatgctaaaaatatgcactgtttcaaataaaaccaagaaatgcagcatt

SEQ ID NO: 51015 - DNA, 3121 bp, Homo sapiens
accctgctgtacatccaaccggaaatcgatcaagggaacagagttcagaggcagcagaaactggagttagtgaaaatgaagagaaccctgtgaggattatttcagtcacacctgtaaagaatattgacccagtaaagaataaggaaattaattctgatcaggctacccagggcaacatcagcagtgaccgaggaaagaaaagaacagtaacagcagctggtgcagagaatatccaacaaaaaacagatgagaaagtagatgaatcgggacctcccgccccttccaaacccaggagaggacgtcgacccaagtctgaatctcagggcaatgctaccaaaaatgatgatctaaataaacctattaacaagggaaggaagagagctgcagtgggtcaggagagccctgggggtttggaagcaggtaatgccaaagcacccaaactgcaagatttagccaaaaaggcagcaccagcagaaagacaaattgacttacaaaggtaaaaatgcatttgcaaagggagaaaatgaaggccaaacagaagcaggctccagcttctgcaaaaacttggattcacaaatgtccctgaacagaaaatgaagctcacttcagaacacacactctctgccttgaaaactaaagagactattacttccttttcacatgaccacaagtcctctgatggaaatgtacagcagaaactcttgagagagaggctaaaagcaactctgttctcccccttcccctagacttttcttacgaaaagtcaataattaagcaaattgcttaacacttggttccagttcctgcctatctggagtttaaatgcgtaatacaccattaatttccacgctgcagtttttattttaaagaaagtaacaagatgtctttacactgacactgaaaattcatccattttagagccaggaattcccatgttacacaggaaaaaatagaagtctactgaattaattttttaaaagaaaagagatcagattaaatatttctttgtttttccttttggaaacttttatgtataattctttctgcctgcctacttttctgcaaaaatgagatgtacagatttcggttccctgctatgaaaagtgatgtggtagcaattttataaatgttgctttctgatttttatcagagtgagaaaattaaaattattgatttgcaagtagtaaacagttcatattttgatttcccctcattttagtttaatataatttgcaataaatgtacatattgttgtttgtttcataaagcatatcactttaaaatggtttttactcctgtgattatgttggaatatttggaattttaaaggagtaaagactgtccagcatttggttttataatgtttgtcaccagatttttattaatgtaaaaaaaatcaatttttaaaaaatagttggactttggcagcttttaaggaaagttggaggtgttttaggattgctatcaattttcagcattgtgctatttggaaataagtgttttgcttttgtctgatggtctgggctcatttttatgtttattttagaaaactgttgcatcaatatattatgtttcttggcattgttcagcataggtaatgtgtgcactttatgtgtacacataatcatatttaagttttttgcataaaataaatgcttctagatgtcatggcagtctttttaatctttttatcatatgctttcttgtgaattttttcatgttaaagagctaaagtcataacatgattacagtcaactctccattatctatataaaatagtgactaagcctcaggtttttaattttgtgataacaaaataacgaaggcatgtaagacctgattctggaggaacatgaaatttgtcttttctcatgtccagagttctatcctgcccccactgtccactgtagggtcatccgcaaagccctagcagaatgtgctcactccatttccttacacgtttctagcatgggtcagaggaaacaacatttgtgttataacttcgtcttgataggctgtagtgtacatgggatgtaaaacaaacaagtgtatcaaaggtggatgattctgttagagtgaagtttgagagtaaatgtcacttacgtttctcatagataatcaagagttggctgtgtattgactgaaagatgggtaattattttaaatatgcatttacacacatttaggtatcagaagatgcttagggaacaatggataccaatgatagaaaatgatacctttacaggggcagaaaaatccccactcttccttattgcctcttcagaaccctttagaaagtataaaatattgcctccaacatgctgaaaaagagtatctatgcataagtatcagagaagtccctcaagcaatcagtaggtgtgttctatttagagagagtttaaagttctcttagcatcagacaacttgattcctaaggtttccagtgtgtcaccaacaaaaagtgcattgatagggacctttgtctcttcctccctttgattaattgcccggcatcacagtttactagattaccaagtgttacatcatattaaataaaatgtagcagaaccatctgcatcaatatattcctgtttagatttttgcaggagagaagttaaaaggatttgctccttgtatgatgtaagtggcccaccccaattttgtaacatgatgcaagtgtctggcactaagggaagcaagagtagggttgtggaaagaccaagctgatggggagggacttgtttacgggaatttttttagttttccttttcaaaggaaaacattaaaatcccttaggaatttggtattcacatctcagagaactacaacacaaaagtgcagacttatatttgagaattaatgttaaccctttgtgtctagtttgaagcttcttgtatttgtctaaaacaacaagccagaattttgtatctcctttgataaaaagtgtgtataatgtaaagtagttttgcatattcttgtgctgcacatgggctgaatttttaaattttttttaaaaacttgaagcagaaccttgtaatttgtgtaaatgacaagtgtaaaatcctaccataaaatgctaaaaatatgcactgtttcaaataaaaccaagaaatgcagcatt

SEQ ID NO: 51016 - DNA, 5233 bp, Homo sapiens
ctgaccgatagaggccggtagaggactgtgaaccaaaagttgtcccccaggatggacttcaccgcgcagcccaagcctgccactgccctctgtggcgtcgtgagtgccgacgggaagatcgcttaccctccgggggtaaaagagatcaccgacaagatcaccacggacgagatgatcaaacgcctgaagatggtagtgaaaacctttatggatatggatcaggactcagaagatgaaaaacagcagtatctcccactagccttgcatcttgcatctgaattcttcctcaggaaccccaataaagatgtgcgtctccttgtagcatgttgtttggctgatatctttcgtatctatgccccagaagctccatatacttcccatgataaacttaaggacatatttttgtttattaccagacaattaaaaggtttggaggatacaaagagtccacagtttaatagatacttttatttattagagaatttagcttgggttaaatcatataacatctgctttgaattggaagattgcaatgaaatttttattcagctttttagaactctcttctcagtgatcaacaatagccacaataagaaggtacaaatgcacatgctagatttgatgagttctatcatcatggaaggtgatggagttactcaagaattattggactccattcttattaacctcattcctgcacataagaacttaaataaacagtcctttgaccttgcaaaagtgctattgaaaagaacagtccagactattgaggcatgcattgccaattttttcaatcaagtcctggtgctgggaagatcatcagtaagtgatttgtcagaacatgtatttgatctgattcaggaactttttgctatagatcctcatttattattatccgtcatgccacagcttgaattcaaactaaagagcaatgatggagaagagcgattagctgttgttcgacttctagctaaattgtttggctccaaagattctgatttggcaacacagaatcgtcctctttggcaatgttttcttggacgatttaatgatattcatgttcctgtgagattagaaagtgtgaaatttgccagtcattgtttaatgaatcacccagatttagcgaaggatctcacagaatatttaaaggttagatcacatgatccagaagaagctattcgtcatgatgtcattgttactataataacagctgccaagagggacctggccttagtaaatgatcagctgcttggctttgtaagggaaagaacactggataaacggtggcgagtaagaaaagaagctatgatgggtctggctcagctttataagaaatactgtcttcatggtgaagcaggaaaggaagctgcagagaaagtcagctggataaaggacaaacttctgcatatttattatcagaacagcattgacgacaaactgttggtagagaaaatctttgctcagtatcttgtcccccacaacctggaaacagaagagagaatgaaatgcttatattacttatatgctagtttggatccaaatgctgtaaaagctctcaacgaaatgtggaagtgtcagaacatgcttcggagccatgtacgcgaactattggatttgcacaagcagcctacatcagaggctaactgttctgccatgtttggaaaactgatgaccatagcaaagaatttgcctgaccccgggaaagcacaagattttgtgaagaaatttaaccaggttctcggcgatgatgagaaacttcggtctcagttggagttattaattagcccaacctgttcttgcaaacaagcagatatttgtgtgagagaaatagcccggaaacttgcaaatcctaagcaaccaacaaatccttttctagagatggtcaaatttctgttggaaagaatcgcacctgtgcacattgattcagaagccataagtgcactagtgaaattgatgaataagtcaatagaggggacagcagatgatgaagaggagggtgtaagtccagatacagctatccgttcaggacttgaacttcttaaggttctgtcttttacacatcctacctcgttccactctgcagagacatatgagtccttgttacagtgcctaagaatggaggatgacaaggtagcagaagctgctattcaaatttttagaaatacaggtcacaaaatagaaacagaccttccccagatacgatcgaccttaattcccattttacatcaaaaagcaaagaggggtactccacaccaagcaaaacaggctgtgcactgtatacacgccatattcacaaataaagaagtccagcttgcacagatttttgagccactcagtaggagtctgaatgctgatgtgccagaacaacttataactccattagtttcattgggccacatttctatgttagcaccagatcagtttgcttccccaatgaaatctgtagtagcaaattttattgtgaaagatctgctaatgaatgacaggtcaacaggtgaaaagaatggaaaactgtggtctccagatgaagaggtttcccctgaagtactagcaaaggtacaggcaattaaacttctggtaaggtggctgttgggtatgaaaaacaaccagtctaaatctgccaattcaacccttcggttattatcagcgatgttggttagtgagggtgacctgacagagcaaaagaggatcagtaaatctgatatgtctcgcttgcgattagctgctggtagtgccataatgaagcttgctcaggaaccttgttaccatgaaattattaccccagaacagtttcagctctgtgcacttgttattaatgatgagtgttaccaagtaaggcagatatttgctcagaagctgcataaggcacttgtgaagttactgctcccattggagtatatggcgatctttgccttgtgtgccaaagatcctgtgaaggagagaagagcacacgcacgacaatgtttactgaaaaatatcagtatacgcagggaatacattaagcagaatcctatggctactgagaaattattatcactgttgcctgaatatgtagttccatacatgattcacctgctagcccatgatccagattttacaagatcacaagatgttgatcagcttcgtgatatcaaagagtgcctatggttcatgcttgaagttttaatgacaaagaatgaaaacaatagccatgcctttatgaagaagatggcagagaacatcaagttaaccagagatgcccagtctccagatgaatccaagacaaatgaaaaactgtatacagtatgtgatgtggctctctgtgttataaatagtaaaagtgctttgtgcaatgcagattcaccaaaggacccagtcctcccaatgaaattttttacacaacctgaaaaggacttctgtaacgataagagttatatttcagaagagacaagagtacttctgttaacaggaaagccaaagcctgctggagtactaggtgcagtaaataagcctttatcagcaacgggaaggaaaccctatgttagaagcactggcactgagactggaagcaatattaatgtaaattcagagctgaacccttcaaccggaaatcgatcaagggaacagagttcagaggcagcagaaactggagttagtgaaaatgaagagaaccctgtgaggattatttcagtcacacctgtaaagaatattgacccagtaaagaataaggaaattaattctgatcaggctacccagggcaacatcagcagtgaccgaggaaagaaaagaacagtaacagcagctggtgcagagaatatccaacaaaaaacagatgagaaagtagatgaatcgggacctcccgccccttccaaacccaggagaggacgtcgacccaagtctgaatctcagggcaatgctaccaaaaatgatgatctaaataaacctattaacaagggaaggaagagagctgcagtgggtcaggagagccctgggggtttggaagcaggtaatgccaaagcacccaaactgcaagatttagccaaaaaggcagcaccagcagaaagacaaattgacttacaaaggtaaaaatgcatttgcaaagggagaaaatgaaggccaaacagaagcaggctccagcttctgcaaaaacttggattcacaaatgtccctgaacagaaaatgaagctcacttcagaacacacactctctgccttgaaaactaaagagactattacttccttttcacatgaccacaagtcctctgatggaaatgtacagcagaaactcttgagagagaggctaaaagcaactctgttctcccccttcccctagacttttcttacgaaaagtcaataattaagcaaattgcttaacacttggttccagttcctgcctatctggagtttaaatgcgtaatacaccattaatttccacgctgcagtttttattttaaagaaagtaacaagatgtctttacactgacactgaaaattcatccattttagagccaggaattcccatgttacacaggaaaaaatagaagtctactgaattaattttttaaaagaaaagagatcagattaaatatttctttgtttttccttttggaaacttttatgtataattctttctgcctgcctacttttctgcaaaaatgagatgtacagatttcggttccctgctatgaaaagtgatgtggtagcaattttataaatgttgctttctgatttttatcagagtgagaaaattaaaattattgatttgcaagtagtaaacagttcatattttgatttcccctcattttagtttaatataatttgcaataaatgtacatattgttgtttgtttcataaagcatatcactttaaaatggtttttactcctgtgattatgttggaatatttggaattttaaaggagtaaagactgtccagcatttggttttataatgtttgtcaccagatttttattaatgtaaaaaaaatcaatttttaaaaaatagttggactttggcagcttttaaggaaagttggaggtgttttaggattgctatcaattttcagcattgtgctatttggaaataagtgttttgcttttgtctgatggtctgggctcatttttatgtttattttagaaaactgttgcatcaatatattatgtttcttggcattgttcagcataggtaatgtgtgcactttatgtgtacacataatcatatttaagttttttgcataaaataaatgcttctagatgtca

SEQ ID NO: 51017 - DNA, 4475 bp, Homo sapiens
ctgaccgatagaggccggtagaggactgtgaaccaaaagttgtcccccaggatggacttcaccgcgcagcccaagcctgccactgccctctgtggcgtcgtgagtgccgacgggaagatcgcttaccctccgggggtaaaagagatcaccgacaagatcaccacggacgagatgatcaaacgcctgaagatggtagtgaaaacctttatggatatggatcaggactcagaagatgaaaaacagcagtatctcccactagccttgcatcttgcatctgaattcttcctcaggaaccccaataaagatgtgcgtctccttgtagcatgttgtttggctgatatctttcgtatctatgccccagaagctccatatacttcccatgataaacttaaggacatatttttgtttattaccagacaattaaaaggtttggaggatacaaagagtccacagtttaatagatacttttatttattagagaatttagcttgggttaaatcatataacatctgctttgaattggaagattgcaatgaaatttttattcagctttttagaactctcttctcagtgatcaacaatagccacaataagaaggtacaaatgcacatgctagatttgatgagttctatcatcatggaaggtgatggagttactcaagaattattggactccattcttattaacctcattcctgcacataagaacttaaataaacagtcctttgaccttgcaaaagtgctattgaaaagaacagtccagactattgaggcatgcattgccaattttttcaatcaagtcctggtgctgggaagatcatcagtaagtgatttgtcagaacatgtatttgatctgattcaggaactttttgctatagatcctcatttattattatccgtcatgccacagcttgaattcaaactaaagagcaatgatggagaagagcgattagctgttgttcgacttctagctaaattgtttggctccaaagattctgatttggcaacacagaatcgtcctctttggcaatgttttcttggacgatttaatgatattcatgttcctgtgagattagaaagtgtgaaatttgccagtcattgtttaatgaatcacccagatttagcgaaggatctcacagaatatttaaaggttagatcacatgatccagaagaagctattcgtcatgatgtcattgttactataataacagctgccaagagggacctggccttagtaaatgatcagctgcttggctttgtaagggaaagaacactggataaacggtggcgagtaagaaaagaagctatgatgggtctggctcagctttataagaaatactgtcttcatggtgaagcaggaaaggaagctgcagagaaagtcagctggataaaggacaaacttctgcatatttattatcagaacagcattgacgacaaactgttggtagagaaaatctttgctcagtatcttgtcccccacaacctggaaacagaagagagaatgaaatgcttatattacttatatgctagtttggatccaaatgctgtaaaagctctcaacgaaatgtggaagtgtcagaacatgcttcggagccatgtacgcgaactattggatttgcacaagcagcctacatcagaggctaactgttctgccatgtttggaaaactgatgaccatagcaaagaatttgcctgaccccgggaaagcacaagattttgtgaagaaatttaaccaggttctcggcgatgatgagaaacttcggtctcagttggagttattaattagcccaacctgttcttgcaaacaagcagatatttgtgtgagagaaatagcccggaaacttgcaaatcctaagcaaccaacaaatccttttctagagatggtcaaatttctgttggaaagaatcgcacctgtgcacattgattcagaagccataagtgcactagtgaaattgatgaataagtcaatagaggggacagcagatgatgaagaggagggtgtaagtccagatacagctatccgttcaggacttgaacttcttaaggttctgtcttttacacatcctacctcgttccactctgcagagacatatgagtccttgttacagtgcctaagaatggaggatgacaaggtagcagaagctgctattcaaatttttagaaatacaggtcacaaaatagaaacagaccttccccagatacgatcgaccttaattcccattttacatcaaaaagcaaagaggggtactccacaccaagcaaaacaggctgtgcactgtatacacgccatattcacaaataaagaagtccagcttgcacagatttttgagccactcagtaggagtctgaatgctgatgtgccagaacaacttataactccattagtttcattgggccacatttctatgttagcaccagatcagtttgcttccccaatgaaatctgtagtagcaaattttattgtgaaagatctgctaatgaatgacaggtcaacaggtgaaaagaatggaaaactgtggtctccagatgaagaggtttcccctgaagtactagcaaaggtacaggcaattaaacttctggtaaggtggctgttgggtatgaaaaacaaccagtctaaatctgccaattcaacccttcggttattatcagcgatgttggttagtgagggtgacctgacagagcaaaagaggatcagtaaatctgatatgtctcgcttgcgattagctgctggtagtgccataatgaagcttgctcaggaaccttgttaccatgaaattattaccccagaacagtttcagctctgtgcacttgttattaatgatgagtgttaccaagtaaggcagatatttgctcagaagctgcataaggcacttgtgaagttactgctcccattggagtatatggcgatctttgccttgtgtgccaaagatcctgtgaaggagagaagagcacacgcacgacaatgtttactgaaaaatatcagtatacgcagggaatacattaagcagaatcctatggctactgagaaattattatcactgttgcctgaatatgtagttccatacatgattcacctgctagcccatgatccagattttacaagatcacaagatgttgatcagcttcgtgatatcaaagagtgcctatggttcatgcttgaagttttaatgacaaagaatgaaaacaatagccatgcctttatgaagaagatggcagagaacatcaagttaaccagagatgcccagtctccagatgaatccaagacaaatgaaaaactgtatacagtatgtgatgtggctctctgtgttataaatagtaaaagtgctttgtgcaatgcagattcaccaaaggacccagtcctcccaatgaaattttttacacaacctgaaaaggacttctgtaacgataagagttatatttcagaagagacaagagtacttctgttaacaggaaagccaaagcctgctggagtactaggtgcagtaaataagcctttatcagcaacgggaaggaaaccctatgttagaagcactggcactgagactggaagcaatattaatgtaaattcagagctgaacccttcaaccggaaatcgatcaagggaacagagttcagaggcagcagaaactggagttagtgaaaatgaagagaaccctgtgaggattatttcagtcacacctgtaaagaatattgacccagtaaagaataaggaaattaattctgatcaggctacccagggcaacatcagcagtgaccgaggaaagaaaagaacagtaacagcagctggtgcagagaatatccaacaaaaaacagatgagaaagtagatgaatcgggacctcccgccccttccaaacccaggagaggacgtcgacccaagtctgaatctcagggcaatgctaccaaaaatgatgatctaaataaacctattaacaagggaaggaagagagctgcagtgggtcaggagagccctgggggtttggaagcaggtaatgccaaagcacccaaactgcaagatttagccaaaaaggcagcaccagcagaaagacaaattgacttacaaaggtaatgtacgccattcttcctcaagtgggaatttagacattttgttttattcgtagtatattcttagtgccagtcaccccaaacacctaagcatttgagagagaaacctgcatctggttttcctgggtccgtttataatagcatctgttattatctcataacttccagttttaaggcacaaatttgaagaaaaatcttttttctttgtgtaatttttatttaggatatggtattttgatatttctatttttattaacaagacaaatatttcttttgcttagtgcctccctttttcattagtatgaaagtatgtatcttaaagggttgctctacgaattaaatggatcagtaaatataaagaaagcgcctagcaaagtgcctagtacaaaataaacgcccaactgttattgttac

SEQ ID NO: 51018 - DNA, 2777 bp, Homo sapiens
ctgaccgatagaggccggtagaggactgtgaaccaaaagttgtcccccaggatggacttcaccgcgcagcccaagcctgccactgccctctgtggcgtcgtgagtgccgacgggaagatcgcttaccctccgggggtaaaagagatcaccgacaagatcaccacggacgagatgatcaaacgcctgaagatggtagtgaaaacctttatggatatggatcaggactcagaagatgaaaaacagcagtatctcccactagccttgcatcttgcatctgaattcttcctcaggaaccccaataaagatgtgcgtctccttgtagcatgttgtttggctgatatctttcgtatctatgccccagaagctccatatacttcccatgataaacttaaggacatatttttgtttattaccagacaattaaaaggtttggaggatacaaagagtccacagtttaatagatacttttatttattagagaatttagcttgggttaaatcatataacatctgctttgaattggaagattgcaatgaaatttttattcagctttttagaactctcttctcagtgatcaacaatagccacaataagaaggtacaaatgcacatgctagatttgatgagttctatcatcatggaaggtgatggagttactcaagaattattggactccattcttattaacctcattcctgcacataagaacttaaataaacagtcctttgaccttgcaaaagtgctattgaaaagaacagtccagactattgaggcatgcattgccaattttttcaatcaagtcctggtgctgggaagatcatcagtaagtgatttgtcagaacatgtatttgatctgattcaggaactttttgctatagatcctcatttattattatccgtcatgccacagcttgaattcaaactaaagagcaatgatggagaagagcgattagctgttgttcgacttctagctaaattgtttggctccaaagattctgatttggcaacacagaatcgtcctctttggcaatgttttcttggacgatttaatgatattcatgttcctgtgagattagaaagtgtgaaatttgccagtcattgtttaatgaatcacccagatttagcgaaggatctcacagaatatttaaaggttagatcacatgatccagaagaagctattcgtcatgatgtcattgttactataataacagctgccaagagggacctggccttagtaaatgatcagctgcttggctttgtaagggaaagaacactggataaacggtggcgagtaagaaaagaagctatgatgggtctggctcagctttataagaaatactgtcttcatggtgaagcaggaaaggaagctgcagagaaagtcagctggataaaggacaaacttctgcatatttattatcagaacagcattgacgacaaactgttggtagagaaaatctttgctcagtatcttgtcccccacaacctggaaacagaagagagaatgaaatgcttatattacttatatgctagtttggatccaaatgctgtaaaagctctcaacgaaatgtggaagtgtcagaacatgcttcggagccatgtacgcgaactattggatttgcacaagcagcctacatcagaggctaactgttctgccatgtttggaaaactgatgaccatagcaaagaatttgcctgaccccgggaaagcacaagattttgtgaagaaatttaaccaggttctcggcgatgatgagaaacttcggtctcagttggagttattaattagcccaacctgttcttgcaaacaagcagatatttgtgtgagagaaatagcccggaaacttgcaaatcctaagcaaccaacaaatccttttctagagatggtcaaatttctgttggaaagaatcgcacctgtgcacattgattcagaagccataagtgcactagtgaaattgatgaataagtcaatagaggggacagcagatgatgaagaggagggtgtaagtccagatacagctatccgttcaggacttgaacttcttaaggttctgtcttttacacatcctacctcgttccactctgcagagacatatgagtccttgttacagtgcctaagaatggaggatgacaaggtagcagaagctgctattcaaatttttagaaatacaggtcacaaaatagaaacagaccttccccagatacgatcgaccttaattcccattttacatcaaaaagcaaagaggggtactccacaccaagcaaaacaggctgtgcactgtatacacgccatattcacaaataaagaagtccagcttgcacagatttttgagccactcagtaggagtctgaatgctgatgtgccagaacaacttataactccattagtttcattgggccacatttctatgttagcaccagatcagtttgcttccccaatgaaatctgtagtagcaaattttattgtgaaagatctgctaatgaatgacaggtcaacaggtgaacaagaatggaaccactgtggtctccagatgaagagtttccccttaagtactagcaaggtacaggcgaataaattctggtaaagcggctgtggggttgtaaaaaaacgtctaatttggcattaaaccttggttttacagacagtggtgtaggaggggacgaggaaacaagggcacaagaagttggcgggaaacagaggggcaaaaccacctgtggattttttatccctcaattatgtagtctaggagtagcagaaaagaaagacagatgggaacatgag

SEQ ID NO: 51019 - DNA, 287 bp, Homo sapiens
tacagactcaggttatagggtgtgattttctaagtcaatattcagtttcacagccagaatctgtgaagagagaacaaaccatgagaaaactaacaattttatggtgattgagaggatccaagttcctggagttttaaaaaaatcagtttttaaagataaacaaactaaaactagtccaagcactgagacagagtattaaaagatggtagcacacccaaagagcacggtgggtcttgaatagctaacatgtttcaagtagtggaggaagatgtgcttaaatagttacc

SEQ ID NO: 51020 - DNA, 391 bp, Homo sapiens
caaaaggccgaaatctttttttaataaaaacaaaacaaaactctgggccccaagcccctgggctgctgaatggccatggcttcctgtcaggattagccgggctgcctgggcctgtgtgctcggcctttctcctcaggaaatacctttagtaagccccggtggggtccccatggcaacgcacggggggacctgctggcagaggccattcagtctgccattgtcccccggcccctttgttgtgagctttattgccggccctctggcaaacacagcagtttgcaccgttttgtcaggctgaatgtggagtttttacattttaatgggctcttctggcagtggcccatttgcatgcaaaatgtcccctcttactcttttcactttcttcaattta

SEQ ID NO: 51021 - DNA, 204 bp, Homo sapiens
atttaacgtttgttctcaaaaaatggtcattttgaaaagtgaattggcaggtggaagcttttagcccaaaagaaatctgggtttcagcacaataaactgtatttcatcagggaggactaactttgctttttttcacactttatttaaatgtggatattttttcatgatacagaataaaatgtgcattttatggaattaatttga

SEQ ID NO: 51022 - DNA, 554 bp, Homo sapiens
atttggaagaagcccgcaggaggttttattcatttcctggggctgtaataataaagtaccaaaaacagagtggcttaaaacaacaggaatgtattgtctcacagctctggaggatagaagtctgaaattaaggtattttctgggccatacttcctccaaaactcgcaggggagaatccttccttgcctcttcctagcttctgttggtggcacttgatctttggagttccttggcttgcagccacatcactccatgatctgcctctgtcatcacatgatgctctccctgtgtctttttccaaattttcctcttctaaggaccccagtcatgctggattagggtccaccctaattacctgctcttaactaaatacatctgtaaagactatttccaaataaggtcacattcacaggtcatgatttttgcaaaggcacctttaggtctttgttgttctgtgttagtatcttctgcttatgtcctttcgtggccattgttatgggtgaaactatgtcccctgaaaaagacattgaataaaaatctgacatagttggctc

SEQ ID NO: 51023 - DNA, 246 bp, Homo sapiens
aggattttcacagctgttcagagtgagttagcacaggcgttgtgggaatcatgatgcattgggaaaagtctttgctcctaacagcctcagattccacctgctcagtggatggtagtgggcagcactggtgcaggtgaaaggcagttggtgagaccattagcagcctctggggtctcatcctgcaatggactttcccttgccatggagtaccatgggaagaacttggacttggtgccaaagagccag

SEQ ID NO: 51024 - DNA, 1043 bp, Homo sapiens
tctgtcaggagacctgctgccgccccagctgctgtgagaccacctgctgcaggaccacctgctgccgccccagctgttgtgtatccagctgctgcaggccccagtgctgccagtctgtgtgctgccaacccacttgttcccgccccagctgctgtcagaccacctgttgcaggaccacctgctaccgccccagctgttgtgtgtccagctgctgcaggccccagtgctgccagcctgtgtgctgccaacccacctgctgtcgccccagctgctgtgagacgacctgctgccaccctaggtgctgcatctccagctgctgtcgccccagctgctgtgtgtccagctgctgcaagccccagtgctgccagtctgtgtgctgccagcccaactgctgccgccccagctgcagcatctccagctgctgccgcccctcttgctgtgaatccagctgctgccgcccctgctgctgcgtgcgtccagtctgtggccgagtctcctgccacaccacttgctatcgcccaacctgtgtcatctccagctgcccccgccccttgtgctgtgcctcctcttgctgctgagcccactgccctggcttatctcccccttcaccactggcccacagatgtagacccttctactgtgctgaccattaggatacaggaagtggggttgatgtcattcaatagaatggaactcatgtttccaatgagcccatcaccatttcactgactctttgagaacattctgattcattttaaactccctcccttgctttctttttcttccggtggtggcaccaaatgtgaattaatttgtaatccactagctagaaattattccaatcctctaatttcctcattttctttatcactttgaggtacagatcttcttctcagtgaggcagacattatctgcaggaccagttttgtcactgaggttgcaccctcagatccagccgcccagttatattctgtgtttctcctagtgtgaatttcttatgctttgttgcatctctgctttttaataaaatttctgtacataag

SEQ ID NO: 51025 - DNA, 448 bp, Homo sapiens
gggaaattgatgagttgaattcagaagacctggttctaatcctaactgtgctctctaattgccgagcacaccctgagcatgtcctttgacttctcagggcctcacttttcccacctttcaattttatgaattttaaatattccaccaataatttctagcatgatatccattgttaatatccactatctaaccagaccccagatttacgtaagcttgttttaaaatttgggcaggagggttaggtgccctgctgtgccccatagctcatggcacagtgacatcatctgtctattcaaaagcccttttcttagtccatgaaatcatccttggtggcaaatcgaatcatatgaggagttttagaaattcccaacaaccagacggtacctcagaccagtaaaatgagaatctctcagttgggacccaggcattggtcactcttagacccatt

SEQ ID NO: 51026 - DNA, 415 bp, Homo sapiens
gtaaaggccacggaggatgaaatgtaagcagtagccaacaatatcagctaagattttttaaaatgagaattatataaatgaatgtatgtaacaacatgtagtgtgtaatcaataaatgctggcacctcctgagagctgtgacattattttttttgttttggtaaatttgttggtagtgttcttccaaaatatattgtttaatataaagtatgcttgaattaattttattaagagaagaactgcatattattccattcaataactgaaaaacttccaatgagatttgataattatcattactcaaacacagatggactctgtatcgttttgcagcacacactcacctatcagtgatatttgcatccacctcatattaagtctgtatcaaatacttatatatccccaaggtcactca

SEQ ID NO: 51027 - DNA, 421 bp, Homo sapiens
tgtaaattgccattatactgcccaaaacccagaaatcctattctttcatttagcagttaataattaagcacctattgtatcccaagtaccatttcaggtgctgtaaatatagtattgaacaaagcaaagtccctcttcttacgggggattttctattacttactgccatcttacccttgctgatgaatgcctatcataatttaaagaagctagaagacagatttttgtcagtttttttttttatagataggggatctcactatattgcccaggctggtctcaaactcctcagctcaggcagtcctcctgccttggcctcccaaagtgctgggattacaggtgtgagccactgcgcccagcatcaatttttaattttactattttctaagccagttttttaaaaaatgtaagaattaaaaca

SEQ ID NO: 51028 - DNA, 267 bp, Homo sapiens
taggaattatgagaggaaagttgtaaagaattacagtgaaccagaagctaactattcagtaaatgaactaaaaatatagctttttaatttattgagctttcttttttaaatttttatttatacctaaattcagacttaaaaccaaaatagtgctgggagtggtgcctcacacctgtaaccccaacactttgtgaggccgaggtgggtggatcatggggtcaggagattgagaccatcctggctaacacggtgaaaccctgtctctac

SEQ ID NO: 51029 - DNA, 283 bp, Homo sapiens
actcaggagtctgaggcaggggaatcacttgaacctggaggcagagattgcagtaaccggagatcgtgccattgcattccatcctgggcgacagagcgaaactccgtctcaaagaaaaaaataaaaggactatgagtgggagcagatgtagggagatgcaagggacggagtatcaggagaacagtacctgttctgggctctccgctaatcaaacccaaccaccaggcagaggcatgggagacccccacacacagagcagggtggagacaggagaagcgatcgc

SEQ ID NO: 51030 - DNA, 186 bp, Homo sapiens
tttctcttctgataggcagggactcaaaccaaggttcctctgcacctcggaccctgtgatttaccaccaagggtcggagccatcgtcctttgcccaagacaggcaatcagatctcctcggagttttcagatcccctctcctctccatggccttccacaacctcccaacccctgacctgtcacttct

SEQ ID NO: 51031 - DNA, 346 bp, Homo sapiens
tttttcccccacctgcttgacctgagagctggcatttccagggtttgcctcaacccttgccccacccccgccctgccccagagttcttctggatggccccgtttcagtctgaccccaaagaaaaagagcacaagctggatttgagcagtgcatgcaacagccaaggctgagggggccaggaccacagccgctggtggggggtgccactggctccccacacccaatccctggcttggcccagaccaggacagagcagatgggcacagaccacatcattcctctgagaagcagcaggcaggcagccccccactgacggggcaggcccctcgcaggcatgcagcgaggc

SEQ ID NO: 51032 - DNA, 3009 bp, Homo sapiens
ataagaaaaaaaatattttaaaagggtaaccgttaaacagctaggacctgcaacttcagtgcttctgggataactggaacatcagaaggacagattttattacagcataatcacacctcatttctttcatcagcagttgtcaccagacgctgttacttcctaaaatggcggacaatcttcccacagagtttgatgtggttataatagggacaggtttgcccgaatccatccttgcagctgcatgttcaagaagtggtcagagggttctgcatattgattcaagaagctactatggaggaaactgggctagtttcagcttttcaggattgctatcctggttgaaggagtatcagcaaaacaatgacattggggaagaaagtactgttgtatggcaggacctgatccatgaaacagaagaagccatcactcttcgcaagaaggatgaaactattcaacacacagaagcttttccgtacgccagtcaggatatggaggacaacgttgaagagattggtgctctgcagaaaaatccttctttgggggtgtctaataccttcactgaagttctggattctgcattacctgaagaaagccagttatcatattttaatagcgacgaaatgcctgcaaaacacactcagaaaagtgatacagagatttcactagaagtaactgatgtagaggaatcagtggagaaggaaaagtattgtggagataaaacttgtatgcacacagtttcagataaagatggagataaagatgaaagcaaatctacagtagaagataaggccgatgaaccaattagaaataggattacttactctcaaatagttaaagaaggcaggaggtttaatattgatttggtgtcaaaactgctgtattctcaaggattgctaattgatcttttaatcaaatcagatgttagtcgttatgtagaatttaaaaatgtcactaggattcttgcatttcgggaaggaaaggtagaacaagttccttgttccagagcagatgtctttaatagcaaggaactcaccatggttgaaaagaggatgctaatgaaatttctcacattttgtttagagtatgaacaacatcctgatgaataccaagctttcaggcagtgttcattttcagaatacttaaaaactaaaaaactaactcccaaccttcaacattttgtactgcactcaattgcaatgacatcagaatcatcttgcactacaatagatggtcttaacgcaactaaaaacttccttcagtgtctcggacggtttggcaacaccccctttttatttcccttgtatggccaaggagaaattccccagggtttctgtaggatgtgtgcagtttttggtggaatctattgtcttcgtcataaagtacaatgctttgtagtcgacaaagaatctggacgatgtaaagcaattatagatcactttggtcaaagaataaatgctaaatattttattgtggaagacagttacctttctgaggaaacatgctcaaatgtgcagtataagcagatctctagggcagtactcattacagatcagtctatactaaagacagatttagatcagcagacttccattctgatagttcctccagcagagccaggagcttgtgctgtacgggtcacagaattatgttcttcaaccatgacatgcatgaaggacacctatctggtacatttgacatgttcatcttctaaaacagcaagagaagacttagaatcagtggtgaagaaattattcactccgtatactgaaacagaaataaacgaggaagaacttacaaagccaagactcttgtgggctctttattttaatatgagagattcctcgggaatcagcagaagctcgtataatggcttgccttccaatgtttatgtctgctctgggcctgactgtggcctgggaaatgagcatgctgtcaagcaagctgaaacacttttccaggagatctttccaactgaagaattctgccctccacctccaaatccagaagacattatctttgatggtgatgataagcagccagaggctcctggaaccaataatgtagtaatggccaaactagaatcctctgaggaaagcaaaaacctagaaagcccagagaagcaccttcaaaattagaaaagagcaatctcgaaatgctgttttggacctccttcatggcatcagaattttctcatttaaaggacagtttcccatatgagtaattagaagtggttatatatgatgaatgctatgcagatgttgtctttaactctcagacattcagcattgaatatctttgttaacctatcaatgagtgatttattgattattgaacattttgtttagaatgggctatatgacccagaatcttaaaacagagttagctttattttagtattgggtatatatgtaagggttccatattagcaactcagcttaaaggtaatgtatttgctaatgatcttcagattttatctttgtctacagaacaattagtaatacccaagtaatattttaattacttttgcagctgttacagttgctgcggcctgttcgaatagtgaaacatacacaaatggtaaattatgtggatcttttgcatataatataaatgtatagacatggtggtaggaatagcaactaatacaaatgccaatatgataataaaatacatttgtctataatcgtttaacaaaaaaaaaaaaaaaaaaaaaaaaaaaattgtggcggggcgcgcccggggcccggaaaaagttttcaaaaccttggcgtggggggcgcgggggccccatgggtacggggaaccggggccaaggggggacccaaagagaaacccggggccaagagacaacaggcgcggggtttctctcccaatttaaaagaggccggggggggaaaccggaggggtttttggcacaaattccaggaaggggagccggaaggcacatacggggggcctatcacaaggagttccaaggagatcggatatcaatttagccgcgaggggata

SEQ ID NO: 51033 - DNA, 7081 bp, Homo sapiens
ataagaaaaaaaatattttaaaagggtaaccgttaaacagctaggacctgcaacttcagtgcttctgggataactggaacatcagaaggacagattttattacagcataatcacacctcatttctttcatcagcagttgtcaccagacgctgttacttcctaaaatggcggacaatcttcccacagagtttgatgtggttataatagggacaggtttgcccgaatccatccttgcagctgcatgttcaagaagtggtcagagggttctgcatattgattcaagaagctactatggaggaaactgggctagtttcagcttttcaggattgctatcctggttgaaggagtatcagcaaaacaatgacattggggaagaaagtactgttgtatggcaggacctgatccatgaaacagaagaagccatcactcttcgcaagaaggatgaaactattcaacacacagaagcttttccgtacgccagtcaggatatggaggacaacgttgaagagattggtgctctgcagaaaaatccttctttgggggtgtctaataccttcactgaagttctggattctgcattacctgaagaaagccagttatcatattttaatagcgacgaaatgcctgcaaaacacactcagaaaagtgatacagagatttcactagaagtaactgatgtagaggaatcagtggagaaggaaaagtattgtggagataaaacttgtatgcacacagtttcagataaagatggagataaagatgaaagcaaatctacagtagaagataaggccgatgaaccaattagaaataggattacttactctcaaatagttaaagaaggcaggaggtttaatattgatttggtgtcaaaactgctgtattctcaaggattgctaattgatcttttaatcaaatcagatgttagtcgttatgtagaatttaaaaatgtcactaggattcttgcatttcgggaaggaaaggtagaacaagttccttgttccagagcagatgtctttaatagcaaggaactcaccatggttgaaaagaggatgctaatgaaatttctcacattttgtttagagtatgaacaacatcctgatgaataccaagctttcaggcagtgttcattttcagaatacttaaaaactaaaaaactaactcccaaccttcaacattttgtactgcactcaattgcaatgacatcagaatcatcttgcactacaatagatggtcttaacgcaactaaaaacttccttcagtgtctcggacggtttggcaacaccccctttttatttcccttgtatggccaaggagaaattccccagggtttctgtaggatgtgtgcagtttttggtggaatctattgtcttcgtcataaagtacaatgctttgtagtcgacaaagaatctggacgatgtaaagcaattatagatcactttggtcaaagaataaatgctaaatattttattgtggaagacagttacctttctgaggaaacatgctcaaatgtgcagtataagcagatctctagggcagtactcattacagatcagtctatactaaagacagatttagatcagcagacttccattctgatagttcctccagcagagccaggagcttgtgctgtacgggtcacagaattatgttcttcaaccatgacatgcatgaaggacacctatctggtacatttgacatgttcatcttctaaaacagcaagagaagacttagaatcagtggtgaagaaattattcactccgtatactgaaacagaaataaacgaggaagaacttacaaagccaagactcttgtgggctctttattttaatatgagagattcctcgggaatcagcagaagctcgtataatggcttgccttccaatgtttatgtctgctctgggcctgactgtggcctgggaaatgagcatgctgtcaagcaagctgaaacacttttccaggagatctttccaactgaagaattctgccctccacctccaaatccagaagacattatctttgatggtgatgataagcagccagaggctcctggaaccaataatgtagtaatggccaaactagaatcctctgaggaaagcaaaaacctagaaagcccagagaagcaccttcaaaattagaaaagagcaatctcgaaatgctgttttggacctccttcatggcatcagaattttctcatttaaaggacagtttcccatatgagtaattagaagtggttatatatgatgaatgctatgcagatgttgtctttaactctcagacattcagcattgaatatctttgttaacctatcaatgagtgatttattgattattgaacattttgtttagaatgggctatatgacccagaatcttaaaacagagttagctttattttagtattgggtatatatgtaagggttccatattagcaactcagcttaaaggtaatgtatttgctaatgatcttcagattttatctttgtctacagaacaattagtaatacccaagtaatattttaattacttttgcagctgttacagttgctgcggcctgttcgaatagtgaaacatacacaaatggtaaattatgtggatcttttgcatataatataaatgtatagacatggtggtaggaatagcaactaatacaaatgccaatatgataataaaatacatttgtctataatcgtttaaagattagctttgcatgatcctttatgcactgtgaaggtctgaagtttataatactcacttgacccttgtaactgatgaggcaatgatgccaccacagtattctaatttacaaaaagaattggagttcaattagtggttgtaaagctcattttggggaggttgattgcaaaggaaatttgaaagataagatttattcttatttaatacttcagaaaatttctgcagagccctgccctggcacttaaaatagcttccaataagtaacttagaccaaaaggaaaaatgaagtgccccaggagaagatacttcagaagggctgttctgaaattcctaaggaggaattcttaggaattcctaaggagaaacagagtgaggcctttttaacctgagattacagatacttataaaaccctctataaatagattacccaaggtttttcagtgagaatgaaacataccaccttgttggctctaccactttaattaatatcactataacataactgataggaatgaatcaaaggaggatttaccatgccctttcggttgtgtcccacttaacaaattgtgaagtaacaattttctgtaatctctcttgcctcttagctgttatccagagtatagaaactttttttctcccagagccacccaacgtcataaaactggtagtactctaatggtgaaaacctgtggagctgtcagaagacatgaacttgcttttcctctagtccagtttccattcttcagtcagagtatgatgatccctgtgacagtttttgctctgaaatagtatttatcatgtgtttggtacctagtattatgctttctcatgacagtttctcaacaatcctgtgaggcaaattcgcatgtaccctctgtattagtgtgttctcatgctgttgataaagacacacctgagatggtaatttgtaaagaaaaaggtttaatggactcacagttccatgtggctggggaggcctcacaatcatggtggaaggtgaaaggcacgtcttacatggcggtggacaagagagaatgagaactaagtgaaaagggaaacccttttaaaaccatcagatatcgtgagacttatttactaccatgagaacagtatgggggaaacaactccatgattcagttatctcccaccaggttcctcccacaacacgtgggaattataggagctacaattcaagatgagatttgagtgggaacacagccaaaccatatcaccttcaaagaagaaataagagaattattagtaatttgctcagaatctggtatgtggaagagccaacatggggacccagccttttgtgattctaaaacctttgatctttctactaacattcactgttagagagtgtaggcgctgcaggagaaagagaaagtgcccacgaaaattagtctagcattgccgggggtaaaaagcacacactggtcctgcagcttattgaatcagagaaatgtgaagataagatgaactaaacaaacatattttagagcatggatctcgaagcagaatttggctaaattttaacaaaatgttcttcagtaacacatctcatgatctgaagattgtgttacaaaaaatattatcaggccaaaatttgttcggaatacactaatttttgctcctctatatgtgaggaaaatgagactagacagatttaagtaattgacaacttacttaaagtagcaaagtcatggattgtattgacttttaaaaatatagtaaaagtcatatttaaactttatcctaaagtttaaatctaacagaacaactgaaatacttgaaatagacctataaaatagtaattaaaatgagaaatacataagatgataaataaaatgaaggtgaaggtattccagatctaccgaaaagattttcagtatcacagattattcataagaaattgagaaaaggaacaatcagaagttgcaaaagatggtatagccgaatataatggaaataggaaaaattagtcgaaaataaaggttgatttagaaatgaagaaaatgaatatatttcttaatacaaaataagtgggaaatgagaagttataccaataaaaagcatttacaaatttaggggatattgtaacccagtataattttctgacaggttggactttgaccctaatggacttactggtgaactttttcaaatgtttaaataatgtctatccatgtatcatgaaggacagtatgcttcaaattgtcttttgaggcagacatgttctcagtactaaaagacatttttagaaggattttattctcaacagatgcaaaatgcaaaataaaatattgacaaacaatacagcaacaaataatttactatcactcaggattataaggctggtgttaagcagaacagccattaaatcagcatcaaaagaacaaatagtaaaatccaaagtattaattacagataacttttcaaaaattcatcattcacccttgatttaattatttctctggcaattatttaatagacttctcggagtctgttaagtacttaaaccaagaactaccattattcctactgggaaaacataaacatttctcaagtggaaagtaaacagtgttggcactatttttatatatggttaaagagacctgtcattgcaataaaagccagcattcacaaaatgaggaagataaggaaagtagcataaatattttctattaacatggctttacaactgctaaaacttatagtataaaaatgtactaacaaagactaattcaagaagttgcaggatacacaatttttaaaaatctcatttctacatcttagcagtgacaaactgcaatttaaaaagtgtgtttggttattaatatatatgagacttttaaagaaagttatataactacatagagataaattaagaaagatgcctaaatagaagcaagtttaaagagctatatttttaaacatgaacaaactcccatgggagccatgccagtgtagtggaaaagtagtacatggggagatggggagtttttttgaaaaccagaattacagttctcatttcactacttaccagttgtatactcttgggaaagtcactcctagtatctatttcaccatctacagaagagaaatacttcacagaattattgtggggattaagttagataatgtgttttaaaatataaagctacatccaaagaaatgccaatatgtgacattagtatgaaatttactacagttccatttaacattccaactggttgctgtgtggaatatggcataattgtaataaattatttaggaaagcaagcaaagatgtaagtttttttaatttagggggaaaaaatgggagccttgctctccaaatccttaaaacatgctattaagcaacctttctgaatattctgtggtgccaagtagaaagtttaactgaaattaataagccaatggaaagaaagaaatattaataactgctggtggaaagactagctagatgtcagtgtggaaagattagatccactttacatgtgatattccaaatgaattaaaatgttaagtataaaaagaaaaatactacaagtctcacaccaatagtggtataaaggaacttcatggcaattggcaaggtagatcaactaagagaaaaagttttaaatgtgtagtaaataggaaaaagacaaaacaagatggaatttaaaagaagctatttgcattacacatggatgcactcagtttttgtaaaactatatgcatatccataagggtttgtactcttaggcaaatttataaagcgatcgtgtataaatgatataaaaaatcaatttgaatggtattcaaatttcctaatattaaaaatgcaactttgacttagttcatgctattgtattagcaaaactgttttaattgcatgtgtccttatagcagcagcattgtgtattagtagccttttaagagaactgtgtagaagactataaaaagggctttataactgatcttttgacatactcactttgagtggcatatgcccaggaaaatatttaaaagaaagaaaagctatttgtacaaagttttctagcagttccactcagataactttaagggggaaaaaagcccaacgattggaaatggttaagtaaattttggtgtattgctagtgctatcacagaatgttatatagccattcaataatattgatatatgtcaaattgtatgcaaaaaagtgagattcaaaaatgttaataagaacataaattgtgtttactgatacatgtgaaaatttaggtctacattgaaaagaatcagaagataacatgtaattcagtttaacattaggggttctttatttttcttctgttaaatattgatgtatgcaataaaaaataaaagattaattggtaaagtggaaaaaaaaac

SEQ ID NO: 51034 - DNA, 772 bp, Homo sapiens
  misc_feature (83)..(83): n is a, c, g, or t
  misc_feature (136)..(136): n is a, c, g, or t
  misc_feature (138)..(138): n is a, c, g, or t
  misc_feature (143)..(143): n is a, c, g, or t
  misc_feature (148)..(148): n is a, c, g, or t
  misc_feature (150)..(150): n is a, c, g, or t
  misc_feature (156)..(156): n is a, c, g, or t
  misc_feature (160)..(160): n is a, c, g, or t
  misc_feature (164)..(165): n is a, c, g, or t
  misc_feature (169)..(169): n is a, c, g, or t
  misc_feature (175)..(175): n is a, c, g, or t
  misc_feature (177)..(177): n is a, c, g, or t
  misc_feature (181)..(181): n is a, c, g, or t
gggggacaatttcaggcctaggccaggggattcccagagaactcagtcacttagtgctgtttgaagtgcctgcacaggatgantaccgcaatagtggcaactgagactagatgctgatattctgcacctacaggtngngcccncgaangnaaagtngtanatgnnctgngggtgncnggtngatttcttgctttttcttttggactacttgtagagtgcttattatgtcccagccactcgtaattctatcctcacaggaatgaagcataggtacaattattacacctgttttccagatgaggaaactaaaggtttaagtggctaagagaaacctttttgtcctccacctgtgctgctccttctcttcctgtccaggccttcttcccattcagactcactctctcattgacctctcagtttcccttcaccagcatctccccatctgccctcttttgtctgtgtctaccggtgtatcctttgctcaggtcctcatctcttcatatcttggcaactgttgtgacactctccatgccatcatttggactctagaattgttttatctaaacataattgggtcatgtctgtgtgtatgtgtgtgtgcacatgcatgcatgtgtacgtgtgtgtgtgcacgtgtgagggcaaaaagatacctcctaggcctggcgtggtggctcacacctgtaatcctagcactttgggaagcagatcgcttcagcccaggagttcgacgccagcttgggcaacatggtaaaacccaccctgtctctac

SEQ ID NO: 51035 - DNA, 279 bp, Homo sapiens
cctcgctattcatcggcacctggagattttgcagcagaggagacttaagttataccttaagttggctgtttttgaggtggctcttgtgcatggattgagttgacaggcagatagttgagcaatctggagagctttgaatgtctgaatatttcttagcatcttaactaggttagtagctccacggaaatgcaaaagattggtaacattggtgccgatgaatagcgaggtgccgatgaatagcgaggtgccgatgaatagcgaggtgccgatgaatagcga

SEQ ID NO: 51036 - DNA, 825 bp, Homo sapiens
cctcgctattcatcggcacctggagattttgcagcagaggagacttaagttataccttaagttggctgtttttgaggtggctcttgtgcatggattgagttgacaggcagatagttgagcaatctggagagctttgaatgtctgaatatttcttagcatcttaactaggttagtagctccacggaaatgcaaaagattggtaacattggtgcctggtttgttgtcagggttggaactttcttgctttttcttttggactacttgtagagtgcttattatgtcccagccactcgtaattctatcctcacaggaatgaagcataggtacaattattacacctgttttccagatgaggaaactaaaggtttaagtggctaagagaaacctttttgtcctccacctgtgctgctccttctcttcctgtccaggccttcttcccattcagactcactctctcattgacctctcagtttcccttcaccagcatctccccatctgccctcttttgtctgtgtctaccggtgtatcctttgctcaggtcctcatctcttcatatcttggcaactgttgtgacactctccatgccatcatttggactctagaattgttttatctaaacataattgggtcatgtctgtgtgtatgtgtgtgtgcacatgcatgcatgtgtacgtgtgtgtgtgcacgtgtgagggcaaaaagatacctcctaggcctggcgtggtggctcacacctgtaatcctagcactttgggaagcagatcgcttcagcccaggagttcgacgccagcttgggcaacatggtaaaacccaccctgtctctac

SEQ ID NO: 51037 - DNA, 398 bp, Homo sapiens
gactcttggatgatggtcttggaatctcagaagctcacagctggaacaggccttctaagctcaactccttaattttgcaaatggaagactgaggcccagaaagggatggcggctccatggagttttgaattcccacccctcggtcctgagctcttttcccaaagattgtggtggaagctgtgttgatgggtgttctaaccggttcatctgaattcctcgaatgtggattccaatccttcatctcacatgtgccataggtttgcattcgagtatatacaagttatcaattgatgaataagaagttatcccccaacacgtagtggctgtaataaaaccaacaataaccatttataatcttccacagtttctataggtcaggaactggggagcagcttagc

SEQ ID NO: 51038 - DNA, 462 bp, Homo sapiens
ttctttagggcctttgggttgtgtttgtaacatgtatccacaatcagctgtcataataagccgagcatcctgattaattcactgtaccctccagtcgaagtattcacggatgtaactagttgaaatgcggatacacaagttcctactggtcttaaaagaaatgatttttctggtagttttataattttagcaattcagatttcgtacatttgaggttagaaaattcagcagacagcctaaatgcggcatcatgctaatggagtcctggaagctgctggtgttaaaatgagtaaattaaggagtcaacactgcttatttaggcacattaggataaaatagtatgagagctcggacttaacaaaaatcaattcagcacgcagagtgcacatccatcagggctttgttatgatgtcagggcgagcagcaaccctgttttattttatgaagaatgctacattagca

SEQ ID NO: 51039 - DNA, 368 bp, Homo sapiens
cctgggggcccctcaactgcacgttgggtcctgcctttatccagcccacgtcacctgcctaccttcctcccctgctccccagagtggcgcgggttgccacacgggtctgctttgggttggccgggcgtgccagcctcctctgcccctggactgcagaagtgtactgtccatctctttcctggggaatctctgtccagtatatgctttaccatttttgggatactcttgctccccaagactgggccacatgccctcatctgggttctcagaacaccccacactctgcctgccgcccaccaactcgctgggctgtggtggcctctgtcccatgctccacagtgagccctcaggactgagttaagtgcctt

SEQ ID NO: 51040 - DNA, 215 bp, Homo sapiens
ggaacttgatgagatcttttaatgcgggtggttagaataaagataaaaccctggagcagaattaggaaaatgggatcctttggtggccaggagacttgcagagtgtgggaagaggaagggagagagcagggccctccaggagctccctccattgcccaggtctgccctgacttggccaagccactgttttttcatggcatgcaaaggtggcaagt

SEQ ID NO: 51041 - DNA, 655 bp, Homo sapiens
agagctcctccatcaagctcagtgggtggggaatgggacggaaagccatcacttgctcagctcaacgtcatctccccttcgcctgctctacctcagttagaaaggcccaactgggaacacaaagacttctggtttcagggccaagaaaccagcttcccagccagggagcaggaactcacttcagcaagttgtggaaaataatggcaaaagcaatgatgcaaaaatgcctgatgaataccaaggcctcaacttcattaaagaaaggcccatccttcagtccacagatccctccttgcccctgtggccaccacacacccaccagcctttatctcctagagaagcggaacaggaatgaggatctgatgagcaccagcgcttcagtgacaaaacatagtgacttaccaatgtttggggttcttacatcattgaagggaaagggcaagtcacaaaaggaaccatatcaacttatgtaagacatggcacggaacagagaaatttcgcagagaagaacagcaaactcaccacttgctaggattcatgaaacctcccacagttgcagattgccccaaaccatgacatcagggaggctgggaagccacccaacttcctctatttatcaagctggctaaaacccagggtaataccagcgtgaccc

SEQ ID NO: 51042 - DNA, 297 bp, Homo sapiens
tttttctgaaactagtctttgacatcttacgtccagaaatatactgtcctggaatggacttgtagagagaaccagtatctgtgaggctaccagaaaacagctgatgggaagggctaatgttttctgagacgatccccagaatgtgtactttcacccgcacccataacagtgctttccagaggtgtctcctgctcggaagtttctctcacagcttatcttaaaaagccctttattgctgtttttattttaaaacaactatttattttagacttgcttctaaaacaaagagaattgatt

SEQ ID NO: 51043 - DNA, 486 bp, Homo sapiens
taaaaaataataatcttctcaagatacaaataacataacctaatactccctcaaagcagcaacaacagcaaaacagcagctctctgcaaagaagttctttggaaaagttccttcctatctccacattctgtcttctttgggcaccttgttctagccaaaaggtagaagagttgtagagatggttcttaatcatttccttcatgaattctttatttgagtgaatctgtgtatattatttttatcattaatatctatcatattgatggctcattcaaaactgaagacagtccattttaacataatttataatagagatggtgatatggtttggctgtgtcctgacccaaatctcatcttaaattgtagttcccatactccccatgtgtcgtggggaggggacccagtgggaggtgattgaatcatggggggcggttaccctcgtgctgttctcatgatagtgagtgagttctcacaagacctgatggc

SEQ ID NO: 51044 - DNA, 501 bp, Homo sapiens
taatgaggtggcttagggtggcatctctagatagcttcagggtagaggctggttaccagaaagaccaaacagttgattagagggtggagcttttagccctattccccccacctcccttgtcctgtgccccactcccgccccttcccttgtcctgtgccctactcccgccccttcccttgtcctgtgcctcttcctctggctgtttctgagtttaggcctccataataaatgggcaatcattaagtaaaaccctttcctgagttctatgaaaagttgtagagaattatggaacctgagaggggcctgtgggaacccgtgaatttgtagtctactggccactggtgtccgaagtgtgggcagtcttgtgggactgagcccttgacctgtgggatctgtgttaagacactctgcatggttattgtcagaaatgagttgtattgttgggcacctgttggtacctgttggattggtgtgaagagacaccatgcatttgatgttaga

SEQ ID NO: 51045 - DNA, 184 bp, Homo sapiens
gaggaaggagaacggtttttatgttaaaaacagataagtccagccacagaaaaggttaacagtcaaatggaccaaaaggactaggtgacaagtatgttctggatgaagatgagagtttgtttccatgaaaaatcgtcctacagggaaaatgctctccagggcagatatgttccctttgcatggc

SEQ ID NO: 51046 - DNA, 550 bp, Homo sapiens
tcatgactacacagttaagggtcgtccatctgcttccccttctcctagcctgctttgtgcaaacaagtcccaagcaggagaagatgaagatggattgccacaaagacgagaaaggcaccatctatgactatgaggccatcgcacttaataagaatgaatatgtttccttcaagcagtatgtgggcaagcacatcctcttcgtcaacgtggccacctactgtggtctgacagcgcaatatcctggtatgtccgtccagggggaggatttgtacctagtttccagctttttgagaaaggggatgtgaatggtgaaaaagaacagaaagtcttcagtttcttgaagcactcctgtcctcatccctctgagattttgggcacattcaaatctatatcctgggaccctgtaaaggtccatgacatccgttggaactttgaaaagttcctggtggggcctgatggaatccctgtcatgcgctggtcccaccgggctacggtcagctcagtcaagacagacatcctggcgtacttgaagcaattcaaaaccaaatag

SEQ ID NO: 51047 - DNA, 668 bp, Homo sapiens
tcatgactacacagttaagggtcgtccatctgcttccccttctcctagcctgctttgtgcaaacaagtcccaagcaggagaagatgaagatggattgccacaaagacgagaaaggcaccatctatgactatgaggccatcgcacttaataagaatgaatatgtttccttcaagcagtatgtgggcaagcacatcctcttcgtcaacgtggccacctactgtggtctgacagcgcaatatcctgaactaaatgcactccaggaggagctgaagccctatggtctagttgtgttgggctttccctgcaaccaatttggaaagcaagaaccaggagataacaaagagattcttcctgggctcaagtatgtccgtccagggggaggatttgtacctagtttccagctttttgagaaaggggatgtgaatggtgaaaaagaacagaaagtcttcagtttcttgaagcactcctgtcctcatccctctgagattttgggcacattcaaatctatatcctgggaccctgtaaaggtccatgacatccgttggaactttgaaaagttcctggtggggcctgatggaatccctgtcatgcgctggtcccaccgggctacggtcagctcagtcaagacagacatcctggcgtacttgaagcaattcaaaaccaaatag

SEQ ID NO: 51048 - DNA, 1046 bp, Homo sapiens
aaatatcttcattttactcatggggaaactgaaggccagggatgggaattgcccaggttcacaaaggaatttaacaatggagctggcttctgattcccagggcagtgttctttctactctacctgctgatgagtggagtaagaggtcagaagacctggggaaagataagcaactaagatatcctaaaaatagttcagcaatttaaaaccctcccttctcagagagtccagacaggaggccttcaatccagagccaaggagtagcctgttttttacagaagcatgtaagattacacagatgccaggaattattgttaccagtattatcacttaaaaaaaatcttccagatggattgccacaaagacgagaaaggcaccatctatgactatgaggccatcgcacttaataagaatgaatatgtttccttcaagcagtatgtgggcaagcacatcctcttcgtcaacgtggccacctactgtggtctgacagcgcaatatcctgatttccaggggaatcaatatatacttgagaactaggagcctctcagaagattccagaagtcttcttgataaatacaggacagaagacccatgtttttgagacttttgcaaggttttacagaactaaatgcactccaggaggagctgaagccctatggtctagttgtgttgggctttccctgcaaccaatttggaaagcaagaaccaggagataacaaagagattcttcctgggctcaagtatgtccgtccagggggaggatttgtacctagtttccagctttttgagaaaggggatgtgaatggtgaaaaagaacagaaagtcttcagtttcttgaagcactcctgtcctcatccctctgagattttgggcacattcaaatctatatcctgggaccctgtaaaggtccatgacatccgttggaactttgaaaagttcctggtggggcctgatggaatccctgtcatgcgctggtcccaccgggctacggtcagctcagtcaagacagacatcctggcgtacttgaagcaattcaaaaccaaatag

SEQ ID NO: 51049 - DNA, 794 bp, Homo sapiens
ggcgcctgtgtttcagcaaagcctgggcaattggaacgcagggctcctaagattccatgacacccccaccttctaattctgttattgcaactgcagaccgttacctggcatgctggctgccacctccctcactcttgtcagagtctgagctacaggcagtgccttcagctctgagctcaggcgtctcaaaccttgtttttgcgattaaggactctcaagtgctgtggagagtgatcacgtttttctcaacatccctggctccacctcttctgccacaaacatcagcatggtggtgtctgccagcccttcatccagtgtgagaagacagagatgaacactggagaaatcaacaagaaattgcgcccccagccggcagagaacaaacagcagttcagaaacataaagagaaatttcttgtaactcaagtggcctaattcctggccaaccagcagaagaaataccagtatgaagaattcaaagacctcataaaatctatgctgagggatgagctgcaattcaaggacgagaagcttgcagagcagcttgggcaagctgaggagctcaggcaatataaagtcctagttcactctcaggcacgagagctggcctggttaaggaagagattacaggaagggagagatgcctcccgctcattgaatcagcatctccaggccctcctcactccggatgagcctgacaactcccaggggcaggatatctgagagcagctggctgagggctgcaggctgacagagaacctcatccacaaactcagcccaggtaaggtggccaca

SEQ ID NO: 51050 - DNA, 2372 bp, Homo sapiens
gttctctgggaccaccttcttttggcttcaacctctcccactcttgacatctgagtagctcagggaagctcttccaggtccgactgttcatatgtaaaggagactggccgctggggctcaggaccgggattatccgagctctgcagaagtgcaccgctattgctttgggagggtaaaaaaaaaaaatcacacggtttccagtgaaaaagtgacagagggtggtggcctttggaaccgccgtgaagtcttctgcctggaacccgaaacttgcatgctatggaacacccgctctttggctgcctgcgcagccctcacgccacggcgcaaggcttgcacccgttctcccaatcctctctcgccctccatggaagatctgaccatatgtcttaccccgagctctctacttcttcctcatcttgcataatcgcgggataccccaacgaagagggcatgtttgccagccagcatcacagggggcaccaccaaccaccaccaccaccaccatcaccaccatcagcagcagcagcaccaggctctgcaaaccaactggcacctcccgcagatgtcttccccaccgagtgcggctcggcacagcctctgcctccagcccgactctggagggcccccagagttggggagcagcccgcccgtcctgtgctccaactcttccagcttgggctccagcaccccgactggggccgcgtgcgcgccgggggactacggccgccaggcactgtcacctgcggaggcggagaagcgaagcggcggcaagaggaaaagcgacagctcagactcccaggaaggaaattacaagtcagaagtcaacagcaaacccaggaaagaaaggacagcatttaccaaagagcaaatcagagaacttgaagcagaatttgcccatcataattatctcaccagactgaggcgatacgagatagcagtgaatctggatctcactgaaagacaggtgaaagtctggttccaaaacaggcggatgaagtggaagagggtaaagggtggacagcaaggagctgcggctcgggaaaaggaactggtgaatgtgaaaaagggaacacttctcccatcagagctgtcgggaattggtgcagccaccctccagcaaacaggggactctatagcaaatgaagacagtcacgacagtgaccacagctcagagcatgcgcacttatgatataaacagaggaccagctccattctcaggaaagaaatgttgtgatggcaagccttacccaaatatcgtttacacagagagatgactatggcagtgatgtttaatattattaaatccaggcatttcgaatctgtttttcatgatttatagagggtttacacaaagtgccacttattaaagagcttccacagtgaagatggagaaggtgaacttgctttgaatattccagatgtgtttggtcatgcgtatggcagtgagcaggtatgtgtttgcttttgcttgcactgaaaattaaattgctatcaagagcaaactatgaacggttttttattcaagatgtctccagagtgaagatgccgaggatgaacttgcattgaacattccagatgtgtgagatcatgtgtattacagtgggcaggtatttgcttttgcttgcactgaaaattaaattgctatcaagaataaaccatgaaacattttatcctgaacagccacagtgcctgaattcactcaagtggataaaaagtgtattttaactctgtatatattacccttaagtcattttcctgtcttcactaatttagcaatgcattcatattagctgatgaaaataggcactcacaatgacaaccagagccagtttcttgtcttttttatacattttgtcatcccagagacaatcagtatgtgcttacctgtgttcaagtagagaaaaatacagtagagtctgataggacatattcttgtaccacagacaaaacaaatcttatgttgcatttactatcaactgctgctaatacgttattataaaacttacctagctcctgaattcttcctatcttatagcttaaaaaaattaggatcataggcaaatcagttaccttgcagaaagagctttgtatgacagacattgtcttattttatttctgtaaaatattagctgtatgaatatgatttaattaacaagaaaacatttcttcctgattgacaacagtgttagacaaggtgcaaagcgaaactggttgctcaagttgatagaaaacaaaattctgaatatcttcaaattaaattcggtaaaaacacattattttttcatatgtgatgtattcatgcagaacaactatctttgtattttgtttttaaaatgtgtttaataaatgatcctttgtaaataaaatttggt

SEQ ID NO: 51051 - DNA, 1997 bp, Homo sapiens
gttctctgggaccaccttcttttggcttcaacctctcccactcttgacatctgagtagctcagggaagctcttccaggtccgactgttcatatgtaaaggagactggccgctggggctcaggaccgggattatccgagctctcagcagcagcaccaggctctgcaaaccaactggcacctcccgcagatgtcttccccaccgagtgcggctcggcacagcctctgcctccagcccgactctggagggcccccagagttggggagcagcccgcccgtcctgtgctccaactcttccagcttgggctccagcaccccgactggggccgcgtgcgcgccgggggactacggccgccaggcactgtcacctgcggaggcggagaagcgaagcggcggcaagaggaaaagcgacagctcagactcccaggaaggaaattacaagtcagaagtcaacagcaaacccaggaaagaaaggacagcatttaccaaagagcaaatcagagaacttgaagcagaatttgcccatcataattatctcaccagactgaggcgatacgagatagcagtgaatctggatctcactgaaagacaggtgaaagtctggttccaaaacaggcggatgaagtggaagagggtaaagggtggacagcaaggagctgcggctcgggaaaaggaactggtgaatgtgaaaaagggaacacttctcccatcagagctgtcgggaattggtgcagccaccctccagcaaacaggggactctatagcaaatgaagacagtcacgacagtgaccacagctcagagcatgcgcacttatgatataaacagaggaccagctccattctcaggaaagaaatgttgtgatggcaagccttacccaaatatcgtttacacagagagatgactatggcagtgatgtttaatattattaaatccaggcatttcgaatctgtttttcatgatttatagagggtttacacaaagtgccacttattaaagagcttccacagtgaagatggagaaggtgaacttgctttgaatattccagatgtgtttggtcatgcgtatggcagtgagcaggtatgtgtttgcttttgcttgcactgaaaattaaattgctatcaagagcaaactatgaacggttttttattcaagatgtctccagagtgaagatgccgaggatgaacttgcattgaacattccagatgtgtgagatcatgtgtattacagtgggcaggtatttgcttttgcttgcactgaaaattaaattgctatcaagaataaaccatgaaacattttatcctgaacagccacagtgcctgaattcactcaagtggataaaaagtgtattttaactctgtatatattacccttaagtcattttcctgtcttcactaatttagcaatgcattcatattagctgatgaaaataggcactcacaatgacaaccagagccagtttcttgtcttttttatacattttgtcatcccagagacaatcagtatgtgcttacctgtgttcaagtagagaaaaatacagtagagtctgataggacatattcttgtaccacagacaaaacaaatcttatgttgcatttactatcaactgctgctaatacgttattataaaacttacctagctcctgaattcttcctatcttatagcttaaaaaaattaggatcataggcaaatcagttaccttgcagaaagagctttgtatgacagacattgtcttattttatttctgtaaaatattagctgtatgaatatgatttaattaacaagaaaacatttcttcctgattgacaacagtgttagacaaggtgcaaagcgaaactggttgctcaagttgatagaaaacaaaattctgaatatcttcaaattaaattcggtaaaaacacattattttttcatatgtgatgtattcatgcagaacaactatctttgtattttgtttttaaaatgtgtttaataaatgatcctttgtaaataaaatttggt

SEQ ID NO: 51052 - DNA, 1157 bp, Homo sapiens
ctccttcagaggagaagggccagggagaggtcagagacatctttctgcttctgttttctcaaatgccaaggtgtcatattttgaggtagcatgtcccgtataccccaatggccatatatactagtatcttgttaaatgactactgtgtttcattaatttagaactatagttaggaggagttacatattgaggttaaactcctttttgagggagtcttaacaatatttctgtttgtgatctggatagatactaccaaatcagttagtttagttgctaactcaatcagatttagtagcagggaatcagatttagctgtgcagaaaaagactttaaatatgatgacataaaaaatcctcagtgttaaacatcttcctgtgttataataattcctcttttttttaacattgtaggcaagttaggagcgggtgaagtggatatataagtcatagatatgttcatgttcttactgaaagcaatttaaaaattccgaagcagattgcaaaaaaaatgtattaaaagcttatgcggctgggcgtggaggctcacgtctgtaatcccagcactttgagagtctgaggcaggcagatcacttgaggttgggagttcggaaccagcctgacatggagaaaccttgtctctattaaaaatacaaaaaaattagcagcttgtggtggcgcatgcctgtgatcccaactactcaggaggctgaggcaggagaataacttgaacccaggagacggaggttgttgtgagccgagatcgcgccattgcactccagcctgggcaacgagcgagactccgtctcaaaaaaaaaaaaaaaaaaagagagaaaagcttatgcaacacacatgtgaacaagacacaacgagaaactgctagcaatccttttactacaaaggtctgactctggcctttagaaagcatttggggagttcccacccagctgtgctcacatttccacatcaaggaattcccaagcatatataatttgtgttttctactcgaacatatgaatttatgatggattatccagtttttttgttttaaacattgtcagtgattgttccccctgtagcaacagccagacatcagtgtagttgctcctactagagtattatagtggttcagggaaaataaaaacattacctaagcttgga

SEQ ID NO: 51053 - DNA, 398 bp, Homo sapiens
ttaattccttggcttcaaaaaaaaaaaaaaaaaatcatgtgtgggattttaccctctctgaaaatgcccttagaatagccaactaccgttacaaaatccaaaaagaggggcagagagggaaagaaacacaacttaaatctcagaaggaaaaattccatggaattagagagtagttattctataaatgtactaggttttattgagttttgagaagaatatgttggcataaaaataaacattttcagttatgggcattgacagatactgtgttttaagaaaaacagttggctcattcactgaaatttggactatcaagagttcacatcacaagatgtgcagctgaagactttaaaccatgggaaagttttacgttaaggaattaaaaaaataaataaaat

SEQ ID NO: 51054 - DNA, 519 bp, Homo sapiens
caagcttgaaacatgcacttttaaatcaataccagaaaagaacaacgaaaatagtggcttgctttgttggcccttcctttgtactgggctctgtgcagggcatgtcacctgagctgtcactgtgtttagtaccagccccccccttaataggtgtggacgtcttcctgaacagcctgaagcagacggtggtgaccctggcaagcagcgcagacgtgctgagcaccgagcagtcggcctcccaggccatgctgcagagcggctggtccatgctgttgcccaccgctgagaagcaggcccgggcactctgctctcctgccctgcggagtttcaggcaatgaagtgagcataagtccaggtcatcgattggtgattgatcttctggtgggcagcttgatggctgctggagggttggagtcagccttacacgcagccattactgcagagatccaggtatggccttggaggcacacgtgacctggtggtgggctgagatcggaatggggcatgggtcgagcttcg

SEQ ID NO: 51055 - DNA, 826 bp, Homo sapiens
aggcatgctgaggtgagggctggtgcagaccgggaatgctttggggaagcgcctctgtatccaaatacctgttgcattgtgtgcgtttcactgaatcgtgtgactgcagcaggtgtggtgctctacagagaaccatgtcccagggctctctcttttccttttcttcacttcctgttttatgctcagttttctagcctgggaactgttcttctttttttttctttcagttttcctcatttaattatttttattccatgaatttaagaccctagatcttcatgtaaatgtgctctttgagcttcttaactggtctttcctatcagcagaaggcgatgtcttgtgctaaaatctcagtgtcaattcagtgatttaactaccacggctttactttcgtttcctttcatatcccaagtatttcttcacttctatctagctgtttgcttttatttttgatcaaccatgaaaaaaaaaaaagttaatctgtttttactaggaataaatatgttttcttctttagccaaatgttgtctgccatcctgttgttgcttcagctgtgggacagcggggcacaggagactgacaatgagcgttccgcccagggcaccagcgccccgcttttgcccttgctgcaaaggttccagagcatcatttgcaggaaggatgcaccccactccgagggcgacatgcacgtgagtgtcatgatggaactttgtgtttaggtggcactcgagtctagttattttttacgcaagaccagcgtgcttgtgcatggcagtgtttttctctggtgtctgtgtgtttggtggtaacagcagcgagtcagatg

SEQ ID NO: 51056 - DNA, 1752 bp, Homo sapiens
  misc_feature (1365)..(1365): n is a, c, g, or t
  misc_feature (1375)..(1375): n is a, c, g, or t
  misc_feature (1415)..(1415): n is a, c, g, or t
  misc_feature (1448)..(1448): n is a, c, g, or t
  misc_feature (1457)..(1457): n is a, c, g, or t
  misc_feature (1476)..(1476): n is a, c, g, or t
  misc_feature (1504)..(1504): n is a, c, g, or t
  misc_feature (1511)..(1511): n is a, c, g, or t
  misc_feature (1516)..(1516): n is a, c, g, or t
  misc_feature (1668)..(1669): n is a, c, g, or t
aggcatgctgaggtgagggctggtgcagaccgggaatgctttggggaagcgcctctgtatccaaatacctgttgcattgtgtgcgtttcactgaatcgtgtgactgcagcaggtgtggtgctctacagagaaccatgtcccagggctctctcttttccttttcttcacttcctgttttatgctcagttttctagcctgggaactgttcttctttttttttctttcagttttcctcatttaattatttttattccatgaatttaagaccctagatcttcatgtaaatgtgctctttgagcttcttaactggtctttcctatcagcagaaggcgatgtcttgtgctaaaatctcagtgtcaattcagtgatttaactaccacggctttactttcgtttcctttcatatcccaagtatttcttcacttctatctagctgtttgcttttatttttgatcaaccatgaaaaaaaaaaaagttaatctgtttttactaggaataaatatgttttcttctttagccaaatgttgtctgccatcctgttgttgcttcagctgtgggacagcggggcacaggagactgacaatgagcgttccgcccagggcaccagcgccccgcttttgcccttgctgcaaaggttccagagcatcatttgcaggaaggatgcaccccactccgagggcgacatgcacgtgtggacgtcttcctgaacagcctgaagcagacggtggtgaccctggcaagcagcgcagacgtgctgagcaccgagcagtcggcctcccaggccatgctgcagagcggctggtccatgctgttgcccaccgctgagaagcaggcccgggcactctgctctcctgccctgcggagtttcaggcaatgaagtgagcataagtccaggtcatcgattggtgattgatcttctggtgggcagcttgatggctgctggagggttggagtcagccttacacgcagccattactgcagagatccaggtatggccttggaggcacacgtgacctggtggtgggctgagatcggaaataccacactcacacatgtgaagaataactgaaaacagtaaaacactaaacttatatccaagtatttttttaaattaaaattcttttttgtgctaattttaaaaattactgagatgatttaattgtgataaaatactgcatgttgtctgtttcagtgaagttaacaggtaacctgttcctcatgtagaccattcccgtcacccggaaagatccctgtgctccttggcacttgcagccaggatactcccctgccctgagattagattcatttttcctgctctgagtgtcgcagcaatataactgtatagtatgcactctttcctgcttngccttggagnatgattttcagattcgctcactgttgtgtgtattgcgacntcgtttttattattgggaagttttccattttanaggtgtagnactgtttgttagttcattntcctattgaaggacatgtaattgttttnggttttngtttnctttttttttttttttttttttttttgagacagggtcttgctctgtcacccaggctgtatacagtgacctgatgttggctcactgcagccttgtactcctaggctcaaatgatcctcccacctcagcctcctgtgttgcagggaccacatanntgtcaccatgtccggctagttttttgatttttttgtagagacaaggtttcactgtgttgcaaggctggtcttcaactcctggg

SEQ ID NO: 51057 - DNA, 1213 bp, Homo sapiens
  misc_feature (826)..(826): n is a, c, g, or t
  misc_feature (836)..(836): n is a, c, g, or t
  misc_feature (876)..(876): n is a, c, g, or t
  misc_feature (909)..(909): n is a, c, g, or t
  misc_feature (918)..(918): n is a, c, g, or t
  misc_feature (937)..(937): n is a, c, g, or t
  misc_feature (965)..(965): n is a, c, g, or t
  misc_feature (972)..(972): n is a, c, g, or t
  misc_feature (977)..(977): n is a, c, g, or t
  misc_feature (1129)..(1130): n is a, c, g, or t
caagcttgaaacatgcacttttaaatcaataccagaaaagaacaacgaaaatagtggcttgctttgttggcccttcctttgtactgggctctgtgcagggcatgtcacctgagctgtcactgtgtttagtaccagccccccccttaataggtgtggacgtcttcctgaacagcctgaagcagacggtggtgaccctggcaagcagcgcagacgtgctgagcaccgagcagtcggcctcccaggccatgctgcagagcggctggtccatgctgttgcccaccgctgagaagcaggcccgggcactctgctctcctgccctgcggagtttcaggcaatgaagtgagcataagtccaggtcatcgattggtgattgatcttctggtgggcagcttgatggctgctggagggttggagtcagccttacacgcagccattactgcagagatccaggtatggccttggaggcacacgtgacctggtggtgggctgagatcggaaataccacactcacacatgtgaagaataactgaaaacagtaaaacactaaacttatatccaagtatttttttaaattaaaattcttttttgtgctaattttaaaaattactgagatgatttaattgtgataaaatactgcatgttgtctgtttcagtgaagttaacaggtaacctgttcctcatgtagaccattcccgtcacccggaaagatccctgtgctccttggcacttgcagccaggatactcccctgccctgagattagattcatttttcctgctctgagtgtcgcagcaatataactgtatagtatgcactctttcctgcttngccttggagnatgattttcagattcgctcactgttgtgtgtattgcgacntcgtttttattattgggaagttttccattttanaggtgtagnactgtttgttagttcattntcctattgaaggacatgtaattgttttnggttttngtttnctttttttttttttttttttttttttgagacagggtcttgctctgtcacccaggctgtatacagtgacctgatgttggctcactgcagccttgtactcctaggctcaaatgatcctcccacctcagcctcctgtgttgcagggaccacatanntgtcaccatgtccggctagttttttgatttttttgtagagacaaggtttcactgtgttgcaaggctggtcttcaactcctggg

SEQ ID NO: 51058 - DNA, 1730 bp, Homo sapiens
  misc_feature (1343)..(1343): n is a, c, g, or t
  misc_feature (1353)..(1353): n is a, c, g, or t
  misc_feature (1393)..(1393): n is a, c, g, or t
  misc_feature (1426)..(1426): n is a, c, g, or t
  misc_feature (1435)..(1435): n is a, c, g, or t
  misc_feature (1454)..(1454): n is a, c, g, or t
  misc_feature (1482)..(1482): n is a, c, g, or t
  misc_feature (1489)..(1489): n is a, c, g, or t
  misc_feature (1494)..(1494): n is a, c, g, or t
  misc_feature (1646)..(1647): n is a, c, g, or t
aggcatgctgaggtgagggctggtgcagaccgggaatgctttggggaagcgcctctgtatccaaatacctgttgcattgtgtgcgtttcactgaatcgtgtgactgcagcaggtgtggtgctctacagagaaccatgtcccagggctctctcttttccttttcttcacttcctgttttatgctcagttttctagcctgggaactgttcttctttttttttctttcagttttcctcatttaattatttttattccatgaatttaagaccctagatcttcatgtaaatgtgctctttgagcttcttaactggtctttcctatcagcagaaggcgatgtcttgtgctaaaatctcagtgtcaattcagtgatttaactaccacggctttactttcgtttcctttcatatcccaagtatttcttcacttctatctagctgtttgcttttatttttgatcaaccatgaaaaaaaaaaaagttaatctgtttttactaggaataaatatgttttcttctttagccaaatgttgtctgccatcctgttgttgcttcagctgtgggacagcggggcacaggagactgacaatgagcgttccgcccagggcaccagcgccccgcttttgcccttgctgcaaaggttccagagcatcatttgcaggaaggatgcaccccactccgagggcgacatgcaccctgaagcagacggtggtgaccctggcaagcagcgcagacgtgctgagcaccgagcagtcggcctcccaggccatgctgcagagcggctggtccatgctgttgcccaccgctgagaagcaggcccgggcactctgctctcctgccctgcggagtttcaggcaatgaagtgagcataagtccaggtcatcgattggtgattgatcttctggtgggcagcttgatggctgctggagggttggagtcagccttacacgcagccattactgcagagatccaggtatggccttggaggcacacgtgacctggtggtgggctgagatcggaaataccacactcacacatgtgaagaataactgaaaacagtaaaacactaaacttatatccaagtatttttttaaattaaaattcttttttgtgctaattttaaaaattactgagatgatttaattgtgataaaatactgcatgttgtctgtttcagtgaagttaacaggtaacctgttcctcatgtagaccattcccgtcacccggaaagatccctgtgctccttggcacttgcagccaggatactcccctgccctgagattagattcatttttcctgctctgagtgtcgcagcaatataactgtatagtatgcactctttcctgcttngccttggagnatgattttcagattcgctcactgttgtgtgtattgcgacntcgtttttattattgggaagttttccattttanaggtgtagnactgtttgttagttcattntcctattgaaggacatgtaattgttttnggttttngtttnctttttttttttttttttttttttttgagacagggtcttgctctgtcacccaggctgtatacagtgacctgatgttggctcactgcagccttgtactcctaggctcaaatgatcctcccacctcagcctcctgtgttgcagggaccacatanntgtcaccatgtccggctagttttttgatttttttgtagagacaaggtttcactgtgttgcaaggctggtcttcaactcctggg

SEQ ID NO: 51059 - DNA, 1729 bp, Homo sapiens
ctttcagggaggatctgtgaggtcaactgttggcactgtggcatgaatcaaggtggtggcagcaaacttctagtagttttgatatgtccttgatagaacaaatagcaatggttaactattaaatgttgacctagccagcgcagtggctcatgcctgtaatcccagcactttgggaggctgaggcgggcggatcacctgaggtcgggagttcgaggccagcctgaccaacatggagaaaccccgtctcttctaaaaatacaaaattagctgggcatggtggtgcatgcctgtaattccagctactcgggaggctgaggcaagagaatcgcttgaatccggtaggtggaggttgcagtgagccgagatcataccattgcactccagcccaggcaacaagagtgaaaccctgtctcaaaaagaaaaaaaaagttgaccttgagaatttataatattctgagaaaactggaagcatgcataaagcccctctgctgtgcactgaagtatgggtgccttgaggaaaagcagttacacagttgagttgcaagctgaattggctgtgttcaaggcatgccctttagaattgaaagaactagcagattacggtatttagacttgaatatttggctgatattttctggaaattaatggaatgagcctctcacctcaagggaaacaactgatagtgttgccagtgataaagctttcaagcaaaaattggaatttccgaaaatctgtactccaccatgagctttattgttggggatattaacaaatgtgatttgtataatgaaatgcatttcatttggaagaattcaatgaaccatttttccaagtgaccagtacgtgatgttacaaaatcatgcatggctcaaagattgattcaaaagtgtaagacaggccagtggattttaatgtattaacaatataagagtgcattaagttttcggagtctacattgcctttaagaaactatgacttgtagtaagccgggcgcggtggctcacgcctgtaatcccaacactttgggaggccaaggtgggtggatcacaaggtcaggagttcaagaccagcctggccaatatggtgaaagtccgtctctactaaaattacaaaaattagccgggcgtggtggcagatcccttgtagtcccagctactcgggaggctgaggcaggagaatagcttgaacccgggaggtggaggttgcagtgagtcgagatcgtgccactggactccagcctgggtgacagagcgagactccatttcaaaaaaaaaaaaaaaaaaaaaaatcacttgtagtcttggtgtggtatcaaagaatagccacaattagctgaaaaggctattttaaaaacttttccaactgcgtatctgtgtgaagtcaacttacttcaacaaaaaagtttggatgtagaagcagctgtaagaattcaactgtttattataacaagatactaaagagactgtaaaatgccacccttctccttggattgttttggaagttattcttcataaaaaatgttaacgtgggctgggcatggtggctcatgcctgtaatcccagcactctgggaggctgaggtgggcggatcacttgagctcaggaattcaaggtcagcctgggcaacatggctaaactctgtctctattaagaaaaaaaatgttaacattatgatttaaaagtgcattaaccttaatctagataataaaagctttttggggcaacctcca

SEQ ID NO: 51060 - DNA, 967 bp, Homo sapiens
ctttcagggaggatctgtgaggtcaactgttggcactgtggcatgaatcaaggtggtggcagcaaacttctagtagttttgatatgtccttgatagaacaaatagcaatggttaactattaaatgttgacctagccagcgcagtggctcatgcctgtaatcccagcactttgggaggctgaggcgggcggatcacctgaggtcgggagttcgaggccagcctgaccaacatggagaaaccccgtctcttctaaaaatacaaaattagctgggcatggtggtgcatgcctgtaattccagctactcgggaggctgaggcaagagaatcgcttgaatccggtaggtggaggttgcagtgagccgagatcataccattgcactccagcccaggcaacaagagtgaaaccctgtctcaaaaagaaaaaaaaagttgaccttgagaatttataatattctgagaaaactggaagcatgcataaagcccctctgctgtgcactgaagtatgggtgccttgaggaaaagcagttacacagttgagttgcaagctgaattggctgtgttcaaggcatgccctttagaattgaaagaactagcagattacggtatttagacttgaatatttggctgatattttctggaaattaatggaatgagcctctcacctcaagggaaacaactgatagtgttgccagtgataaagctttcaagcaaaaattggaatttccgaaaatctgtactccaccatgagctttattgttggggatattaacaaatgtgatttgtataatgaaatgcatttcatttggaagaattcaatgaaccatttttccaagtgaccagtacgtgatgttacaaaatcatgcatggctcaaagattgattcaaaagtgtaagacagccccctgtatatctacactagttccggcttagcggattaccaggttactctggaacagctctgccctatc

SEQ ID NO: 51061 - DNA, 247 bp, Homo sapiens
gggcagagctttcccagtaagtcccagttcccgtgggcactggggagacaggaaaggagagctgttgagctttctgtctcagaagaaaggtgttttttcccccaattaaaaacatttttttttttttttttagacctgggcaacatggctaaactctgtctctattaagaaaaaaaatgttaacattatgatttaaaagtgcattaaccttaatctagataataaaagctttttggggcaacctcca

SEQ ID NO: 51062 - DNA, 1763 bp, Homo sapiens
ctttcagggaggatctgtgaggtcaactgttggcactgtggcatgaatcaaggtggtggcagcaaacttctagtagttttgatatgtccttgatagaacaaatagcaatggttaactattaaatgttgacctagccagcgcagtggctcatgcctgtaatcccagcactttgggaggctgaggcgggcggatcacctgaggtcgggagttcgaggccagcctgaccaacatggagaaaccccgtctcttctaaaaatacaaaattagctgggcatggtggtgcatgcctgtaattccagctactcgggaggctgaggcaagagaatcgcttgaatccggtaggtggaggttgcagtgagccgagatcataccattgcactccagcccaggcaacaagagtgaaaccctgtctcaaaaagaaaaaaaaagttgaccttgagaatttataatattctgagaaaactggaagcatgcataaagcccctctgctgtgcactgaagtatgggtgccttgaggaaaagcagttacacagttgagttgcaagctgaattggctgtgttcaaggcatgccctttagaattgaaagaactagcagattacggtatttagacttgaatatttggctgatattttctggaaattaatggaatgagcctctcacctcaagggaaacaactgatagtgttgccagtgataaagctttcaagcaaaaattggaatttccgaaaatctgtactccaccatgagctttattgttggggatattaacaaatgtgatttgtataatgaaatgcatttcatttggaagaattcaatgaaccatttttccaagtgaccagtacgtgatgttacaaaatcatgcatggctcaaagattgattcaaaagtgtaagacaggccagtggattttaatgtattaacaatataagagtgcattaagttttcggagtctacattgcctttaagaaactatgacttgtagtaagccgggcgcggtggctcacgcctgtaatcccaacactttgggaggccaaggtgggtggatcacaaggtcaggagttcaagaccagcctggccaatatggtgaaagtccgtctctactaaaattacaaaaattagccgggcgtggtggcagatcccttgtagtcccagctactcgggaggctgaggcaggagaatagcttgaacccgggaggtggaggttgcagtgagtcgagatcgtgccactggactccagcctgggtgacagagcgagactccatttcaaaaaaaaaaaaaaaaaaaaaaatcacttgtagtcttggtgtggtatcaaagaatagccacaattagctgaaaaggctattttaaaaacttttccaactgcgtatctgtgtgaagtcaacttacttcaacaaaaaagtttggatgtagaagcagctgtaagaattcaactgtttattataacaagatactaaagagactgtaaaatgccacccttctccttggattgttttggaagttattcttcataaaaaatgttaacgtgggctgggcatggtggctcatgcctgtaatcccagcactctgggaggctgaggtgggcggatcacttgagctcaggaattcaaggtcagcctgggcaacatggctaaactctgtctctattaagaaaaaaaatgttaacattatgatttaaaagtgcattaaccttaatctagataataaaagctttttggggcaacctccagaactgtgaaaaataaatttgttatttaaaaaga

SEQ ID NO: 51063 - DNA, 1675 bp, Homo sapiens
ctttcagggaggatctgtgaggtcaactgttggcactgtggcatgaatcaaggtggtggcagcaaacttctagtagttttgatatgtccttgatagaacaaatagcaatggttaactattaaatgttgacctagccagcgcagtggctcatgcctgtaatcccagcactttgggaggctgaggcgggcggatcacctgaggtcgggagttcgaggccagcctgaccaacatggagaaaccccgtctcttctaaaaatacaaaattagctgggcatggtggtgcatgcctgtaattccagctactcgggaggctgaggcaagagaatcgcttgaatccggtaggtggaggttgcagtgagccgagatcataccattgcactccagcccaggcaacaagagtgaaaccctgtctcaaaaagaaaaaaaaagttgaccttgagaatttataatattctgagaaaactggaagcatgcataaagcccctctgctgtgcactgaagtatgggtgccttgaggaaaagcagttacacagttgagttgcaagctgaattggctgtgttcaaggcatgccctttagaattgaaagaactagcagattacggtatttagacttgaatatttggctgatattttctggaaattaatggaatgagcctctcacctcaagggaaacaactgatagtgttgccagtgataaagctttcaagcaaaaattggaatttccgaaaatctgtactccaccatgagctttattgttggggatattaacaaatgtgatttgtataatgaaatgcatttcatttggaagaattcaatgaaccatttttccaagtgaccagtacgtgatgttacaaaatcatgcatggctcaaagattgattcaaaattttcggagtctacattgcctttaagaaactatgacttgtagtaagccgggcgcggtggctcacgcctgtaatcccaacactttgggaggccaaggtgggtggatcacaaggtcaggagttcaagaccagcctggccaatatggtgaaagtccgtctctactaaaattacaaaaattagccgggcgtggtggcagatcccttgtagtcccagctactcgggaggctgaggcaggagaatagcttgaacccgggaggtggaggttgcagtgagtcgagatcgtgccactggactccagcctgggtgacagagcgagactccatttcaaaaaaaaaaaaaaaaaaaaaaatcacttgtagtcttggtgtggtatcaaagaatagccacaattagctgaaaaggctattttaaaaacttttccaactgcgtatctgtgtgaagtcaacttacttcaacaaaaaagtttggatgtagaagcagctgtaagaattcaactgtttattataacaagatactaaagagactgtaaaatgccacccttctccttggattgttttggaagttattcttcataaaaaatgttaacgtgggctgggcatggtggctcatgcctgtaatcccagcactctgggaggctgaggtgggcggatcacttgagctcaggaattcaaggtcagcctgggcaacatggctaaactctgtctctattaagaaaaaaaatgttaacattatgatttaaaagtgcattaaccttaatctagataataaaagctttttggggcaacctcca

SEQ ID NO: 51064 - DNA, 533 bp, Homo sapiens
gaaagatttcagttaagtagaaattgtggaaacagatcgacagactgaaggggtgtccagtgtgaggatcaaaaactgaaagtgtagggagaaagaaatcacaaaagagctggagctcatgatccagtgcagctgaagagatgcccagaaggaaacagaaagcagcagcactgggcagggatattgtgccgcatttaggaaatctagataccatttgttctgtgaataggaggaaacttttcaggattcacagaacacatcttaccagcatgctgctttagtcgtctcagaagtagcatgtatggaataggcaaactctgataaaggagtatggagacgtttcttgtgttttttctttgttttgtttaaaacgacttacatttactatgttacacattctgtagggcagaattccaggcacaggttaactggatcctgcttatggtcccacatggctgaaataagtgtgttggctgagttgcaatttcatctgatgtttttccattcccccgtggttgtggtagaatccagga

SEQ ID NO: 51065 - DNA, 1314 bp, Homo sapiens
atttcaataaagctattttaaaaataaactgtaagccgggtgtggtggctcacgcctgtaatcccaaaactttggtagactgaagcatgcagattgcttgagcccaggagttcaagaccagcttgggcaacatagtgaaaccccatctttaaaaaaaaaacattaaccaggcatggtggcacacgcctgtagttccagctactcaggaggctgaggtgagaagatcagttgagcccaggaggtcaaggctgcggtgagctgttatcacaccactgccctctagcctgggtgacaacaaagcaagaccctgtctcaaaaaaacacagagactgtagttgctttaaaaatatgacttctgtatgctatgtggttacagaaaataagatcatgtcaattttttcttttttaaaatgccaaaagtttctttaaggggaaaaaaatggaactatagtaaacagactataaactatcttactgaagagtctaaaatgaagcaggtctatcaatgtaccttaacacagcttgaaataacaatcaactcttaaatgcttttggtctaagactgttgccaagtaatatggtttggatttgtgtccctacccaaatctcatgttgaactgtaatccccaatgttggaggaggggcctggtgggaagtgattgtatcatgggggtggaatccccctggctgttctcatgatagtgagctctcacgagatctggttaagtgtgtgacaactccccctcactgttctcatgatagtgagctctcacgagatctggttaagtgtgtgacaactccccttcgctgttgtcatgatagtgagctctcacgagatgtggttgtgtgacaactccccctcactgttctcatgatagtgagctctcaacaagatctggttaagtgtgtggcaactcaccctcgctgttctcatgatagtgagctctcaggagatctggttaagtgtgtggaaactcccccttgctgttctcatgaaagtgagcctcgcgagacctggttaagtgtgcagcacctcccccttgctgttctcattacagtgagctgtcacgagatctggttgtttagaagtgtgtggcacctcccactttgctgttctcatgatagtgagctctcacgagatctggttaagcatgtggcatctcccccttctctctctcttcctcctgctttggccatgtaagacatgcctccctccccttagccttccaccatgattgtgggtttcctgaggcctccccagccatgcttcctgtacagccgagccaattaaacctctttataaagtaaacagtc

SEQ ID NO: 51066 - DNA, 1511 bp, Homo sapiens
cagggtgttggattcaggacagggttggtaagcctaagcctgggggaatcctagcgcttgctttcacagaagacctcaggagaaattaatcttcagtatctttataccatgggtgattggcacattcctgcaaccacagtaagatgcaatacatgaagctggaaattgcaaattcttgccactcaaggtactatttgggcatcttcagcccacagcagacatgaccaatcgggcacaagcactcttttttgtggaagtcaaagtgtttttagaagtttttctcaatatagcactccagggggccactaccagtcagttggagttggtattcaaggtggagtctggttgccgtctctgccctgttcccattatgtagtgagttcaggtacttaatacctaactgaggaccctaggactgcagtttgagatcatctggggccaggcacagtggctcacacctataatggtagcactttgggagcctgaggcgggaggatcacttgagcccaggagtttaacagtttaaaatcagcctgggcaacatgatgagacatcgtttctacaaaaaaattttttaaattagctaggcattgtgatgtgcacctgtggtccctgctacttgggagcctgaggcaggagaatcgcttgaaccttggaggttgtggctgcagtgagccctgatcgcaccactacaccccagcctgggtaacagagcaagaccctgtctcaaggaaaaaaaaaatcatctggcccatcctgttacttaacagagaaggtacctgaggctcaaaaaggatgactgacagtcctagtggcagaatggaggtgggatctggaacccacaacttgattcctaggactcttttttttttaattcccacattggctgggtgtggtggctcacgcctgtaatcccagcactttgggaggctgaggtgggtggatcacctaaggtcaggagttccagaccagcctgaccaacatggtgaaaccccgtctgtactaaaaatacaaaaattagccaggcatggtggcccatttcctgtaatcccagctactcaggaggctgaggcagaatcgcttgaacctgggaggcggaggttgcagggagctgagatggcgccactgcactccagcctgagcgacagagtgagactccgtctcaaaaaaaaaaaaaaaatgcaaaaattagccaggcgtcgtggcgcatgtctgtaatcccagctcctcgagaggctgagtggggaggatcacttgagcccaggaggcagaggttgcaatgacctgcgatcatgccactgcactccagcctgggcaacagagactctgtttcaaaaagaaaaaaaaaatccccacattttatttaattttcagtccatacagttctattcctgctagggctgtaactccagctgaaggcaccacagctgtcacccaaggagtttctgtggccatgggaaggtgttgcattcactgctacttgagaccaccacgtgacattcctgcaggct

SEQ ID NO: 51067 - DNA, 889 bp, Homo sapiens
gtggccgatagctggtcctctttctccaacacctagcctgagacttggcggcgcggctgctatcctgaactagcttggtaagtgttgtgtcccgaaccagcgtagagagacctcggaccagccgccttgatgacagcatccgcgtcctccttttcatcatctcagggtgtccagcagccctccatctacagcttctcccaaataaccagaagcttgtttctcagcaatggtgtggccgccaacgacaaactccttctgtccagcaatcgcatcaccgccattgtcaatgcctcggtgggaagtggtcaacgtattcttcgagggcttcagtacataaaggtgcctgttaccgatgctcgtgactcgcgtctctacgacttttttgaccccattgctgatcttatccacaccatcgatatgaggcagggccgtacgctgctgcactgcatggctggagtgagccgttccgcctcactgtgccttgcgtacctcatgaaataccactccatgtcgctgctggacgcccatacatggaccaagtcgcgccgccccatcatccggcccaacaacggcttttgggaacagctcatcaattacgaattcaagctgtttaataacaacaccgtgcgcatgatcaactcgccggtaggtaacatccctgacatctatgagaaggacctacgtacgatgatatcaatgtaagccatcccggccagcccctgacatctgccatcgatcttgcaccaagactgaacttgaacactgacattttgttagtaaagaaaaccggatggtgccttgttaaagggcaagaaaaaagggagggggttggagttttgaacgtagtaagccttaccttaatagaattaaattcatgaaacataaaaaa

SEQ ID NO: 51068 - DNA, 657 bp, Homo sapiens
aaattcaggaactattgagcatcaatgtggaagttgagtgctgaggtcaaatgatgttgcttgggctaagagaacatatggctatcgtaggggggcttacatagcctagaaaaattagaagagtttctctccaatttccaaaatgccagccacacacaactttccaaccctccaaataaggctgttacagcatcctcatttacactttccaaacataacttatgacagtgatacgcctaccctgctctgtattttatttttgggaaaccttaaatgcattacaccttagaaatggtctaggtaaatttccagtttgaagatgttagtgagatttctgtaggtggctggggagtttgttctacactttggctttttccagaaggcttcaaattctaaagaatggagggaggttactttacttgggtcttatataatggtttcccagaatcctaagcctttattaatttatctgtggccaaaggaattcagaacatggtacctgacgcacttgatagcatcaatagtttttctactctgtaactatgagaaaactgtctttctctacctactgactgaactactggagacctgccgcctgaactagaagcattttcttgtactttcacttttctagaatttgataataaacctcattat

SEQ ID NO: 51069 - DNA, 489 bp, Homo sapiens
agcattatccatggccagtgattgatggacttgttcaggtcctatgcagagtgcttcatatatctcatctcaatcctctaaataaccatgaaagttgatgattatctcatggtacagatgggaggctaagagtgtttaattttccccaagttccagtgctagtaagtgttgatgtctggatctgaacctgtgttaatggtgtttctagtcgatgctgttatctgttgcaccacattttgaataatcttggactttcagagtatgaaggacgattaaatataaccctttggtataaatgttctctctctcactcctctgtaacaattggagaaacagagttctaacaatattaaaatcagccatagacagagagtagtgagaaatatactttttttaatacagaaggttccctgaagtacttttagtattattctaaattaagcaataaccaatgaacaattttggtcataagcagtttctctccagaaa

SEQ ID NO: 51070 - DNA, 287 bp, Homo sapiens
attcaacagcttaggggaaatgtacaaatttatttaaagataaaaatgaccaaatctaccccaaaaaatagaatctgtgtagtcctatctgtgttaatgaaattgaatttgtaattcccccaaattccatgtgtgttagtctgttttgtgttgctgtaaaggaatgcctgagactgggaaatttacaaagaaaagatgtttgtttgggctcggggttctgcaggctgtttaagaaggacagtgctagcattcgcttctggcgaggcctcacgaagcttatagtcagg

SEQ ID NO: 51071 - DNA, 558 bp, Homo sapiens
  misc_feature (555)..(555): n is a, c, g, or t
ggcacgaggaaaaattctctctgcatcaagaccaaagaacaaatatctcccatgaaattgccccgagtgtccaatggctgttgctatgaggtcattgtggccagccagagccctccaggctggaaggagtgtgttcgttggggtcagagccacccagggcttgggggacggaggtgatgtggaattctcccagctgttccgagagcaaacgactccaaggcagcccgaagtggctgcggagcttttgtttttcttggagccttaatttgattaacacttcaggagcagtggcagagtgtacagaaagcaaggcaccaccaccttctcccactgcccccctgcaggccaccccctgaatggagcctgggtcacagagctggggagggagcagatttggacttggaggaccctgggtgtccctggagctggttcttgaatgcatgggttcagagcgggggcctccaaaacagatctgagcatcagaaggagcaagaactgtgtctcacctgcccagcaccgccaaagccacaaaaaacaaacaaacaaacaaaaaanaaa

SEQ ID NO: 51072 - DNA, 350 bp, Homo sapiens
gaacatctttttccaacttcacattgagtaattcacttaggtagcttgaaattggccattgtgggagtatttacaccatgagaacaggcaggttgcaaaccagggttcttttttctccagagttgactgttaaacatttgttggggacggtgatagggaaggacagtagagatgtttaaatgtttatcatctagcaagacaacccactaaaatgccaatttgtgtcccaggctcgtcaaaggtttaagtgtgaggtctggtatcagattaaagaggcccacaccccagatctgtcaccttaaaagcttcataaccctaggcatactgaaacattctaagcctcagtttcc

SEQ ID NO: 51073 - DNA, 457 bp, Homo sapiens
tcccttcatgataaaactcctcaacaaactaggcacagaaagaacataccttaaaataataaaagccatatatgacaaactcacagccaacatactgaatgaggaaaaactgaaagcattcttcctaagaactggaacaagacaagaatgcccacttctgccacttttattcaacgtagtactggaagttctagctagaacagtcaggcaagagaagaaataaagggcatctaagttagaaaagagaaatcaagctatctctgtttgctgatgatgtgatcttataccttgaaaattctaaagactcctccaaaatctcctagattggataaatgaatctgtaaagtgtcaggttacaaaatcaccatacacacatcagtactactgctatataccaataatgaccaagcagaatcaaatcaagaactcagtcccatttacaattgttgcaaaaaaa

SEQ ID NO: 51074 - DNA, 302 bp, Homo sapiens
ccaaaattcatagacaaatgctactgaaatgtaatataatgcatgttttctaccagttaaaaaaagaacaagttgtgaagtgtaatgtcacttaagaatttggaattgtttttagtatgctgtaaaatttcctatggcatttttattaggaaaataatacatgtgtttattaaagctttggaataatgtcactgaaatatgctgtttattaatacttttaatttaatatttaataaataatagcaaacataattggggcaaaattgagacttttccattctaattattcttgtacattttaa

SEQ ID NO: 51075 - DNA, 2882 bp, Homo sapiens
  misc_feature (4)..(5): n is a, c, g, or t
  misc_feature (806)..(806): n is a, c, g, or t
  misc_feature (808)..(809): n is a, c, g, or t
  misc_feature (811)..(811): n is a, c, g, or t
gaannggaaaaaatcagcatgtttattatttttaaaaaattagggcctggattttgacaatgtcaagatttaccgtatatccctgtttgtttggatacaccagtgacgtccacttctagaagacaaagttatattacttaaacaaccaaagatggagtctcgctcttcgcccaggctggagtgcagtggcgcgatctcggctcactgcagtcttcacctcccagattcaagcgattttcagctaatttttgtatttttagtagagatgggatttcaccatgttggccaggctggacttgaactcctgatctcgagtgatctgcccacctcagcctcccaaagtgctggtattacagatatgaaactatccatgaagaacaatattatcaatacacagcagtcttttgtaaccatgcccaatgtgattgtaccagatattgaaaaggaaatacgaaggatggaaaatggagcatgcagctccttttctgaggatgatgacagtgcctctacatctgaagaatcagagaatgaaaaccctcatgcaaggggttcctttagttataagtcactcagaaagggaggaccatcacagagggagcagtacctgcctggtgccattgcactttttaatgtgaacaacagcagcaataaggaccaggaaccagaagagaaaaagaaaaagaaaaaagaaaagaagagcaagtcagatgataaaaacgaaaataaaaacgacccagagaagaaaaagaagaaaaaggacaaagagaagaaaaagaaagaggagaaaagcaaagataagaaagaanannanaagaaagaagttgtggttattgatccctcgggaaacacatattacaactggctgttttgcatcacattacctgttatgtacaactggacaatggttattgccagagcatgttttgatgaacttcaatctgattacctagaatattggctcattttggattacgtatcagacatagtctatttaatcgatatgtttgtacgaacaaggacaggttacctagaacaaggactgctggtaaaggaagaacttaaactcataaataaatataaatccaacttgcaatttaaacttgatgttctgtcactgataccaactgatttgctgtattttaagttagggtggaactatccagaaattagattaaacaggttgttacggttctctcgtatgtttgagttcttccagagaacagaaacaaggacaaactatccaaacatcttcaggatttccaaccttgttatgtatatcgtcatcattatccactggaatgcatgtgtgttctactctatttctaaagctattggatttggaaatgatacatgggtctaccctgatattaatgatcctgaatttggccgtttggctagaaaatacgtatacagcctttactggtctacactgactttgactaccattggtgaaacaccccctcccgtgagggattctgagtatgtctttgtggtggttgatttcctaattggagtgttaatttttgctaccatcgttggtaacataggttctatgatttccaacatgaatgcagccagagcagaatttcaagcaagaattgatgctatcaagcaatatatgcattttcgaaatgtaagcaaagatatggaaaagagggttattaaatggtttgactacctgtggaccaacaaaaaaacagttgatgagaaagaagtcttaaagtatctacctgataaactaagagcagaaattgccatcaacgttcacttagacacattaaaaaaggtacgcatttttgctgattgtgaagctggtctgttggtggagttggtcttgaaattgcaaccccaagtctacagtcctggagattatatttgcaagaaaggggatatcggacgagagatgtacattatcaaggaaggcaaactcgctgtggtggcagatgatggagtcactcagtttgtggtattgagcgatggcagctacttcggtgagatcagcattcttaacattaaagggagcaaagctggcaatcgaagaacggccaatattaaaagtattggctactcagacctgttctgtctctcaaaagatgacctcatggaagctctaactgagtacccagatgccaaaactatgctggaagagaaagggaagcagattttaatgaaagatggtctactggatctaaacattgcaaatgctggcagtgatcctaaagatcttgaagagaaggttactcgaatggaggggtcagtagacctcctgcaaaccaggtttgcccgaatcttggctgagtatgagtccatgcagcagaaactgaaacaaagattaaccaaggttgagaaatttctgaaaccgcttattgacacagaattttcaagtattgagggacctggagcggaaagtgggcccatcgactctacatagaaccgaaaagctggtcattaacagggacatgcctcatgatccttttgatcctatgactgacatcaactaaaatttaaaagaagaggaagactcagttgggaaatttttccatgaggaaaatgtgctttggtgcaaggtacaaggcccacaccctctctgagagatactatgattaaaaaagctttatatcttgggatttttcacaactgataatgtgcaaagatataaactgattaacttgtcagtgtctgtattttctgattttttcacatacgctcattttatgtaatattcttcataaaaatgaataagtagccctcactttcatgccatttccattgttgagtgaagcgtatttgaagtaactgagaattaccatgtacatcatatttgggataacatttttaaaaattagactgcaataaagtaaaattaattatgcaactgtagt

SEQ ID NO: 51076 - DNA, 536 bp, Homo sapiens
cagcgccagccgagccctgctgcccggggcttgttgcgaattctcagggcccccgcaggcctgggagcggcctgtgataactggtgtatctggcaggagtagcagctgccccttggcgcgactgctggagccgcgaactagagaaacacagacacgcctcatagagcaacggcgtctctcggagcgtggagcccgccaaggtaactccgggaattgagtggagtggaggctgcactgaggcccccttctggctcctctctggtcgaaaaggctcccccgctagagagagccctgctgcttttggaagccttcaggtgttagttgctttgcaccgaagctgctgactgctggggttctgcgccgattgccaggctcaagtttattttgggggctgctgagcagactttgcccttctgtgctgttatcagcttctgtcgctgtccgtccacgcccgctatatccatccactctccgttctgtctccagcaggcaactccccctaccctgccccattttctgggtcataggggtatttg

SEQ ID NO: 51077 - DNA, 2630 bp, Homo sapiens
  misc_feature (554)..(554): n is a, c, g, or t
  misc_feature (556)..(557): n is a, c, g, or t
  misc_feature (559)..(559): n is a, c, g, or t
tattagcagcatgaggacagactaatacatagggtgaaacttttgattatatatgtaaatatataaaaatagcctttccactaataagacttctttctcctcagatatgaaactatccatgaagaacaatattatcaatacacagcagtcttttgtaaccatgcccaatgtgattgtaccagatattgaaaaggaaatacgaaggatggaaaatggagcatgcagctccttttctgaggatgatgacagtgcctctacatctgaagaatcagagaatgaaaaccctcatgcaaggggttcctttagttataagtcactcagaaagggaggaccatcacagagggagcagtacctgcctggtgccattgcactttttaatgtgaacaacagcagcaataaggaccaggaaccagaagagaaaaagaaaaagaaaaaagaaaagaagagcaagtcagatgataaaaacgaaaataaaaacgacccagagaagaaaaagaagaaaaaggacaaagagaagaaaaagaaagaggagaaaagcaaagataagaaagaanannanaagaaagaagttgtggttattgatccctcgggaaacacatattacaactggctgttttgcatcacattacctgttatgtacaactggacaatggttattgccagagcatgttttgatgaacttcaatctgattacctagaatattggctcattttggattacgtatcagacatagtctatttaatcgatatgtttgtacgaacaaggacaggttacctagaacaaggactgctggtaaaggaagaacttaaactcataaataaatataaatccaacttgcaatttaaacttgatgttctgtcactgataccaactgatttgctgtattttaagttagggtggaactatccagaaattagattaaacaggttgttacggttctctcgtatgtttgagttcttccagagaacagaaacaaggacaaactatccaaacatcttcaggatttccaaccttgttatgtatatcgtcatcattatccactggaatgcatgtgtgttctactctatttctaaagctattggatttggaaatgatacatgggtctaccctgatattaatgatcctgaatttggccgtttggctagaaaatacgtatacagcctttactggtctacactgactttgactaccattggtgaaacaccccctcccgtgagggattctgagtatgtctttgtggtggttgatttcctaattggagtgttaatttttgctaccatcgttggtaacataggttctatgatttccaacatgaatgcagccagagcagaatttcaagcaagaattgatgctatcaagcaatatatgcattttcgaaatgtaagcaaagatatggaaaagagggttattaaatggtttgactacctgtggaccaacaaaaaaacagttgatgagaaagaagtcttaaagtatctacctgataaactaagagcagaaattgccatcaacgttcacttagacacattaaaaaaggtacgcatttttgctgattgtgaagctggtctgttggtggagttggtcttgaaattgcaaccccaagtctacagtcctggagattatatttgcaagaaaggggatatcggacgagagatgtacattatcaaggaaggcaaactcgctgtggtggcagatgatggagtcactcagtttgtggtattgagcgatggcagctacttcggtgagatcagcattcttaacattaaagggagcaaagctggcaatcgaagaacggccaatattaaaagtattggctactcagacctgttctgtctctcaaaagatgacctcatggaagctctaactgagtacccagatgccaaaactatgctggaagagaaagggaagcagattttaatgaaagatggtctactggatctaaacattgcaaatgctggcagtgatcctaaagatcttgaagagaaggttactcgaatggaggggtcagtagacctcctgcaaaccaggtttgcccgaatcttggctgagtatgagtccatgcagcagaaactgaaacaaagattaaccaaggttgagaaatttctgaaaccgcttattgacacagaattttcaagtattgagggacctggagcggaaagtgggcccatcgactctacatagaaccgaaaagctggtcattaacagggacatgcctcatgatccttttgatcctatgactgacatcaactaaaatttaaaagaagaggaagactcagttgggaaatttttccatgaggaaaatgtgctttggtgcaaggtacaaggcccacaccctctctgagagatactatgattaaaaaagctttatatcttgggatttttcacaactgataatgtgcaaagatataaactgattaacttgtcagtgtctgtattttctgattttttcacatacgctcattttatgtaatattcttcataaaaatgaataagtagccctcactttcatgccatttccattgttgagtgaagcgtatttgaagtaactgagaattaccatgtacatcatatttgggataacatttttaaaaattagactgcaataaagtaaaattaattatgcaactgtagt

SEQ ID NO: 51078 - DNA, 2933 bp, Homo sapiens
  misc_feature (857)..(857): n is a, c, g, or t
  misc_feature (859)..(860): n is a, c, g, or t
  misc_feature (862)..(862): n is a, c, g, or t
cagcgccagccgagccctgctgcccggggcttgttgcgaattctcagggcccccgcaggcctgggagcggcctgtgataactggtgtatctggcaggagtagcagctgccccttggcgcgactgctggagccgcgaactagagaaacacagacacgcctcatagagcaacggcgtctctcggagcgtggagcccgccaagctcgagctgagctttcgcttgccgtccaccactgcccacactgtcgtttgctgccatcgcagacctgctgctgacttccatccctctggatccggcaagggcctggattttgacaatgtcaagatttaccgtatatccctgtttgtttggatacaccagtgacgtccacttctagaagacaaagttatattacttaaacaaccaaagatatgaaactatccatgaagaacaatattatcaatacacagcagtcttttgtaaccatgcccaatgtgattgtaccagatattgaaaaggaaatacgaaggatggaaaatggagcatgcagctccttttctgaggatgatgacagtgcctctacatctgaagaatcagagaatgaaaaccctcatgcaaggggttcctttagttataagtcactcagaaagggaggaccatcacagagggagcagtacctgcctggtgccattgcactttttaatgtgaacaacagcagcaataaggaccaggaaccagaggaaaaaaagaaaaagaaaaaagaaaagaagagcaagtcagatgataaaaacgaaaataaaaacgacccagagaagaaaaagaagaaaaaggacaaagagaagaaaaagaaagaggagaaaagcaaagataagaaagaanannanaagaaagaagttgtggttattgatccctcgggaaacacatattacaactggctgttttgcatcacattacctgttatgtacaactggacaatggttattgccagagcatgttttgatgaacttcaatctgattacctagaatattggctcattttggattacgtatcagacatagtctatttaatcgatatgtttgtacgaacaaggacaggttacctagaacaaggactgctggtaaaggaagaacttaaactcataaataaatataaatccaacttgcaatttaaacttgatgttctgtcactgataccaactgatttgctgtattttaagttagggtggaactatccagaaattagattaaacaggttgttacggttctctcgtatgtttgagttcttccagagaacagaaacaaggacaaactatccaaacatcttcaggatttccaaccttgttatgtatatcgtcatcattatccactggaatgcatgtgtgttctactctatttctaaagctattggatttggaaatgatacatgggtctaccctgatattaatgatcctgaatttggccgtttggctagaaaatacgtatacagcctttactggtctacactgactttgactaccattggtgaaacaccccctcccgtgagggattctgagtatgtctttgtggtggttgatttcctaattggagtgttaatttttgctaccatcgttggtaacataggttctatgatttccaacatgaatgcagccagagcagaatttcaagcaagaattgatgctatcaagcaatatatgcattttcgaaatgtaagcaaagatatggaaaagagggttattaaatggtttgactacctgtggaccaacaaaaaaacagttgatgagaaagaagtcttaaagtatctacctgataaactaagagcagaaattgccatcaacgttcacttagacacattaaaaaaggtacgcatttttgctgattgtgaagctggtctgttggtggagttggtcttgaaattgcaaccccaagtctacagtcctggagattatatttgcaagaaaggggatatcggacgagagatgtacattatcaaggaaggcaaactcgctgtggtggcagatgatggagtcactcagtttgtggtattgagcgatggcagctacttcggtgagatcagcattcttaacattaaagggagcaaagctggcaatcgaagaacggccaatattaaaagtattggctactcagacctgttctgtctctcaaaagatgacctcatggaagctctaactgagtacccagatgccaaaactatgctggaagagaaagggaagcagattttaatgaaagatggtctactggatctaaacattgcaaatgctggcagtgatcctaaagatcttgaagagaaggttactcgaatggaggggtcagtagacctcctgcaaaccaggtttgcccgaatcttggctgagtatgagtccatgcagcagaaactgaaacaaagattaaccaaggttgagaaatttctgaaaccgcttattgacacagaattttcaagtattgagggacctggagcggaaagtgggcccatcgactctacatagaaccgaaaagctggtcattaacagggacatgcctcatgatccttttgatcctatgactgacatcaactaaaatttaaaagaagaggaagactcagttgggaaatttttccatgaggaaaatgtgctttggtgcaaggtacaaggcccacaccctctctgagagatactatgattaaaaaagctttatatcttgggatttttcacaactgataatgtgcaaagatataaactgattaacttgtcagtgtctgtattttctgattttttcacatacgctcattttatgtaatattcttcataaaaatgaataagtagccctcactttcatgccatttccattgttgagtgaagcgtatttgaagtaactgagaattaccatgtacatcatatttgggataacatttttaaaaattagactgcaataaagtaaaattaattatgcaactgtagt

SEQ ID NO: 51079 - DNA, 759 bp, Homo sapiens
gcatctttttacactttattcttagtttgaactcctaaatttgttgacgttgaacagctttgggtattacatattccagagtattctgaatttctttagatgagcttttcggattccgaagtcagtttgacatgctgcggtttcaaacagttcaatcattagagatgcgcattaaatccttacctttttgtttttattttcccattggcatggccaagagccattaaggaaatgcttttttcttttgaaaaaaatcatatcaatcatatatcagtcacatgagcatttaaaagattggtgcaaagaaacccaagatttacagtttatacaaagcaatatgcaacacaacaatattttgctctcaaaaataaagcagatcataataagacaatgtcagtaaatgtctttaataagatgtatcactgaattgtttcgaaaacttacagctgttcatggccctgggccattagaaaaccctagtttatgtatatttctttttcctacatggcttatttgaattacccaaacaagcaatgaactcaaactggcttaacaataaggaaatttattatttcacaagttatcaaagtgatttcaggtactatataatcaatagctcagtgatgacatcaaggtccaactttctattcctagttcattctgttatccttgatgtcggcttctcctctatggctgggtctttttggggtcataagatggctgctagtggcagttagagttatgtccttccctttggcc

SEQ ID NO: 51080 - DNA, 303 bp, Homo sapiens
atctttattatggaaatgaacaattatcaaaatactaactgcagtagcaaataacaagcccaagagtgtccaaaccaaaacagtcagggtgccttctactctcaagccagtcaactgggcttgtccaaactgcaacaaatggaaatttctttggaattcccccagattgagaggagagactcctgctgtcagggacccatagagagcactcacctgtctggatgcagatgtcagatttcaaagcctgttcttcctaggcaatcaggaatgcaattggggctggcagtggtgatgcagaagaga

SEQ ID NO: 51081 - DNA, 281 bp, Homo sapiens
tgggattacaggcgcccgacaccacgcccagctaatttttgtattttcagtagagatggtgtttcaccatgttgaccaggctgatctcaaactcctgacttcaggtgatccacctgccttggcctcccaaaatgctgggattacaagcgtgagccaccgcgcctggccaaaacgcatttctgttggtgtactgcaggtcagttctttgagtagtcttggactaatccagttatttctcctttctcacttttagttatcaagaataactgtaggatatgctt

SEQ ID NO: 51082 - DNA, 415 bp, Homo sapiens
ttctttgtgcatatcttacataaggactaagcccagaagactacacttgctaagaataactcaaaaaggtaggttatcatctaatatgatcctagcacagcagtaacaaaaacaattatctgacctttcacattagataagaatgtttcacaacaaatagtaccgacaagtattacactttacagtttacaaaagcccaaaatttcataaccaccctgcaaattagtaggcaagagagacatcactaatccccatttgaaagataaggaacccagtgattcctgtgcattctgtgatggcagatttaccacatctgccaaatgatgaaatactgtcataactcttacagtaatgcatctccttcaaactttagatatgaatgaagagttaaacacatttcatattgctttagctc

SEQ ID NO: 51083 - DNA, 296 bp, Homo sapiens
ctgggaccaaggtcaccgtcctaggtaagtggctctcaacctttcccagcctgtctcaccctctgctgtccctggaaaatctgttttctctctctggggcttcctcccctctgtcctcccagccttaagcactgacccttacctttctccatggggcctggaggaggtgcattagtctccgggtaaccggcaggaagggcctccacagtgggagcagccggatgcagcctggtcccagggcctgagctgggattgggcagggtcagggctcctcctctcttccagggcagatgtct

SEQ ID NO: 51084 - DNA, 516 bp, Homo sapiens
taagagcccgcggattttaaacaggaaaaagaaagggcggagcaaactctggcggatagttgtgagtaatccctggtccttggaataagtgtcgacctgagacagaaggggaactgtcagagagctgccggagaccctgaaaaaggccagagacggggacttgtggggctgacgaatggaatcacccaaggagaggtctctgactctaacaaaacaccttggggacggagctccttggctgggatacagagcagaaacaagtccgggatcttttagtgaattgctgccggcttctaaggcctggagcagatattcaacaacaaactccacggacctagaaactctccacttatcctactattgtagacggtggcttacttttagtcttccctatgctctaagcttctggtagtaggaatcgtgcctaactcactactgtatcttgtgaacctagccccgcgcctggtggcacgtcaaattctcggtaaatatttgtggattaaatgtgaaagactg

SEQ ID NO: 51085 - DNA, 625 bp, Homo sapiens
taagagcccgcggattttaaacaggaaaaagaaagggcggagcaaactctggcggatagttgtgagtaatccctggtccttggaataagtgtcgacctgagacagaaggggaactgtcagagagctgccggagaccctgaaaaaggccagagacggggacttgtggggctgacgaatggaatcacccaaggagaggtctctgactctaacaaaacaccttggggacggagctccttggctgggatacagagcagaaacaagtccgggatcttttagtgaattgctgccggcttctaaggcctggagcagatattcaacaacaaactccacggacctagaaactctccacttatcctactattgtagacggtggcttacttttagtcttccctatgctctaagcttctggtagtaggaatcgtgcctaactcactactgtatcttgtgaacctagccccgcgcctggtggcacgtcaaattctcggtaaatatttgtggattaaatgtgaaagactgcctgagtgtttaacctggattttctgagtcgctgatggagaacagtaggtagacggggaaccagcgccctctggtgggcttgtggttcgtgacgagaacatgctggaac

SEQ ID NO: 51086 - DNA, 469 bp, Homo sapiens
agtaaccattccctgacctcaaattctgaggtcatcgtatcaaagcctcctatgcactcattgttttctacttctgagaacatctgcccagcctggatggctctcttttgtataacatcccagcattgtctggctttgctcactggtcacagccagggttctcatgctcatctagtccttccctcaccttcacccatgtcaatgacttgcttaattacttaatttctgcttaattttttgatagcctgaatgaaatggtcctatcctcttcctgaatcatcctatgtaggtgctctccaaatcctggccttgtcactgggtgactggcagaaagataggaccattgacagaacagtgaggtcaagggggagctgacaagagggaaaagataagttaatttacaacacaattagtataagcagaggtgatgtttaggtggttacagataaggaactagaactctagtttg

SEQ ID NO: 51087 - DNA, 2645 bp, Homo sapiens
gctactcctcccccaagagcggtggcaccgagggagttggggtggggggaggctgagcgctctggctgggacagctagagaagatggcccaggctggggaagtcgctctcatgccttgctgtcccctcccctgagccaggtgatttgggagaccccctccttccttctttccctaccgccccacgcgcgacccggggatggctccgtggcctcacgagaacagctctcttgccccatggccggacctccccaccctggcgcccaataccgccaacaccagtgggctgccaggggttccgtgggaggcggccctagccggggccctgctggcgctggcggtgctggccaccgtgggaggcaacctgctggtcatcgtggccatcgcctggactccgagactccagaccatgaccaacgtgttcgtgacttcgctggccgcagccgacctggtgatgggactcctggtggtgccgccggcggccaccttggcgctgactggccactggccgttgggcgccactggctgcgagctgtggacctcggtggacgtgctgtgtgtgaccgccagcatcgaaaccctgtgcgccctggccgtggaccgctacctggctgtgaccaacccgctgcgttacggcgcactggtcaccaagcgctgcgcccggacagctgtggtcctggtgtgggtcgtgtcggccgcggtgtcgtttgcgcccatcatgagccagtggtggcgcgtaggggccgacgccgaggcgcagcgctgccactccaacccgcgctgctgtgccttcgcctccaacatgccctacgtgctgctgtcctcctccgtctccttctaccttcctcttctcgtgatgctcttcgtctacgcgcgggttttcgtggtggctacgcgccagctgcgcttgctgcgcggggagctgggccgctttccgcccgaggagtctccgccggcgccgtcgcgctctctggccccggccccggtggggacgtgcgctccgcccgaaggggtgcccgcctgcggccggcggcccgcgcgcctcctgcctctccgggaacaccgggccctgtgcaccttgggtctcatcatgggcaccttcactctctgctggttgcccttctttctggccaacgtgctgcgcgccctggggggcccctctctagtcccgggcccggctttccttgccctgaactggctaggttatgccaattctgccttcaacccgctcatctactgccgcagcccggactttcgcagcgccttccgccgtcttctgtgccgctgcggccgtcgcctgcctccggagccctgcgccgccgcccgcccggccctcttcccctcgggcgttcctgcggcccggagcagcccagcgcagcccaggctttgccaacggctcgacggggcttcttggggagtttcttaggcctgaaggacaagaagcaacaactctgttgatcagaacctgtggaaaacctctggcctctgttcagaatgagtcccatgggattccccggctgtgacactctaccctccagaacctgacgactgggccatgtgacccaaggagggatccttaccaagtgggttttcaccatcctcttgctctctgtctgagagatgttttctaaaccccagccttgaacttcactcctccctcagtggtagtgtccaggtgccgtggagcagcaggctggctttggtaggggcacccatcacccggcttgcctgtgcagtcagtgagtgcttagggcaaagagagctcccctggttccattccttctgccacccaaaccctgatgagaccttagtgttctccaggctctgtggcccaggctgagagcagcagggtagaaaagaccaagatttggggttttatctctggttcccttattactgctctcaagcagtggcctctctcactttagccatggaatggctccgatctacctcacagcagtgtcagaaggacttcgccagggttttgggagctccagggttcataagaaggtgaaccattagaacagatcccttcttttccttttgcaatcagataaataaatatcactgaatgcagttcatcctcggcccactttccctccgtttgttttcttttcataatccacttactcccttcccttctactctgcgctggcttttgacagaggcagtaaattaggcctaatcctcactcttttcttcctaatcttcatcaaacaaaaaatgaaaagtctgtctggacgaaggggagtgagcttgagcctttgatatcttgctcccccacccttcctgaaactcttgaaatccagttgccattgagtagcaaagccacgctccccacaggacttggacagagggcccacagggggatgggctggctgtggccaggtttagggcagggggcatttgtcccctccatgctataatccagtggtgccttacatggtgtgtgtgtgtgtgtgtgcgtgtgtgtgtgtgtgtgtgtgtctggaggcacaggcacaaagcattgcttgggttggtcaaatgtcttgtgtcataaatatattctgatgtttcccagcctttccacaacctctaccttcccactcaccttccccagctacaaaaatctgtattatcctcttaaagtaaaactggagttaca

SEQ ID NO: 51088 - DNA, 201 bp, Homo sapiens
tgatggcatggctagacttttacaactttggatcctctggcaatgcatatatctgtcaaatcagcccacactaaagcacagcaataagaggcatgggggtgagggagcgatcaggacaatcctaaaccttggcattttttccagatgagatcgggtgcagtcagggtagtatggcatgcagacatttgtgtttttttcaaa

SEQ ID NO: 51089 - DNA, 367 bp, Homo sapiens
caaacaaaacaaccaaatactctgttcttaacatttcatcgtcttccaaaacgacactttcttagcaacttcaaagtggcaactgatggtttggtaacgatataataacaaggaataactcctatattcttaagagactcagaatttcaattcttaccacatatacatctattttcttaattaaaacaaaaagtcccagataaagtgtaatgcccagaacttgaattttaatgaatgcaaatgagcccaaagtgagaataatcagctgaagttctaggatggaatatttgtcttgtatttaccttggaagccactagcttttactcaactataaaagaagcctcaggagtgaatataaaaagaaaaa

SEQ ID NO: 51090 - DNA, 242 bp, Homo sapiens
ggggacagaggactcaagagcccgagggaccccagaagagggctgtagaggtgagaaattgagggcaagtctccctgggctgggaagggcccaagctgtgatttggggtccagcactgacacaaacacgacaacagggggcgactgaggtgcagaagtggaaaaagcaggtcgggcgtggtgtaatcccagcgccttgggaggctgagggggaggactgcttgaggccaggagtttgagatc

SEQ ID NO: 51091 - DNA, 2282 bp, Homo sapiens
ccccgagtctctgcgccttcacatagttgtcacaggactaaagcaaattgatccagggggaaacactgtagaccgtgtatataaaaacactctataaactgcaatgctcaattcttagtataactattgttgttgtattgatatttattagtattggtgctcacaaaaagagtctaaattccataagtctttatattcaggctactctttatttttgaaaactcattttctatcacctttttctattttactccatattgaggcctcataaatccaattttttatttctttcttttgtaaatgtggtttctacaaagatgaaactactaaaacttacaggttttatttttttcttgttttttttgactgaatccctaaccctgcccacacaacctcgggatatagagaacttcaatagtactcaaaaatttatagaagataatattgaatacatcaccatcattgcatttgctcagtatgttcaggaagcaacctttgaagaaatggaaaagctggtgaaagacatggtagaatacaaagacagatgtatggctgacaagacgctcccagagtgttcaaaattacctaataatgttttacaggaaaaaatatgtgctatggaggggctgccacaaaagcataatttctcacactgctgcagtaaggttgatgctcaaagaagactctgtttcttctataacaagaaatctgatgtgggatttctgcctcctttccctaccctggatcccgaagagaaatgccaggcttatgaaagtaacagagaatcccttttaaatcactttttatatgaagttgccagaaggaacccatttgtcttcgcccctacacttctaactgttgctgttcattttgaggaggtggccaaatcatgttgtgaagaacaaaacaaagtcaactgccttcaaacaagggcaatacctgtcacacaatatttaaaagcattttcttcttatcaaaaacatgtctgtggggcacttttgaaatttggaaccaaagttgtacactttatatatattgcgatactcagtcaaaaattccccaagattgaatttaaggagcttatttctcttgtagaagatgtttcttccaactatgatggatgctgtgaaggggatgttgtgcagtgcatccgtgacacgagcaaggttatgaaccatatttgttcaaaacaagattctatctccagcaaaatcaaagagtgctgtgaaaagaaaataccagagcgcggccagtgcataattaactcaaacaaagatgatagaccaaaggatttatctctaagagaaggaaaatttactgacagtgaaaatgtgtgtcaagaacgagatgctgacccagacaccttctttgcgaagtttacttttgaatactcaaggagacatccagacctgtctataccagagcttttaagaattgttcaaatatacaaagatctcctgagaaattgctgcaacacagaaaaccctccaggttgttaccgttacgcggaagacaaattcaatgagacaactgagaaaagcctcaagatggtacaacaagaatgtaaacatttccagaatttggggaaggatggtttgaaataccattacctcatcaggctcacgaagatagctccccaactctccactgaagaactggtgtctcttggcgagaaaatggtgacagctttcactacttgctgtacgctaagtgaagagtttgcctgtgttgataatttggcagatttagtttttggagagttatgtggagtaaatgaaaatcgaactatcaaccctgctgtggaccactgctgtaaaacaaactttgccttcagaaggccctgctttgagagtttgaaagctgataaaacatatgtgcctccacctttctctcaagatttatttacctttcacgcagacatgtgtcaatctcagaatgaggagcttcagaggaagacagacaggtttcttgtcaacttagtgaagctgaagcatgaactcacagatgaagagctgcagtctttgtttacaaatttcgcaaatgtagtggataagtgctgcaaagcagagagtcctgaagtctgctttaatgaagagagtccaaaaattggcaactgaagccagctgctggagatatgtaaagaaaaaagcaccaaagggaaggcttcctatctgtgtggtgatgaatcgcatttcctgagaacaaaataaaaggatttttctgtaactgtcacctgaaataatacattgcagcaagcaataaacacaacattttgtaaagtt

SEQ ID NO: 51092 - DNA, 452 bp, Homo sapiens
gagcatggcctgtttctgggagtggtcagtgctttacttggagttagttaaactctgcatggacagagcctggtgttccttgcttcctctccagcatctaccccagcacttggcacttggcaatcaaaagacacttgtcagcgggccagtaaggctaggatatcagccccactaactatttgggagattctattcaatactgtaagataagaaaatcatagaaggactattaagaaggagaaaagattattataattgttttcaaaatctggaaggcccaagagtaagcatatcagctgataaactctaagaattaataaaggaaaaagctgatgaattataaacacataattctcatatatcttttttcatatattattctcatatatttcatatattagtattgaccacttggaaaatatgtctataaacatcttattcataacagcatc

SEQ ID NO: 51093 - DNA, 286 bp, Homo sapiens
gtaaaatactgatcctgacaagcaaaaatcactttggtacatcacataacaataaatgtgtttttattttttcatatatttatgttgagatactcagttttctgaaattattattagtgaaagtaaatcagccgtaataaggcactacagtcattttaatttatatctggactgttttctctcagatatgaaaccttaaaaatagaagtgaactttaaaactgagtccaaccttgcattctgttgaaaatagactaccaaaagttaagtgatgtgacagtgtctat

SEQ ID NO: 51094 - DNA, 510 bp, Homo sapiens
tgtgaatcacagtgacctgaacattactcaatgccttccttattaaaaacatgaaatcggtgctaagaatctacttatttcctaaggaccatacagcatgtggaaaggattaaaaaactggatgaagtattttttaatacagcaattttccaacaagggaaaaatatccccagtaaccgtttcatcccttctaccaactcggagattatgatctccattataagaaagcacttaacaaacttgagggattaaagaaacatttccctgcaatttcaaaaatctttaccaacgtatcccgcagcagtgaattaatatccaattacaattcaaaatagagagagaatgttcagatgaacctttttaaacaaggtaaataatacaaccctgattagtaggcagagcagaaaaccatcaacaaaagctcaaagcaaacagaagttatctccccttttcagcttgaaaagcaaagtaacagaaatgtttgataacagaaagcggtgtactttccca

SEQ ID NO: 51095 - DNA, 361 bp, Homo sapiens
ggttgtcaaaacttgagcccactacacttctagtagtttgccttctctggatgtatttttcacacagtaaatgaaggaaccaactataatattctaagataaatacttgagctctatatcataacttgcattcaaaaataaatctatatcctatatttctctgatccttctaaaaaatcctcagaaggagttaagtcagcattattactttcagctttagaaggacaaaattaacttttatacaagatacgtgatctatctaaaatcacacagctgatacatagctgagtcagaatttgaacccaattttttcagatttcaatttcagcagtttcttcaacactgtatctaatgctaaacc

SEQ ID NO: 51096 - DNA, 2556 bp, Homo sapiens
caggccctgggccgccagctggtgatgctaccctgctcacctcagatagaggctcaatgcctgagcaactatctgaatggtgccctgcagggtggtgcctggctgctgttggagaaagttcatcagctgccccctggcttgctctctgccctgggccagcgcctgggtgaactgcaccacttgtatgccccactgtaccaggaggcttcccgaaacacaagcaccatagaccccacccagccccagctccttggcagtagcttctttgaaaaacatcacgtgtctgtgcgccttggctatggctgtctcctggtactgcgtgccctgagctctgctgtgcctgccaacctgcacctgctgctgcggcctgtggcattggcattgcctgatctgcggcaagtggcagagctgactctgctgggtgcagggatgagggatgccttccagatggctacccgcctatccaaattcttctctctagagcgtgagctggtgtctgggcccctgccctgccgcctgccactgctcaagcagatactggaagacacaatacggacactaaatgtgaccaaggaggaaccgaagtgccagaagcctcgcagcctagctgccattgaggaggctgccctactgcgctcaccactgtttagcattctcaatgggctccacctgcacaacctccgagggctgttgtgtgcgcttttccctagcgccagccaagtgctggcagaacctatgacttacaagctgatgaagccattggtggtggaggaactgcaacaggtaggtctggatcccagccctgacattttggggtccttggaacagttgagccaggccctgagccgggcctcaggcattctgctcctgggccctgcgggcagcggcaagaccacttgttggcacagcttatttaagatccagaatcggctggcagccatggaggacacctcaacccaaggctgccagcctgtggaaattacccacctgtaccccagtggcctcagcccccaggagttcctgggatggctagagggctcctgctggcatcatggcatctttcccaaggtacttcgtgcagccggtcagtgtaacaacatgggccaaaagaggcagacagaggaatcaatcgggatccagcactggataatatgtgatggagcctccaatggtgcttggctggactccatcacttgcctcctgagtgagcttccccagcttagtctccccagtggacagcagatagcacgacccccaggcacctttctcttgatggaggtggctgacacaacaggcatatcccccacagtggtaggctgttgtgccctagtctggtgtggtggagagcagacttggcagtgtatacttagtgccctgatggcatcccttccttatgagtaccgcctgcagcaccggacagtcgctgagctcaaccacatggctgaggttctggtgcctgcaacattgcgattcctcacctgccaaggtgtcagctctctgctgcaggtacacgggcagcaggctgtttgtgcaggtgtggcagaagttaccagcatggcacgcatcttgcatagtctgcttgacctccaccttcgcctaaaggaggagaaggcccctggcccagaggacctcagctatagtgatcctgtggcccaaagcttcaggtcttcaaaaagcagctttctaaaccggtcccaggttgacagtgacgatgtgccagataagtgcagggaacacttgctggctgtcagcagttttctttttgccttgatctggggctttggagcccaccttccctccaggtacctaccaggatgggggatgggagatgcagagggctgagatggactggcccatggaagtaaaaacccacatgacatcactgttagggtatggtggagtgtgtgagtgtgtcataaatggaagtgttgtaactgtctgacgcttttgcctgtgtgtccatctgagcaggttctggcccatctttgataccttcataagggattctattagtcgcctctccaactaccctgagccaccaccctcagccttggtgtttgatctacatgtaagccctgaagatggaacactggtccccttcactggccaatacctgagcagccacatcaaaggaactttgggcacctttcacccttctatccagactgaacggctcttgtatgtggtggacctgcttctgtcagggggacagccagtgttgctggctggagaggcagcaacagggaagtcagcctttgtggaggtgctggtagagccacatcacccttacatatacagccccatccaccctgccttcagttcctcccacctccgtctcctgctgagcagaggaatccagggccaaacacaagccagcccacagcctgggcatcaccaggattctaaaccctccctcctcttcttgctggaggacctgcacctagccacttctggtgaggagctgcgaagagggaaggaaggagctactgtcatctcttgagactataaaatccctagcaatattcattgactctcaaatatatgtctgtagatcta

SEQ ID NO: 51097 - DNA, 3573 bp, Homo sapiens
caggccctgggccgccagctggtgatgctaccctgctcacctcagatagaggctcaatgcctgagcaactatctgaatggtgccctgcagggtggtgcctggctgctgttggagaaagttcatcagctgccccctggcttgctctctgccctgggccagcgcctgggtgaactgcaccacttgtatgccccactgtaccaggaggcttcccgaaacacaagcaccatagaccccacccagccccagctccttggcagtagcttctttgaaaaacatcacgtgtctgtgcgccttggctatggctgtctcctggtactgcgtgccctgagctctgctgtgcctgccaacctgcacctgctgctgcggcctgtggcattggcattgcctgatctgcggcaagtggcagagctgactctgctgggtgcagggatgagggatgccttccagatggctacccgcctatccaaattcttctctctagagcgtgagctggtgtctgggcccctgccctgccgcctgccactgctcaagcagatactggaagacacaatacggacactaaatgtgaccaaggaggaaccgaagtgccagaagcctcgcagcctagctgccattgaggaggctgccctactgcgctcaccactgtttagcattctcaatgggctccacctgcacaacctccgagggctgttgtgtgcgcttttccctagcgccagccaagtgctggcagaacctatgacttacaagctgatgaagccattggtggtggaggaactgcaacaggtaggtctggatcccagccctgacattttggggtccttggaacagttgagccaggccctgagccgggcctcaggcattctgctcctgggccctgcgggcagcggcaagaccacttgttggcacagcttatttaagatccagaatcggctggcagccatggaggacacctcaacccaaggctgccagcctgtggaaattacccacctgtaccccagtggcctcagcccccaggagttcctgggatggctagagggctcctgctggcatcatggcatctttcccaaggtacttcgtgcagccggtcagtgtaacaacatgggccaaaagaggcagacagaggaatcaatcgggatccagcactggataatatgtgatggagcctccaatggtgcttggctggactccatcacttgcctcctgagtgagcttccccagcttagtctccccagtggacagcagatagcacgacccccaggcacctttctcttgatggaggtggctgacacaacaggcatatcccccacagtggtaggctgttgtgccctagtctggtgtggtggagagcagacttggcagtgtatacttagtgccctgatggcatcccttccttatgagtaccgcctgcagcaccggacagtcgctgagctcaaccacatggctgaggttctggtgcctgcaacattgcgattcctcacctgccaaggtgtcagctctctgctgcaggtacacgggcagcaggctgtttgtgcaggtgtggcagaagttaccagcatggcacgcatcttgcatagtctgcttgacctccaccttcgcctaaaggaggagaaggcccctggcccaggtgggaagatggacgggctggtttgagagagatggggccttaagggtagctggggtatatagctggagcctggggcgtgtgttctttggtggatctgggccaggagtgaaaagtaatactgtcaaccttttttctttctttcaccttccacctttttctactggggctcctctcgtggccatggcaactttcacagaggacctcagctatagtgatcctgtggcccaaagcttcaggtcttcaaaaagcagctttctaaaccggtcccaggttgacagtgacgatgtgccagataagtgcagggaacacttgctggctgtcagcagttttctttttgccttgatctggggctttggagcccaccttccctccaggtacctaccaggatgggggatgggagatgcagagggctgagatggactggcccatggaagtaaaaacccacatgacatcactgttagggtatggtggagtgtgtgagtgtgtcataaatggaagtgttgtaactgtctgacgcttttgcctgtgtgtccatctgagcaggttctggcccatctttgataccttcataagggattctattagtcgcctctccaactaccctgagccaccaccctcagccttggtgtttgatctacatgtaagccctgaagatggaacactggtccccttcactggccaatacctgagcagccacatcaaaggaactttgggcacctttcacccttctatccagactgaacggctcttgtatgtggtggacctgcttctgtcagggggacagccagtgttgctggctggagaggcagcaacagggaagtcagcctttgtggaggtgctggtagagccacatcacccttacatatacagccccatccaccctgccttcagttcctcccacctccgtctcctgctgagcagaggaatccagggccaaacacaagccagcccacagcctgggcatcaccaggattctaaaccctccctcctcttcttgctggaggacctgcacctagccacttctggtgaggagctgcgaagagggaaggaaggagctactgtcatctcttgagactataaaatccctagcaatattcattgactctcaaatatatgtctgtagatctaactttagtgttctgttcttaatatcttctcattctacatatgctccctgaacaatcccatccactctcatggcctcatctctgctttgctaaatctctgtgtccaatctcacttcttttctaagcaccagatctgtctatccagctgtctactgtacgtctccaccttgttgtcctgttggtacctcagacccaaccctgagctcatcatctccccgcggccaaaatctgctcctgtctgtcctcttagtttcaccatccagccagtcatgtaagccagaaatcttgttgacatctcattctccttcaccaatatccagtcaccatgtcttttcaatcctacctccttcatatttcttgaatctttccacttatttccatggttcagatgatctttacttggaaatctgacaaatgctcttacaaagctttctgtgatgaggctttcttctgtgtcctcttacactctctctaattggacttaacaagtcaggcttcctctagaccctgggattgctgtcctctctgccttctctatgtggctaaattctacttattatttctaaattacctaaggcagtagcttctccaggaagcctgatccataggctcggttagatatccatcctgtgctctgtacaataatctgtgataaccatgattttattattgtatgcttgcctatctgtccctttcaccacacttggagatttatgagaacagagaacagaaatttgtctcattcattttggtagacccaacaggaagtaagtgctcaataaaagtttgtagaagacaagataacaaaggaaaggagaaaaa

SEQ ID NO: 51098 - DNA, 3404 bp, Homo sapiens
caggccctgggccgccagctggtgatgctaccctgctcacctcagatagaggctcaatgcctgagcaactatctgaatggtgccctgcagggtggtgcctggctgctgttggagaaagttcatcagctgccccctggcttgctctctgccctgggccagcgcctgggtgaactgcaccacttgtatgccccactgtaccaggaggcttcccgaaacacaagcaccatagaccccacccagccccagctccttggcagtagcttctttgaaaaacatcacgtgtctgtgcgccttggctatggctgtctcctggtactgcgtgccctgagctctgctgtgcctgccaacctgcacctgctgctgcggcctgtggcattggcattgcctgatctgcggcaagtggcagagctgactctgctgggtgcagggatgagggatgccttccagatggctacccgcctatccaaattcttctctctagagcgtgagctggtgtctgggcccctgccctgccgcctgccactgctcaagcagatactggaagacacaatacggacactaaatgtgaccaaggaggaaccgaagtgccagaagcctcgcagcctagctgccattgaggaggctgccctactgcgctcaccactgtttagcattctcaatgggctccacctgcacaacctccgagggctgttgtgtgcgcttttccctagcgccagccaagtgctggcagaacctatgacttacaagctgatgaagccattggtggtggaggaactgcaacaggtaggtctggatcccagccctgacattttggggtccttggaacagttgagccaggccctgagccgggcctcaggcattctgctcctgggccctgcgggcagcggcaagaccacttgttggcacagcttatttaagatccagaatcggctggcagccatggaggacacctcaacccaaggctgccagcctgtggaaattacccacctgtaccccagtggcctcagcccccaggagttcctgggatggctagagggctcctgctggcatcatggcatctttcccaaggtacttcgtgcagccggtcagtgtaacaacatgggccaaaagaggcagacagaggaatcaatcgggatccagcactggataatatgtgatggagcctccaatggtgcttggctggactccatcacttgcctcctgagtgagcttccccagcttagtctccccagtggacagcagatagcacgacccccaggcacctttctcttgatggaggtggctgacacaacaggcatatcccccacagtggtaggctgttgtgccctagtctggtgtggtggagagcagacttggcagtgtatacttagtgccctgatggcatcccttccttatgagtaccgcctgcagcaccggacagtcgctgagctcaaccacatggctgaggttctggtgcctgcaacattgcgattcctcacctgccaaggtgtcagctctctgctgcaggtacacgggcagcaggctgtttgtgcaggtgtggcagaagttaccagcatggcacgcatcttgcatagtctgcttgacctccaccttcgcctaaaggaggagaaggcccctggcccaggtgggaagatggacgggctggtttgagagagatggggccttaagggtagctggggtatatagctggagcctggggcgtgtgttctttggtggatctgggccaggagtgaaaagtaatactgtcaaccttttttctttctttcaccttccacctttttctactggggctcctctcgtggccatggcaactttcacagaggacctcagctatagtgatcctgtggcccaaagcttcaggtcttcaaaaagcagctttctaaaccggtcccaggttgacagtgacgatgtgccagataagtgcagggaacacttgctggctgtcagcagttttctttttgccttgatctggggctttggagcccaccttccctccaggttctggcccatctttgataccttcataagggattctattagtcgcctctccaactaccctgagccaccaccctcagccttggtgtttgatctacatgtaagccctgaagatggaacactggtccccttcactggccaatacctgagcagccacatcaaaggaactttgggcacctttcacccttctatccagactgaacggctcttgtatgtggtggacctgcttctgtcagggggacagccagtgttgctggctggagaggcagcaacagggaagtcagcctttgtggaggtgctggtagagccacatcacccttacatatacagccccatccaccctgccttcagttcctcccacctccgtctcctgctgagcagaggaatccagggccaaacacaagccagcccacagcctgggcatcaccaggattctaaaccctccctcctcttcttgctggaggacctgcacctagccacttctggtgaggagctgcgaagagggaaggaaggagctactgtcatctcttgagactataaaatccctagcaatattcattgactctcaaatatatgtctgtagatctaactttagtgttctgttcttaatatcttctcattctacatatgctccctgaacaatcccatccactctcatggcctcatctctgctttgctaaatctctgtgtccaatctcacttcttttctaagcaccagatctgtctatccagctgtctactgtacgtctccaccttgttgtcctgttggtacctcagacccaaccctgagctcatcatctccccgcggccaaaatctgctcctgtctgtcctcttagtttcaccatccagccagtcatgtaagccagaaatcttgttgacatctcattctccttcaccaatatccagtcaccatgtcttttcaatcctacctccttcatatttcttgaatctttccacttatttccatggttcagatgatctttacttggaaatctgacaaatgctcttacaaagctttctgtgatgaggctttcttctgtgtcctcttacactctctctaattggacttaacaagtcaggcttcctctagaccctgggattgctgtcctctctgccttctctatgtggctaaattctacttattatttctaaattacctaaggcagtagcttctccaggaagcctgatccataggctcggttagatatccatcctgtgctctgtacaataatctgtgataaccatgattttattattgtatgcttgcctatctgtccctttcaccacacttggagatttatgagaacagagaacagaaatttgtctcattcattttggtagacccaacaggaagtaagtgctcaataaaagtttgtagaagacaagataacaaaggaaaggagaaaaa

SEQ ID NO: 51099 - DNA, 445 bp, Homo sapiens
ttttccaagtacagctctaggacaagtcccttagacttttattttcagctagattactgtcttatactggaggtgctgcagtaagtcccacttctgtcttgcagactgaacggctcttgtatgtggtggacctgcttctgtcagggggacagccagtgttgctggctggagaggcagcaacagggaagtcagcctttgtggaggtgctggtagagccacatcacccttacatatacagccccatccaccctgccttcagttcctcccacctccgtctcctgctgagcagaggaatccagggccaaacacaagccagcccacagcctgggcatcaccaggattctaaaccctccctcctcttcttgctggaggacctgcacctagccacttctggtgaggagctgcgaagagggaaggaaggagctactgtcatctcttgagacta

SEQ ID NO: 51100 - DNA, 3030 bp, Homo sapiens
caggccctgggccgccagctggtgatgctaccctgctcacctcagatagaggctcaatgcctgagcaactatctgaatggtgccctgcagggtggtgcctggctgctgttggagaaagttcatcagctgccccctggcttgctctctgccctgggccagcgcctgggtgaactgcaccacttgtatgccccactgtaccaggaggcttcccgaaacacaagcaccatagaccccacccagccccagctccttggcagtagcttctttgaaaaacatcacgtgtctgtgcgccttggctatggctgtctcctggtactgcgtgccctgagctctgctgtgcctgccaacctgcacctgctgctgcggcctgtggcattggcattgcctgatctgcggcaagtggcagagctgactctgctgggtgcagggatgagggatgccttccagatggctacccgcctatccaaattcttctctctagagcgtgagctggtgtctgggcccctgccctgccgcctgccactgctcaagcagatactggaagacacaatacggacactaaatgtgaccaaggaggaaccgaagtgccagaagcctcgcagcctagctgccattgaggaggctgccctactgcgctcaccactgtttagcattctcaatgggctccacctgcacaacctccgagggctgttgtgtgcgcttttccctagcgccagccaagtgctggcagaacctatgacttacaagctgatgaagccattggtggtggaggaactgcaacaggtaggtctggatcccagccctgacattttggggtccttggaacagttgagccaggccctgagccgggcctcaggcattctgctcctgggccctgcgggcagcggcaagaccacttgttggcacagcttatttaagatccagaatcggctggcagccatggaggacacctcaacccaaggctgccagcctgtggaaattacccacctgtaccccagtggcctcagcccccaggagttcctgggatggctagagggctcctgctggcatcatggcatctttcccaaggtacttcgtgcagccggtcagtgtaacaacatgggccaaaagaggcagacagaggaatcaatcgggatccagcactggataatatgtgatggagcctccaatggtgcttggctggactccatcacttgcctcctgagtgagcttccccagcttagtctccccagtggacagcagatagcacgacccccaggcacctttctcttgatggaggtggctgacacaacaggcatatcccccacagtggtaggctgttgtgccctagtctggtgtggtggagagcagacttggcagtgtatacttagtgccctgatggcatcccttccttatgagtaccgcctgcagcaccggacagtcgctgagctcaaccacatggctgaggttctggtgcctgcaacattgcgattcctcacctgccaaggtgtcagctctctgctgcaggtacacgggcagcaggctgtttgtgcaggtgtggcagaagttaccagcatggcacgcatcttgcatagtctgcttgacctccaccttcgcctaaaggaggagaaggcccctggcccaggttctggcccatctttgataccttcataagggattctattagtcgcctctccaactaccctgagccaccaccctcagccttggtgtttgatctacatgtaagccctgaagatggaacactggtccccttcactggccaatacctgagcagccacatcaaaggaactttgggcacctttcacccttctatccagactgaacggctcttgtatgtggtggacctgcttctgtcagggggacagccagtgttgctggctggagaggcagcaacagggaagtcagcctttgtggaggtgctggtagagccacatcacccttacatatacagccccatccaccctgccttcagttcctcccacctccgtctcctgctgagcagaggaatccagggccaaacacaagccagcccacagcctgggcatcaccaggattctaaaccctccctcctcttcttgctggaggacctgcacctagccacttctggtgaggagctgcgaagagggaaggaaggagctactgtcatctcttgagactataaaatccctagcaatattcattgactctcaaatatatgtctgtagatctaactttagtgttctgttcttaatatcttctcattctacatatgctccctgaacaatcccatccactctcatggcctcatctctgctttgctaaatctctgtgtccaatctcacttcttttctaagcaccagatctgtctatccagctgtctactgtacgtctccaccttgttgtcctgttggtacctcagacccaaccctgagctcatcatctccccgcggccaaaatctgctcctgtctgtcctcttagtttcaccatccagccagtcatgtaagccagaaatcttgttgacatctcattctccttcaccaatatccagtcaccatgtcttttcaatcctacctccttcatatttcttgaatctttccacttatttccatggttcagatgatctttacttggaaatctgacaaatgctcttacaaagctttctgtgatgaggctttcttctgtgtcctcttacactctctctaattggacttaacaagtcaggcttcctctagaccctgggattgctgtcctctctgccttctctatgtggctaaattctacttattatttctaaattacctaaggcagtagcttctccaggaagcctgatccataggctcggttagatatccatcctgtgctctgtacaataatctgtgataaccatgattttattattgtatgcttgcctatctgtccctttcaccacacttggagatttatgagaacagagaacagaaatttgtctcattcattttggtagacccaacaggaagtaagtgctcaataaaagtttgtagaagacaagataacaaaggaaaggagaaaaa

SEQ ID NO: 51101 - DNA, 2706 bp, Homo sapiens
caggccctgggccgccagctggtgatgctaccctgctcacctcagatagaggctcaatgcctgagcaactatctgaatggtgccctgcagggtggtgcctggctgctgttggagaaagttcatcagctgccccctggcttgctctctgccctgggccagcgcctgggtgaactgcaccacttgtatgccccactgtaccaggaggcttcccgaaacacaagcaccatagaccccacccagccccagctccttggcagtagcttctttgaaaaacatcacgtgtctgtgcgccttggctatggctgtctcctggtactgcgtgccctgagctctgctgtgcctgccaacctgcacctgctgctgcggcctgtggcattggcattgcctgatctgcggcaagtggcagagctgactctgctgggtgcagggatgagggatgccttccagatggctacccgcctatccaaattcttctctctagagcgtgagctggtgtctgggcccctgccctgccgcctgccactgctcaagcagatactggaagacacaatacggacactaaatgtgaccaaggaggaaccgaagtgccagaagcctcgcagcctagctgccattgaggaggctgccctactgcgctcaccactgtttagcattctcaatgggctccacctgcacaacctccgagggctgttgtgtgcgcttttccctagcgccagccaagtgctggcagaacctatgacttacaagctgatgaagccattggtggtggaggaactgcaacaggtaggtctggatcccagccctgacattttggggtccttggaacagttgagccaggccctgagccgggcctcaggcattctgctcctgggccctgcgggcagcggcaagaccacttgttggcacagcttatttaagatccagaatcggctggcagccatggaggacacctcaacccaaggctgccagcctgtggaaattacccacctgtaccccagtggcctcagcccccaggagttcctgggatggctagagggctcctgctggcatcatggcatctttcccaaggtacttcgtgcagccggtcagtgtaacaacatgggccaaaagaggcagacagaggaatcaatcgggatccagcactggataatatgtgatggagcctccaatggtgcttggctggactccatcacttgcctcctgagtgagcttccccagcttagtctccccagtggacagcagatagcacgacccccaggcacctttctcttgatggaggtggctgacacaacaggcatatcccccacagtggtaggctgttgtgccctagtctggtgtggtggagagcagacttggcagtgtatacttagtgccctgatggcatcccttccttatgagtaccgcctgcagcaccggacagtcgctgagctcaaccacatggctgaggttctggtgcctgcaacattgcgattcctcacctgccaaggtgtcagctctctgctgcaggtacacgggcagcaggctgtttgtgcaggtgtggcagaagttaccagcatggcacgcatcttgcatagtctgcttgacctccaccttcgcctaaaggaggagaaggcccctggcccaggtgggaagatggacgggctggtttgagagagatggggccttaagggtagctggggtatatagctggagcctggggcgtgtgttctttggtggatctgggccaggagtgaaaagtaatactgtcaaccttttttctttctttcaccttccacctttttctactggggctcctctcgtggccatggcaactttcacagaggacctcagctatagtgatcctgtggcccaaagcttcaggtcttcaaaaagcagctttctaaaccggtcccaggttgacagtgacgatgtgccagataagtgcagggaacacttgctggctgtcagcagttttctttttgccttgatctggggctttggagcccaccttccctccaggtacctaccaggatgggggatgggagatgcagagggctgagatggactggcccatggaagtaaaaacccacatgacatcactgttagggtatggtggagtgtgtgagtgtgtcataaatggaagtgttgtaactgtctgacgcttttgcctgtgtgtccatctgagcaggttctggcccatctttgataccttcataagggattctattagtcgcctctccaactaccctgagccaccaccctcagccttggtgtttgatctacatgtaagccctgaagatggaacactggtccccttcactggccaatacctgagcagccacatcaaaggaactttgggcacctttcacccttctatccagactgaacggctcttgtatgtggtggacctgcttctgtcagggggacagccagtgttgctggctggagaggcagcaacagggaagtcagcctttgtggaggtgctggtagagccacatcacccttacatatacagccccatccaccctgccttcagttcctcccacctccgtctcctgctgagcagaggaatccagggccaaacacaagccagcccacagcctgggcatcaccaggattctaaaccctccctcctcttcttgctggaggacctgcacctagccacttctgacccagagaagagctgccagccagtgttggagactctgcgccaggccatggatggca

SEQ ID NO: 51102 - DNA, 1606 bp, Homo sapiens
gtgaggacagaccagccctcccgagcacctggcactcatgggctgaggctgacttctcctggaagaagggcccagagtggaaggaagaggcagagggtagaggtggtggctgggggctcctctgcagagtggggtggccaatggagagggctgcactcacaccgcaacataggactctctctcccttaagaaggcccccttagggtctgggctgccgcccccatcaccctaaaaccagccaaggtagctgaggccccagggcagacaatttcaccagcaggaggaggaggagtccagtgagcttggttgctcacagacagcaagggagctgtcacagaggaagctgatgaatggaccgctgtggggagactttaaagtagaacagtgataagggagggcaggatggtggggatgcagaagcagcagccagagagagacggactggggtgcagacggagtgtggaaaacgcataccttgaaatgaagcatccagcagatggggtgagtggatacagctcaggagattctcccaggaatagcagggaggcgtaaagagagacaacgtacagagatagatgaatggaaatgggtaagggaggtgttcattcacatccatctaactgcaaaatacaaaagtaagaagtcattgacatgaagcaacgacgaccaagacgttctcagatctaaaggtgaatgatctcagtcagcctggaaatgcacaaggtggaaaaataacataaaaaagccataagaccttgaagaacatcaatgtcaaagataaattctaaagtcccagagaaaaaagaatgggaatcaaattgacctcagactatacgtgagaaacacggagagccagaaaactgtgatgttccatcctcagagtttgaaggaaatatttgaaggctgaattttacatccagctaaactatcaaaggcatgcaaagtccatgttattcttaggccttcaaggcctcggccatttttctacagaaaagcctgattttaaaatgctcttagagacgttctccagccagaagagaaagaagccaggagggtgctctgagatattcagtcaccacagttcccaaatggcctaggaattcagagagtcagaatatcaccattactccccaatgggaacccccgacagtctcagcatggtgtgagggtgtggacggggggcctggcaggtaccaatcactcatcccgctcagtgaagacacagtgttcagctacggaagccataaggcaggccgagcttctgcccatccggaggaaatctcagctatccaacggcggtcaggagcagaggaaaataaagcagaataactagaaaacacgctcacagatcctaatgttaacggttacaaatgacgacggaaaaacaaactcctgaccatatattatatagtttcaagcagcaagaaggaggatattgaacattctcaacacacataataaacgcttgagatgatgatatgctcattaccctgatttgatcactagacatcccatgtatcaaaacatcactgtgtatccgatgaatatctacaattattgtcaattaaaaacatcattaaaaacagactagactgcattaaaaata

SEQ ID NO: 51103 - DNA, 1120 bp, Homo sapiens
  misc_feature (15)..(15): n is a, c, g, or t
gtcatcgagctcggnccagttgacggagactctctttattctcccaggaatagcagggaggcgtaaagagagacaacgtacagagatagatgaatggaaatgggtaagggaggtgttcattcacatccatctaactgcaaaatacaaaagtaagaagtcattgacatgaagcaacgacgaccaagacgttctcagatctaaaggtgaatgatctcagtcagcctggaaatgcacaaggtggaaaaataacataaaaaagccataagaccttgaagaacatcaatgtcaaagataaattctaaagtcccagagaaaaaagaatgggaatcaaattgacctcagactatacgtgagaaacacggagagccagaaaactgtgatgttccatcctcagagtttgaaggaaatatttgaaggctgaattttacatccagctaaactatcaaaggcatgcaaagtccatgttattcttaggccttcaaggcctcggccatttttctacagaaaagcctgattttaaaatgctcttagagacgttctccagccagaagagaaagaagccaggagggtgctctgagatattcagtcaccacagttcccaaatggcctaggaattcagagagtcagaatatcaccattactccccaatgggaacccccgacagtctcagcatggtgtgagggtgtggacggggggcctggcaggtaccaatcactcatcccgctcagtgaagacacagtgttcagctacggaagccataaggcaggccgagcttctgcccatccggaggaaatctcagctatccaacggcggtcaggagcagaggaaaataaagcagaataactagaaaacacgctcacagatcctaatgttaacggttacaaatgacgacggaaaaacaaactcctgaccatatattatatagtttcaagcagcaagaaggaggatattgaacattctcaacacacataataaacgcttgagatgatgatatgctcattaccctgatttgatcactagacatcccatgtatcaaaacatcactgtgtatccgatgaatatctacaattattgtcaattaaaaacatcattaaaaacagactagactgcattaaaaata

SEQ ID NO: 51104 - DNA, 4045 bp, Homo sapiens
gtcgcctctcacccgccccggccgctccagcccgaggcgccccgaccccgcgccactccgcgcccggccagccgcccgcagccatggggctcctgcccaagctcggcgtgtcccagggcagcgacacctctactagccgagccggccgctgtgcccgctcggtcttcggcaacattaaggtgtttgtgctctgccaaggcctcctgcagctctgccaactcctgtacagcgcctacttcaagagcagcctcaccaccattgagaagcgctttgggctctccagttcttcatcgggtctcatttccagcttgaatgagatcagcaatgccatcctcatcatctttgtcagctactttggcagccgggtgcaccgtccacgtctgattggcatcggaggtctcttcctggctgcaggtgccttcatcctcaccctcccacacttcctctccgagccctaccagtacaccttggccagcactgggaacaacagccgcttgcaggccgagctctgccagaagcattggcaggacctgcctcccagtaagtgccacagcaccacccagaacccccagaaggagaccagcagcatgtggggcctgatggtggttgcccagctgctggctggcatcgggacagtgcctattcagccatttgggatctcctatgtggatgacttctcagagcccagcaactcgcccctgtacatctccatcttatttgccatctctgtatttggaccggctttcgggtacctgctgggctctatcatgctgcagatctttgtggactatggcagggtcaacacagctgcagttaacttggtcccgggtgacccccgatggattggagcctggtggctaggcctgctcatttcttcagctttattggttctcacctctttccccttttttttcttccctcgagcaatgcccataggagcaaagagggctcctgccacagcagatgaagcaaggaagttggaggaggccaagtcaagaggctccctggtggatttcattaaacggtttccatgcatctttctgaggctcctgatgaactcactcttcgtcctggtggtcctggcccagtgcaccttctcctccgtcattgctggcctctccaccttcctcaacaagttcctggagaagcagtatggcacctcagcagcctatgccaacttcctcattggtgctgtgaacctccctgctgcagccttggggatgctgtttggaggaatcctcatgaagcgctttgttttctctctacaaaccattccccgcatagctaccaccatcatcaccatctccatgatcctttgtgttcctttgttcttcatgggatgctccaccccaactgtggccgaagtctacccccctagcacatcaagttctatacatccgcagtctcctgcctgccgcagggactgctcgtgcccagattctatcttccacccggtctgtggagacaatggaatcgagtacctctccccttgccatgccggctgcagcaacatcaacatgagctctgcaacctccaagcaactgatctatttgaactgcagctgtgtgaccgggggatccgcttcagcaaagacaggatcgtgccctgtcccctgtgcccacttcctgctcccggccatcttcctcatctccttcgtgtccctgatagcctgcatctcccacaaccccctctacatgatggttctgcgtgtggtgaaccaggaggaaaagtcatttgccatcggggtgcagttcttgttgatgcgcttgctggcctggctgccatctccagccctctatggcctcaccattgaccactcctgcatccggtggaactcgctgtgcttggggaggcgaggggcctgcgcctactatgacaacgatgctctccgagacaggtacctgggcctgcagatgggctacaaggcgctgggcatgctgctgctttgcttcatcagctggagggtgaagaagaacaaggagtacaacgtgcagaaggcggcaggcctcatctgaccccaccctgggccactgccctgctccagagagtggaccttgactcttccacacctgcctatactcactaatgttaacacgtcatttcctttttgtatttttaaacaagaaagaaaaccccagtcctcatttgccttccctacctcttcctcccagagtcctccccacagttcctaagggccactgtgtacccgggctgtgtgggccagaactggggggctgagtcttccctggccccttggaagaggcccccagatgcccaggctcacttcagtgttgagtcctccattgaggatgcccactgaggcagccaggcccctcaccagccctggggggaatcctaaacagagagagaaaaagggtatctgcccttcttgccaggcagctccactctcccgctgactgcccacaccctgcagagtggcaggggtgaaaggaagaaggaagtggctgagttattaatagccagagccactgggagactggggagactggctgtaacccccttcacacctgggtttggcatcagcacagactacgggaggggctggctccctccccctcagaccctcacttcctgtacctagaggccattctggatgctgccatgttgggaagtacagtctctgcccattacctgcatgcaggcaccagagcagggactgagaaaccccaaggatgggtcatctaagtgctgtccatatgaaccctggactttctgtccttagatcctcacatgttatccctgtctttctggggtacgtttcaaactgaggaagctacaacacagtgaagacccaaggaaggcctatgaaatggtcctgatgcccaacctcccaccccttcaatgtggggacgagaccccctcatctcagagtaatgggaagaacctcccacatctccctggcagcagatgaggtggcttcacatgcacttccctgtctggacttcagcccgtattccgaggagtagagaggcagaagagatgtcagcaaagcaagtgatgaagcagagtggatgtccactgtcaccaagctggatggcaagctgcggcccacaaaacagccagtcaggttggctttcctggtttcagacatgctcataccattcccattttctcagcctcttctcactgcctccagagaggtgggtgcctgggttgagagacacagctgctacgtgatagatgttgagagacagaagccaacgaaggaggtcattcatcaacaaatatgtttattggagaccgactttgtgcaaagcaatgctaatcagggttctccatggagcttccctcagctcttacctcacctccctccatttacattagggccttctcccagggtgtgctcggtgggcagtgtgggactgggggtgtgggagttggtgagagcaggaggagaggtggggacagcaagaagccacagattggcatgaaggatcctgacctgactatccatgccatccatggcccccagactgactctgcacctggccctttgccagacagctctgtctccccatgtcctctggaacagctgggcatgggtcatggccattcatgacccttaagtgccacccttcttggaagaccccctccagaagcatactggaagccacctctggaaaagcctcatatggtgatatgccaaaatatttatgtcaatgtccaaacaaagtccaatgccatgagactgaagtctttgtggaaaccactgttacagacaagcttatttccaaagccacctcatttccaaacatctcactcaggaagggaggctcaatgtaacctcaggggccagttttagcatttgaaatggttctgcttggaaaatgatgccctgcaactaaccctggtctttcccatggcaatttaaccacatttggaaggcactgccttcagctgagtttatgaacaatgaatgccaaccttcaggttctagaagattggttgcactcccaaacctttattctattatattactattaaaatattctaattttgctattgaagagtacacttggtcatg

SEQ ID NO: 51105 - DNA, 3733 bp, Homo sapiens
gtcgcctctcacccgccccggccgctccagcccgaggcgccccgaccccgcgccactccgcgcccggccagccgcccgcagccatggggctcctgcccaagctcggcgtgtcccagggcagcgacacctctactagccgagccggccgctgtgcccgctcggtcttcggcaacattaaggtgtttgtgctctgccaaggcctcctgcagctctgccaactcctgtacagcgcctacttcaagagcagcctcaccaccattgagaagcgctttgggctctccagttcttcatcgggtctcatttccagcttgaatgagatcagcaatgccatcctcatcatctttgtcagctactttggcagccgggtgcaccgtccacgtctgattggcatcggaggtctcttcctggctgcaggtgccttcatcctcaccctcccacacttcctctccgagccctaccagtacaccttggccagcactgggaacaacagccgcttgcaggccgagctctgccagaagcattggcaggacctgcctcccagtaagtgccacagcaccacccagaacccccagaaggagaccagcagcatgtggggcctgatggtggttgcccagctgctggctggcatcgggacagtgcctattcagccatttgggatctcctatgtggatgacttctcagagcccagcaactcgcccctgtacatctccatcttatttgccatctctgtatttggaccggctttcgggtacctgctgggctctatcatgctgcagatctttgtggactatggcagggtcaacacagctgcagttaacttggtcccgggtgacccccgatggattggagcctggtggctaggcctgctcatttcttcagctttattggttctcacctctttccccttttttttcttccctcgagcaatgcccataggagcaaagagggctcctgccacagcagatgaagcaaggaagttggaggaggccaagtcaagaggctccctggtggatttcattaaacggtttccatgcatctttctgaggctcctgatgaactcactcttcgtcctggtggtcctggcccagtgcaccttctcctccgtcattgctggcctctccaccttcctcaacaagttcctggagaagcagtatggcacctcagcagcctatgccaacttcctcattggtgctgtgaacctccctgctgcagccttggggatgctgtttggaggaatcctcatgaagcgctttgttttctctctacaaaccattccccgcatagctaccaccatcatcaccatctccatgatcctttgtgttcctttgttcttcatgggatgctccaccccaactgtggccgaagtctacccccctagcacatcaagttctatacatccgcagtctcctgcctgccgcagggactgctcgtgcccagattctatcttccacccggtctgtggagacaatggaatcgagtacctctccccttgccatgccggctgcagcaacatcaacatgagctctgcaacctccaagcaactgatctatttgaactgcagctgtgtgaccgggggatccgcttcagcaaagacaggatcgtgccctgtcccctgtgcccacttcctgctcccggccatcttcctcatctccttcgtgtccctgatagcctgcatctcccacaaccccctctacatgatggttctgcgtgtggtgaaccaggaggaaaagtcatttgccatcggggtgcagttcttgttgatgcgcttgctggcctggctgccatctccagccctctatggcctcaccattgaccactcctgcatccggtggaactcgctgtgcttggggaggcgaggggcctgcgcctactatgacaacgatgctctccgagacaggtacctgggcctgcagatgggctacaaggcgctgggcatgctgctgctttgcttcatcagctggagggtgaagaagaacaaggagtacaacgtgcagaaggcggcaggcctcatctgaccccaccctgggccactgccctgctccagagagtggaccttgactcttccacacctgcctatactcactaatgttaacacgtcatttcctttttgtatttttaaacaagaaagaaaaccccagtcctcatttgccttccctacctcttcctcccagagtcctccccacagttcctaagggccactgtgtacccgggctgtgtgggccagaactggggggctgagtcttccctggccccttggaagaggcccccagatgcccaggctcacttcagtgttgagtcctccattgaggatgcccactgaggcagccaggcccctcaccagccctggggggaatcctaaacagagagagaaaaagggtatctgcccttcttgccaggcagctccactctcccgctgactgcccacaccctgcagagtggcaggggtgaaaggaagaaggaagtggctgagttattaatagccagagccactgggagactggggagactggctgtaacccccttcacacctgggtttggcatcagcacagactacgggaggggctggctccctccccctcagaccctcacttcctgtacctagaggccattctggatgctgccatgttgggaagtacagtctctgcccattacctgcatgcaggcaccagagcagggactgagaaaccccaaggatgggtcatctaagtgctgtccatatgaaccctggactttctgtccttagatcctcacatgttatccctgtctttctggggtacgtttcaaactgaggaagctacaacacagtgaagacccaaggaaggcctatgaaatggtcctgatgcccaacctcccaccccttcaatgtggggacgagaccccctcatctcagagtaatgggaagaacctcccacatctccctggcagcagatgaggtggcttcacatgcacttccctgtctggacttcagcccgtattccgaggagtagagaggcagaagagatgtcagcaaagcaagtgatgaagcagagtggatgtccactgtcaccaagctggatggcaagctgcggcccacaaaacagccagtcaggttggctttcctggtttcagacatgctcataccattcccattttctcagcctcttctcactgcctccagagaggtgggtgcctgggttgagagacacagctgctacctggccctttgccagacagctctgtctccccatgtcctctggaacagctgggcatgggtcatggccattcatgacccttaagtgccacccttcttggaagaccccctccagaagcatactggaagccacctctggaaaagcctcatatggtgatatgccaaaatatttatgtcaatgtccaaacaaagtccaatgccatgagactgaagtctttgtggaaaccactgttacagacaagcttatttccaaagccacctcatttccaaacatctcactcaggaagggaggctcaatgtaacctcaggggccagttttagcatttgaaatggttctgcttggaaaatgatgccctgcaactaaccctggtctttcccatggcaatttaaccacatttggaaggcactgccttcagctgagtttatgaacaatgaatgccaaccttcaggttctagaagattggttgcactcccaaacctttattctattatattactattaaaatattctaattttgctattgaagagtacacttggtcatg

SEQ ID NO: 51106 - DNA, 3456 bp, Homo sapiens
gtcgcctctcacccgccccggccgctccagcccgaggcgccccgaccccgcgccactccgcgcccggccagccgcccgcagccatggggctcctgcccaagctcggcgtgtcccagggcagcgacacctctactagccgagccggccgctgtgcccgctcggtcttcggcaacattaaggtgtttgtgctctgccaaggcctcctgcagctctgccaactcctgtacagcgcctacttcaagagcagcctcaccaccattgagaagcgctttgggctctccagttcttcatcgggtctcatttccagcttgaatgagatcagcaatgccatcctcatcatctttgtcagctactttggcagccgggtgcaccgtccacgtctgattggcatcggaggtctcttcctggctgcaggtgccttcatcctcaccctcccacacttcctctccgagccctaccagtacaccttggccagcactgggaacaacagccgcttgcaggccgagctctgccagaagcattggcaggacctgcctcccagtaagtgccacagcaccacccagaacccccagaaggagaccagcagcatgtggggcctgatggtggttgcccagctgctggctggcatcgggacagtgcctattcagccatttgggatctcctatgtggatgacttctcagagcccagcaactcgcccctgtacatctccatcttatttgccatctctgtatttggaccggctttcgggtacctgctgggctctatcatgctgcagatctttgtggactatggcagggtcaacacagctgcagttaacttggtcccgggtgacccccgatggattggagcctggtggctaggcctgctcatttcttcagctttattggttctcacctctttccccttttttttcttccctcgagcaatgcccataggagcaaagagggctcctgccacagcagatgaagcaaggaagttggaggaggccaagtcaagaggctccctggtggatttcattaaacggtttccatgcatctttctgaggctcctgatgaactcactcttcgtcctggtggtcctggcccagtgcaccttctcctccgtcattgctggcctctccaccttcctcaacaagttcctggagaagcagtatggcacctcagcagcctatgccaacttcctcattggtgctgtgaacctccctgctgcagccttggggatgctgtttggaggaatcctcatgaagcgctttgttttctctctacaaaccattccccgcatagctaccaccatcatcaccatctccatgatcctttgtgttcctttgttcttcatgggatgctccaccccaactgtggccgaagtctacccccctagcacatcaagttctatacatccgcagtctcctgcctgccgcagggactgctcgtgcccagattctatcttccacccggtctgtggagacaatggaatcgagtacctctccccttgccatgccggctgcagcaacatcaacatgagctctgcaacctccaagcaactgatctatttgaactgcagctgtgtgaccgggggatccgcttcagcaaagacaggatcgtgccctgtcccctgtgcccacttcctgctcccggccatcttcctcatctccttcgtgtccctgatagcctgcatctcccacaaccccctctacatgatggttctgcgtgtggtgaaccaggaggaaaagtcatttgccatcggggtgcagttcttgttgatgcgcttgctggcctggctgccatctccagccctctatggcctcaccattgaccactcctgcatccggtggaactcgctgtgcttggggaggcgaggggcctgcgcctactatgacaacgatgctctccgagacaggtacctgggcctgcagatgggctacaaggcgctgggcatgctgctgctttgcttcatcagctggagggtgaagaagaacaaggagtacaacgtgcagaaggcggcaggcctcatctgaccccaccctgggccactgccctgctccagagagtggaccttgactcttccacacctgcctatactcactaatgttaacacgtcatttcctttttgtatttttaaacaagaaagaaaaccccagtcctcatttgccttccctacctcttcctcccagagtcctccccacagttcctaagggccactgtgtacccgggctgtgtgggccagaactggggggctgagtcttccctggccccttggaagaggcccccagatgcccaggctcacttcagtgttgagtcctccattgaggatgcccactgaggcagccaggcccctcaccagccctggggggaatcctaaacagagagagaaaaagggtatctgcccttcttgccaggcagctccactctcccgctgactgcccacaccctgcagagtggcaggggtgaaaggaagaaggaagtggctgagttattaatagccagagccactgggagactggggagactggctgtaacccccttcacacctgggtttggcatcagcacagactacgggaggggctggctccctccccctcagaccctcacttcctgtacctagaggccattctggatgctgccatgttgggaagtacagtctctgcccattacctgcatgcaggcaccagagcagggactgagaaaccccaaggatgggtcatctaagtgctgtccatatgaaccctggactttctgtccttagatcctcacatgttatccctgtctttctggggtacgtttcaaactgaggaagctacaacacagtgaagacccaaggaaggcctatgaaatggtcctgatgcccaacctcccaccccttcaatgtggggacgagaccccctcatctcagagtaatgggaagaacctcccacatctccctggcagcagatgaggtggcttcacatgcacttccctgtctggacttcagcccgtattccgaggagtagagaggcagaagagatgtcagcaaagcaagtgatgaagcagagtggatgtccactgtcacctctggaaaagcctcatatggtgatatgccaaaatatttatgtcaatgtccaaacaaagtccaatgccatgagactgaagtctttgtggaaaccactgttacagacaagcttatttccaaagccacctcatttccaaacatctcactcaggaagggaggctcaatgtaacctcaggggccagttttagcatttgaaatggttctgcttggaaaatgatgccctgcaactaaccctggtctttcccatggcaatttaaccacatttggaaggcactgccttcagctgagtttatgaacaatgaatgccaaccttcaggttctagaagattggttgcactcccaaacctttattctattatattactattaaaatattctaattttgctattgaagagtacacttggtcatg

SEQ ID NO: 51107 - DNA, 2329 bp, Homo sapiens
tctggtgaaagagaaattcaggcttcactgaaagctattctgctttccagagtcactcctggctgccatctccagccctctatggcctcaccattgaccactcctgcatccggtggaactcgctgtgcttggggaggcgaggggcctgcgcctactatgacaacgatgctctccgagacaggtacctgggcctgcagatgggctacaaggcgctgggcatgctgctgctttgcttcatcagctggagggtgaagaagaacaaggagtacaacgtgcagaaggcggcaggcctcatctgaccccaccctgggccactgccctgctccagagagtggaccttgactcttccacacctgcctatactcactaatgttaacacgtcatttcctttttgtatttttaaacaagaaagaaaaccccagtcctcatttgccttccctacctcttcctcccagagtcctccccacagttcctaagggccactgtgtacccgggctgtgtgggccagaactggggggctgagtcttccctggccccttggaagaggcccccagatgcccaggctcacttcagtgttgagtcctccattgaggatgcccactgaggcagccaggcccctcaccagccctggggggaatcctaaacagagagagaaaaagggtatctgcccttcttgccaggcagctccactctcccgctgactgcccacaccctgcagagtggcaggggtgaaaggaagaaggaagtggctgagttattaatagccagagccactgggagactggggagactggctgtaacccccttcacacctgggtttggcatcagcacagactacgggaggggctggctccctccccctcagaccctcacttcctgtacctagaggccattctggatgctgccatgttgggaagtacagtctctgcccattacctgcatgcaggcaccagagcagggactgagaaaccccaaggatgggtcatctaagtgctgtccatatgaaccctggactttctgtccttagatcctcacatgttatccctgtctttctggggtacgtttcaaactgaggaagctacaacacagtgaagacccaaggaaggcctatgaaatggtcctgatgcccaacctcccaccccttcaatgtggggacgagaccccctcatctcagagtaatgggaagaacctcccacatctccctggcagcagatgaggtggcttcacatgcacttccctgtctggacttcagcccgtattccgaggagtagagaggcagaagagatgtcagcaaagcaagtgatgaagcagagtggatgtccactgtcaccaagctggatggcaagctgcggcccacaaaacagccagtcaggttggctttcctggtttcagacatgctcataccattcccattttctcagcctcttctcactgcctccagagaggtgggtgcctgggttgagagacacagctgctacgtgatagatgttgagagacagaagccaacgaaggaggtcattcatcaacaaatatgtttattggagaccgactttgtgcaaagcaatgctaatcagggttctccatggagcttccctcagctcttacctcacctccctccatttacattagggccttctcccagggtgtgctcggtgggcagtgtgggactgggggtgtgggagttggtgagagcaggaggagaggtggggacagcaagaagccacagattggcatgaaggatcctgacctgactatccatgccatccatggcccccagactgactctgcacctggccctttgccagacagctctgtctccccatgtcctctggaacagctgggcatgggtcatggccattcatgacccttaagtgccacccttcttggaagaccccctccagaagcatactggaagccacctctggaaaagcctcatatggtgatatgccaaaatatttatgtcaatgtccaaacaaagtccaatgccatgagactgaagtctttgtggaaaccactgttacagacaagcttatttccaaagccacctcatttccaaacatctcactcaggaagggaggctcaatgtaacctcaggggccagttttagcatttgaaatggttctgcttggaaaatgatgccctgcaactaaccctggtctttcccatggcaatttaaccacatttggaaggcactgccttcagctgagtttatgaacaatgaatgccaaccttcaggttctagaagattggttgcactcccaaacctttattctattatattactattaaaatattctaattttgctattgaagagtacacttggtcatg

SEQ ID NO: 51108 - DNA, 385 bp, Homo sapiens
tggtttgaatgttgttagctggggaggggtggggagtgaggccgaggggagtgtgagggcctaatcttggatgcagtccctggcccactttaatctctcttgatgtaagggttgtgtttttgtggcgattgtcgggtgtctgatttttattggtcactgtgtgctgtagtcgcccgtctgtttcctggtgggattcagatgtcctcagacctgtgcctgctgtctgtgtggtatgtaccagaattaaggagttggtatggaacacactgggaggcctaccccagaggccctgggctttctctgatgtttgtttgtttttgagacagagtcttgccctgtgtcgcccaggctggagtgcagtggtgtgatctcagctcactgcaac

SEQ ID NO: 51109 - DNA, 816 bp, Homo sapiens
gtgcctggcgcttacacatacatgataaacagttgagttagtaacagagcaggacagttggttcagcattctctaaaagtaaagcgctagaggaacaatactgttttatggagactttctggaacagttgagaaaaccaaaagccaaggcaccacttcctccagctgagaccaaatatactgatgtctcttcagctgctgattctgtagaatccactgctttcatcatggaacagaaagaaaacatgatagataaagacgttgaactctcagtggtcctacctggggatattatcaaatctactactgttcatggcaggtacgctggagtaaatgaaatatcaggacctccccttcttattccaccattgaaagtctctgtgatatacgtcttgatgtttgttctttgacaaaacacttcatttatcactcagtttagttacctgttaaaaaaaaagactgctaaaatggtgttaaaaattttctatcaatgttttaatatcagtgctatgaattccacaaacccaattaaatgactcttgaaatttggaaccctttcatatctcgttagttatttaacaagtttttaaaaataagcctttcctggaggaatggccattagttatattgattttgtaaaccaaacttacaaaacaagcccagtgacccacaggaaaatcctatccttttcttctcaaattgttcttcccactttaagctgcttctttaagtttacaaaactcttaattttaagagttttattactcttaaaatgtaatacttttgtatgtatcaaaacagttaaatctgtctgtaa

SEQ ID NO: 51110 - DNA, 977 bp, Homo sapiens
ttccggcaccggaggccaaagacccgaagccctgggggaaggaaattccaacttgctcccggcccacccccgccccgttcctctctccggctcgctgcttccctcgctccaatgccgccgagctggtccccacttatgtgcggccgtgctgcagaggcggcggcgagctcccggactccgggcagggaaatggggcaggcagtgacgcgccgcctgggagctggagcccgcgcagcgccccgcagggcgatggacggccgaaccccgcgcccgcaggacgccccagccaggagaaaaccaaaagccaaggcaccacttcctccagctgagaccaaatatactgatgtctcttcagctgctgattctgtagaatccactgctttcatcatggaacagaaagaaaacatgatagataaagacgttgaactctcagtggtcctacctggggatattatcaaatctactactgttcatggcaggtacgctggagtaaatgaaatatcaggacctccccttcttattccaccattgaaagtctctgtgatatacgtcttgatgtttgttctttgacaaaacacttcatttatcactcagtttagttacctgttaaaaaaaaagactgctaaaatggtgttaaaaattttctatcaatgttttaatatcagtgctatgaattccacaaacccaattaaatgactcttgaaatttggaaccctttcatatctcgttagttatttaacaagtttttaaaaataagcctttcctggaggaatggccattagttatattgattttgtaaaccaaacttacaaaacaagcccagtgacccacaggaaaatcctatccttttcttctcaaattgttcttcccactttaagctgcttctttaagtttacaaaactcttaattttaagagttttattactcttaaaatgtaatacttttgtatgtatcaaaacagttaaatctgtctgtaa

SEQ ID NO: 51111 - DNA, 5053 bp, Homo sapiens
cggcgcccgcgggctgggagccggggcccgcaggtggaagcgcacccgggaggcgggccggccggggctggagcggctcgggcgggctcttgacgctcagccagcttcgctccggcctcgggaaggcgcgcgtcccgccctgacccgccggcctctcccaccccagcagtgacgcgccgcctgggagctggagcccgcgcagcgccccgcagggcgatggacggccgaaccccgcgcccgcaggacgccccagccaggagaaaaccaaaagccaaggcaccacttcctccagctgagaccaaatatactgatgtctcttcagctgctgattctgtagaatccactgctttcatcatggaacagaaagaaaacatgatagataaagacgttgaactctcagtggtcctacctggggatattatcaaatctactactgttcatggcagtaaacctatgatggacttgttgatattcctttgtgcacagtatcacttaaatccatcaagttacacaatcgatctgttgtcagctgaacagaaccacattaaatttaagccaaacacaccaataggaatgttggaggtagagaaggtaattttaaagccaaaaatgttggataagaaaaaacctacacctataataccagagaaaactgtgagagtagtgattaattttaagaaaacacagaagaccatagtgagagtgagtccacatgcatcgcttcaagagcttgcccctattatatgtagcaaatgtgagtttgatccgttgcatacactattgttgaaagattatcaatcgcaggagcctcttgacttgacaaaatctcttaatgacctgggactaagagaattatatgcgatggatgtcaacagagagtcctgccaaatatcacaaaacctagatattatgaaggagaaagaaaataaagggtttttcagtttttttcaacgcagtaagaaaaagcgagaccaaactgcaagtgcccctgcaacccctctagtaaataagcaccgcccaacttttacaaggtccaataccatttccaaaccatatatttccaacaccctgccgtcggatgcacccaagaagaggcgggctccactgcccccgatgccagcatctcagagtgtcccccaagaccttgcacacatccaggagaggcctgcttcttgtatagtgaaatccatgagcgtggatgagacagataagagtccctgtgaagcaggaagagtgagggcaggttcactgcagctcagcagcatgtctgcagggaattcatctttgagaaggacaaagcgaaaagcaccttccccaccctccaaaatacccccgcatcaaagtgatgaaaatagtcgtgtgactgccttacagccagtagatggagttcctccagacagtgcttcagaagcaaactctcctgaggagctatccagcccagaaacctttcaccctgggctttccagtcaggagcagtgcactgcgcccaaactgatggaggaaacctctgtctttgagtgccctgggacacctgaggcagccataacatcattgacatctggaataagctctgattatagccttgaagagatagatgaaaaggaagaactgagtgaagtgcctaaagttgaagctgaaaatatttctccgaagtcacaagatattccttttgtatctactgatataataaatacactgaaaaatgatcctgactcagcccttggcaatggtagtggagagttctcacaaaactccatggaagaaaaacaagaaactaaaagcacagatggacaagaaccacacagtgtagtatatgatacaagcaatggaaagaaggtagttgacagtataagaaacttgaagtcgttgggcccaaaccaagagaatgtagttcaaaatgaaataattgtctatccagagaacacagaagacaatatgaaaaatggagtgaagaaaacagaaatcaatgtagaaggtgttgccaaaaataacaacattgatatggaagttgagagaccatcaaactctgaggcacatgaaactgatactgctataagttacaaggaaaaccatctagcagcttcatcagtaccagatcaaaaactgaatcaacccagtgcagaaaagacaaaagatgcagcaattcagacaaccccttcttgtaacagttttgatgggaaacaccaagatcataatttatctgactccaaagttgaagaatgtgtgcaaacttcaaataacaacatatcaactcaacactcatgcttaagttcacaagattctgtaaatacctcaagggaattcaggagtcaaggcaccctaattatacattcagaagatccgcttaccgtaaaagatccaatttgtgcacatggtaatgatgatcttttgcctcctgtagataggattgacaaaaattccactgcttcttacctaaagaattacccactttatagacaggactacaatcccaagccaaaaccttcaaatgaaattacacgagagtatatacccaaaattggcatgactacttataaaatagtgcctcccaaatccttggaaatatcgaaagactggcaatcagaaaccatagagtataaagatgatcaggacatgcatgctttagggaaaaagcacactcatgagaatgtgaaagaaactgccatccaaacagaagattctgctatttctgaaagcccagaagagccactgccaaaccttaaaccgaagcctaacctgagaacagagcatcaagtgcccagttctgtgagctcacctgatgatgccatggttagtcctctgaaacctgctcccaaaatgacaagagacactggcacagctccttttgcaccaaatttggaagaaataaacaatattttggaatcaaaatttaaatctcgggcttcaaatgcccaggccaaacccagctctttttttttgcagatgcagaagagagtatcgggtcactatgtgacatctgcagctgccaagagtgtccatgctgcccctaatcctgctccaaaagaactgacaaataaagaggcagaaagggatatgctgccttctccggagcagactctttctcccttaagtaaaatgcctcactctgttccacaaccccttgttgaaaaaactgatgatgatgtcatcggtcaggctcctgctgaagcctcccctcctcccatagctccaaaacctgtgacaattcctgctagtcaggtatccacacaaaatctgaagactttgaaaacttttggtgccccacgaccatactcaagttctggtccttcaccgtttgctcttgctgtagtgaaaaggtcacagtctttcagtaaagagcgcaccgagtcacctagtgccagtgcattggtccaacctccagccaacacagaggaagggaagactcattctgtaaataaatttgtggacatcccacagcttggtgtgtctgataaggaaaataactctgcacataatgaacagaattcccaaataccaactccaactgatggcccatcattcactgttatgagacaaagttctttaacattccaaagctctgacccagaacagatgcgacagagtttgctgactgcaatccgttcgggagaggctgctgccaaattgaaaagggttaccattccatcaaatacaatatctgtgaatggaaggtcaagactcagccattccatgtcccctgatgcccaggacggccattaaatgttaccctgccacaccactgcacttcacttccacttcagaccaacttcatactaatggaacattttggcaaatgtatattcagatgtacactaatatattatctattaaaatattagaatttgtgttgtggcttttaatgccagaagaaaagttaccagaatttataatttatagtaattttttgatcttttttttgccttaagagttgaatatgctgctttagaactttaaaacaaggtgtaaatgattttcattttttacaaatgaaaaataattcctttgtattgatttcacttaccagcacattctctacaatggtgacttagacaaaagtataagattcatagactttatatttgtatgacatacaactaggacaaacatagatatgacatttgctgcctcagtgtagcaattggaaatatttataagttatatgaaagcctgttttgggctgaaagaatgatttagaaaactagtgataccaaataagtatattcagttcaataattattttcaatgatgaatcacttagtgtgaaagacttgccttgtgtattctttatgtaattacaaatcactgtcaattttatgggaagctcatagtattttaatattttattaacatggaactcttgtttttttaatctttagaacttaaattctacaagaattttaaatattttctgtatataattatgacattgtcacacagaaattacacattttatgtgccagaagccttaaacatctttctgtgaaaatgctgatatattgtgacagttatttcacatttgatatgtagagaggaataggggttagtttatgtttatattgaaaaactttaaagactatttggaagttccagaaattctggttttaattcaagtaaaatgataaaatagtcattatatagttcagatgctaatattctaagtaataatatatatttacattgaagctaaaactgttaagcaaaacaatgcccatttgtcggcttacagctcttccggagtctagagcctgttggtgttctgtccctactttaagaatttaattgctcacttattctgaaagctttgttcaaacaagatgatattaaatttgttttcactaaaactactgggatatctgcctcttggggatttttttttcaatttaataaaagcaagttgtattgaaaaaaaaaaaaattactaaaaaaattttttggggggcttgggccttagaaaaattttttttaaacctttttttggggcgcggggcccattggttttgtgaatctgggcaaagggtggtccccggggaaatcgggcagaacaagtgttgga

SEQ ID NO: 51112 - DNA, 6307 bp, Homo sapiens
ttccggcaccggaggccaaagacccgaagccctgggggaaggaaattccaacttgctcccggcccacccccgccccgttcctctctccggctcgctgcttccctcgctccaatgccgccgagctggtccccacttatgtgcggccgtgctgcagaggcggcggcgagctcccggactccgggcagggaaatggggcagggtgagtgagagagcgggctccagcgaggcccccagcgcccagccagcgcccgcaccccgcccgcgggacaggggaggtgctgagtcggccctgcccgcgctgggctgagcctcgcaggggttgccgcttctccattcaagtcctggcttgagagccgagcggcaagagcgcgggccggggaagggaagagtaggagaggaagccgcgagggagaacaggcgagctactgtctcctttggaaaagaaccagtgacgcgccgcctgggagctggagcccgcgcagcgccccgcagggcgatggacggccgaaccccgcgcccgcaggacgccccagccaggagaaaaccaaaagccaaggcaccacttcctccagctgagaccaaatatactgatgtctcttcagctgctgattctgtagaatccactgctttcatcatggaacagaaagaaaacatgatagataaagacgttgaactctcagtggtcctacctggggatattatcaaatctactactgttcatggcagtaaacctatgatggacttgttgatattcctttgtgcacagtatcacttaaatccatcaagttacacaatcgatctgttgtcagctgaacagaaccacattaaatttaagccaaacacaccaataggaatgttggaggtagagaaggtaattttaaagccaaaaatgttggataagaaaaaacctacacctataataccagagaaaactgtgagagtagtgattaattttaagaaaacacagaagaccatagtgagagtgagtccacatgcatcgcttcaagagcttgcccctattatatgtagcaaatgtgagtttgatccgttgcatacactattgttgaaagattatcaatcgcaggagcctcttgacttgacaaaatctcttaatgacctgggactaagagaattatatgcgatggatgtcaacagagagtcctgccaaatatcacaaaacctagatattatgaaggagaaagaaaataaagggtttttcagtttttttcaacgcagtaagaaaaagcgagaccaaactgcaagtgcccctgcaacccctctagtaaataagcaccgcccaacttttacaaggtccaataccatttccaaaccatatatttccaacaccctgccgtcggatgcacccaagaagaggcgggctccactgcccccgatgccagcatctcagagtgtcccccaagaccttgcacacatccaggagaggcctgcttcttgtatagtgaaatccatgagcgtggatgagacagataagagtccctgtgaagcaggaagagtgagggcaggttcactgcagctcagcagcatgtctgcagggaattcatctttgagaaggacaaagcgaaaagcaccttccccaccctccaaaatacccccgcatcaaagtgatgaaaatagtcgtgtgactgccttacagccagtagatggagttcctccagacagtgcttcagaagcaaactctcctgaggagctatccagcccagctggaataagctctgattatagccttgaagagatagatgaaaaggaagaactgagtgaagtgcctaaagttgaagctgaaaatatttctccgaagtcacaagatattccttttgtatctactgatataataaatacactgaaaaatgatcctgactcagcccttggcaatggtagtggagagttctcacaaaactccatggaagaaaaacaagaaactaaaagcacagatggacaagaaccacacagtgtagtatatgatacaagcaatggaaagaaggtagttgacagtataagaaacttgaagtcgttgggcccaaaccaagagaatgtagttcaaaatgaaataattgtctatccagagaacacagaagacaatatgaaaaatggagtgaagaaaacagaaatcaatgtagaaggtgttgccaaaaataacaacattgatatggaagttgagagaccatcaaactctgaggcacatgaaactgatactgctataagttacaaggaaaaccatctagcagcttcatcagtaccagatcaaaaactgaatcaacccagtgcagaaaagacaaaagatgcagcaattcagacaaccccttcttgtaacagttttgatgggaaacaccaagatcataatttatctgactccaaagttgaagaatgtgtgcaaacttcaaataacaacatatcaactcaacactcatgcttaagttcacaagattctgtaaatacctcaagggaattcaggagtcaaggcaccctaattatacattcagaagatccgcttaccgtaaaagatccaatttgtgcacatggtaatgatgatcttttgcctcctgtagataggattgacaaaaattccactgcttcttacctaaagaattacccactttatagacaggactacaatcccaagccaaaaccttcaaatgaaattacacgagagtatatacccaaaattggcatgactacttataaaatagtgcctcccaaatccttggaaatatcgaaagactggcaatcagaaaccatagagtataaagatgatcaggacatgcatgctttagggaaaaagcacactcatgagaatgtgaaagaaactgccatccaaacagaagattctgctatttctgaaagcccagaagagccactgccaaaccttaaaccgaagcctaacctgagaacagagcatcaagtgcccagttctgtgagctcacctgatgatgccatggttagtcctctgaaacctgctcccaaaatgacaagagacactggcacagctccttttgcaccaaatttggaagaaataaacaatattttggaatcaaaatttaaatctcgggcttcaaatgcccaggccaaacccagctctttttttttgcagatgcagaagagagtatcgggtcactatgtgacatctgcagctgccaagagtgtccatgctgcccctaatcctgctccaaaagaactgacaaataaagaggcagaaagggatatgctgccttctccggagcagactctttctcccttaagtaaaatgcctcactctgttccacaaccccttgttgaaaaaactgatgatgatgtcatcggtcaggctcctgctgaagcctcccctcctcccatagctccaaaacctgtgacaattcctgctagtcaggtatccacacaaaatctgaagactttgaaaacttttggtgccccacgaccatactcaagttctggtccttcaccgtttgctcttgctgtagtgaaaaggtcacagtctttcagtaaagagcgcaccgagtcacctagtgccagtgcattggtccaacctccagccaacacagaggaagggaagactcattctgtaaataaatttgtggacatcccacagcttggtgtgtctgataaggaaaataactctgcacataatgaacagaattcccaaataccaactccaactgatggcccatcattcactgttatgagacaaagttctttaacattccaaagctctgacccagaacagatgcgacagagtttgctgactgcaatccgttcgggagaggctgctgccaaattgaaaagggttaccattccatcaaatacaatatctgtgaatggaaggtcaagactcagccattccatgtcccctgatgcccaggacggccattaaatgttaccctgccacaccactgcacttcacttccacttcagaccaacttcatactaatggaacattttggcaaatgtatattcagatgtacactaatatattatctattaaaatattagaatttgtgttgtggcttttaatgccagaagaaaagttaccagaatttataatttatagtaattttttgatcttttttttgccttaagagttgaatatgctgctttagaactttaaaacaaggtgtaaatgattttcattttttacaaatgaaaaataattcctttgtattgatttcacttaccagcacattctctacaatggtgacttagacaaaagtataagattcatagactttatatttgtatgacatacaactaggacaaacatagatatgacatttgctgcctcagtgtagcaattggaaatatttataagttatatgaaagcctgttttgggctgaaagaatgatttagaaaactagtgataccaaataagtatattcagttcaataattattttcaatgatgaatcacttagtgtgaaagacttgccttgtgtattctttatgtaattacaaatcactgtcaattttatgggaagctcatagtattttaatattttattaacatggaactcttgtttttttaatctttagaacttaaattctacaagaattttaaatattttctgtatataattatgacattgtcacacagaaattacacattttatgtgccagaagccttaaacatctttctgtgaaaatgctgatatattgtgacagttatttcacatttgatatgtagagaggaataggggttagtttatgtttatattgaaaaactttaaagactatttggaagttccagaaattctggttttaattcaagtaaaatgataaaatagtcattatatagttcagatgctaatattctaagtaataatatatatttacattgaagctaaaactgttaagcaaaacaatgcccatttgtcggcttacagctcttccggagtctagagcctgttggtgttctgtccctactttaagaatttaattgctcacttattctgaaagctttgttcaaacaagatgatattaaatttgttttcactaaaactactgggatatctgcctcttggggatttttttttcaatttaataaaagcaagttgtatatatttggggtgctttttaaaatatatagtttgtgtcaaccagcatatttatttcccttacctgatgcatacatttctattagccagtgaacaaacaagaaatttgtaagatttaccatttatcagggatccctagtgtacatttaagccctggcattctgactccaaaatgcatggtctaagcatttaaaatgtttagcatagttcctgatacatggcatggccatcttaaatgctaaatgttgctgctgttttccttgaatcagttggagagaccctcatatatagatacttaagttatgttgttataagcaagtagagaaaggagtgaattttttttaaaaaattgtgttgtcataattatctacttataaaaatataaatttggatccctaatttaaaccttcatatattttgagttggattgaagacttaaagacaagcgacatgtaagatgttttcaatatattaatatataagaaaggcttaatttatgaagatatgaaagttcctacaactcatgataagtctacctaatagaaatatcagcacattattcttacaagaggaaattcaaaaggccaacaaacatggaaaaaaaatactcttcactgataatcagggaaatacaagttaaaaacatggaaaggtaccacatcaaattagcaaaaacggaagtttcaaaatagcaagtgttgtcaggaacatcaaacagtgggaactctactgttggtgggaaaatacactggcataactaccagttctgcaatatctagtaaaattaaagattccttaccatgttaccttaaataagtacttatgcacatgcataaggagacatctgcaaaaatgttcacggcagccttgtgtaaaacagcagaaaggggtcctaacccgtgctcagctttagtaatgcatatattcatatgatagacttccacacagcagtccaaatgaacaagctagagctatatatgtcagcatgaatacatctcaaaaacaagtgacaagagtgagtggtggaacaagtcgtgttttatgaaattagttacataaagtataaatataaaaaatgatactataaattatggctgtatatgtaggaaaaaaatttgctggtggttacctgtgggaaccaagaaagactgaattgagatttataagaggcatcaattgtgttcgtagtattttataaactgctgtttgaaaacaagtgcttattatattctaaattctagtatact

SEQ ID NO: 51113 - DNA, 5613 bp, Homo sapiens
gtgcctggcgcttacacatacatgataaacagttgagttagtaacagagcaggacagttggttcagcattctctaaaagtaaagcgctagaggaacaatactgttttatggagactttctggaacagttggcatgaggttagatgatcgagactataaataagcaaacttaatgatgtcattaataaggaagaggagaaggtacctcttggtgtcttgtttactcccactatgcatacgttctttagaaagcaaattactgaaccatatggaaaaggaaaaagctaaggtgaatgtgttgaaatgtttgatctacgtagaaaaggagaacatcaaaggcaagcctttgtatgctatgtgtgcaagaaggacaggatgaaaatcccatcagagaaaaccaaaagccaaggcaccacttcctccagctgagaccaaatatactgatgtctcttcagctgctgattctgtagaatccactgctttcatcatggaacagaaagaaaacatgatagataaagggtttttcagtttttttcaacgcagtaagaaaaagcgagaccaaactgcaagtgcccctgcaacccctctagtaaataagcaccgcccaacttttacaaggtccaataccatttccaaaccatatatttccaacaccctgccgtcggatgcacccaagaagaggcgggctccactgcccccgatgccagcatctcagagtgtcccccaagaccttgcacacatccaggagaggcctgcttcttgtatagtgaaatccatgagcgtggatgagacagataagagtccctgtgaagcaggaagagtgagggcaggttcactgcagctcagcagcatgtctgcagggaattcatctttgagaaggacaaagcgaaaagcaccttccccaccctccaaaatacccccgcatcaaagtgatgaaaatagtcgtgtgactgccttacagccagtagatggagttcctccagacagtgcttcagaagcaaactctcctgaggagctatccagcccagctggaataagctctgattatagccttgaagagatagatgaaaaggaagaactgagtgaagtgcctaaagttgaagctgaaaatatttctccgaagtcacaagatattccttttgtatctactgatataataaatacactgaaaaatgatcctgactcagcccttggcaatggtagtggagagttctcacaaaactccatggaagaaaaacaagaaactaaaagcacagatggacaagaaccacacagtgtagtatatgatacaagcaatggaaagaaggtagttgacagtataagaaacttgaagtcgttgggcccaaaccaagagaatgtagttcaaaatgaaataattgtctatccagagaacacagaagacaatatgaaaaatggagtgaagaaaacagaaatcaatgtagaaggtgttgccaaaaataacaacattgatatggaagttgagagaccatcaaactctgaggcacatgaaactgatactgctataagttacaaggaaaaccatctagcagcttcatcagtaccagatcaaaaactgaatcaacccagtgcagaaaagacaaaagatgcagcaattcagacaaccccttcttgtaacagttttgatgggaaacaccaagatcataatttatctgactccaaagttgaagaatgtgtgcaaacttcaaataacaacatatcaactcaacactcatgcttaagttcacaagattctgtaaatacctcaagggaattcaggagtcaaggcaccctaattatacattcagaagatccgcttaccgtaaaagatccaatttgtgcacatggtaatgatgatcttttgcctcctgtagataggattgacaaaaattccactgcttcttacctaaagaattacccactttatagacaggactacaatcccaagccaaaaccttcaaatgaaattacacgagagtatatacccaaaattggcatgactacttataaaatagtgcctcccaaatccttggaaatatcgaaagactggcaatcagaaaccatagagtataaagatgatcaggacatgcatgctttagggaaaaagcacactcatgagaatgtgaaagaaactgccatccaaacagaagattctgctatttctgaaagcccagaagagccactgccaaaccttaaaccgaagcctaacctgagaacagagcatcaagtgcccagttctgtgagctcacctgatgatgccatggttagtcctctgaaacctgctcccaaaatgacaagagacactggcacagctccttttgcaccaaatttggaagaaataaacaatattttggaatcaaaatttaaatctcgggcttcaaatgcccaggccaaacccagctctttttttttgcagatgcagaagagagtatcgggtcactatgtgacatctgcagctgccaagagtgtccatgctgcccctaatcctgctccaaaagaactgacaaataaagaggcagaaagggatatgctgccttctccggagcagactctttctcccttaagtaaaatgcctcactctgttccacaaccccttgttgaaaaaactgatgatgatgtcatcggtcaggctcctgctgaagcctcccctcctcccatagctccaaaacctgtgacaattcctgctagtcaggtatccacacaaaatctgaagactttgaaaacttttggtgccccacgaccatactcaagttctggtccttcaccgtttgctcttgctgtagtgaaaaggtcacagtctttcagtaaagagcgcaccgagtcacctagtgccagtgcattggtccaacctccagccaacacagaggaagggaagactcattctgtaaataaatttgtggacatcccacagcttggtgtgtctgataaggaaaataactctgcacataatgaacagaattcccaaataccaactccaactgatggcccatcattcactgttatgagacaaagttctttaacattccaaagctctgacccagaacagatgcgacagagtttgctgactgcaatccgttcgggagaggctgctgccaaattgaaaagggttaccattccatcaaatacaatatctgtgaatggaaggtcaagactcagccattccatgtcccctgatgcccaggacggccattaaatgttaccctgccacaccactgcacttcacttccacttcagaccaacttcatactaatggaacattttggcaaatgtatattcagatgtacactaatatattatctattaaaatattagaatttgtgttgtggcttttaatgccagaagaaaagttaccagaatttataatttatagtaattttttgatcttttttttgccttaagagttgaatatgctgctttagaactttaaaacaaggtgtaaatgattttcattttttacaaatgaaaaataattcctttgtattgatttcacttaccagcacattctctacaatggtgacttagacaaaagtataagattcatagactttatatttgtatgacatacaactaggacaaacatagatatgacatttgctgcctcagtgtagcaattggaaatatttataagttatatgaaagcctgttttgggctgaaagaatgatttagaaaactagtgataccaaataagtatattcagttcaataattattttcaatgatgaatcacttagtgtgaaagacttgccttgtgtattctttatgtaattacaaatcactgtcaattttatgggaagctcatagtattttaatattttattaacatggaactcttgtttttttaatctttagaacttaaattctacaagaattttaaatattttctgtatataattatgacattgtcacacagaaattacacattttatgtgccagaagccttaaacatctttctgtgaaaatgctgatatattgtgacagttatttcacatttgatatgtagagaggaataggggttagtttatgtttatattgaaaaactttaaagactatttggaagttccagaaattctggttttaattcaagtaaaatgataaaatagtcattatatagttcagatgctaatattctaagtaataatatatatttacattgaagctaaaactgttaagcaaaacaatgcccatttgtcggcttacagctcttccggagtctagagcctgttggtgttctgtccctactttaagaatttaattgctcacttattctgaaagctttgttcaaacaagatgatattaaatttgttttcactaaaactactgggatatctgcctcttggggatttttttttcaatttaataaaagcaagttgtatatatttggggtgctttttaaaatatatagtttgtgtcaaccagcatatttatttcccttacctgatgcatacatttctattagccagtgaacaaacaagaaatttgtaagatttaccatttatcagggatccctagtgtacatttaagccctggcattctgactccaaaatgcatggtctaagcatttaaaatgtttagcatagttcctgatacatggcatggccatcttaaatgctaaatgttgctgctgttttccttgaatcagttggagagaccctcatatatagatacttaagttatgttgttataagcaagtagagaaaggagtgaattttttttaaaaaattgtgttgtcataattatctacttataaaaatataaatttggatccctaatttaaaccttcatatattttgagttggattgaagacttaaagacaagcgacatgtaagatgttttcaatatattaatatataagaaaggcttaatttatgaagatatgaaagttcctacaactcatgataagtctacctaatagaaatatcagcacattattcttacaagaggaaattcaaaaggccaacaaacatggaaaaaaaatactcttcactgataatcagggaaatacaagttaaaaacatggaaaggtaccacatcaaattagcaaaaacggaagtttcaaaatagcaagtgttgtcaggaacatcaaacagtgggaactctactgttggtgggaaaatacactggcataactaccagttctgcaatatctagtaaaattaaagattccttaccatgttaccttaaataagtacttatgcacatgcataaggagacatctgcaaaaatgttcacggcagccttgtgtaaaacagcagaaaggggtcctaacccgtgctcagctttagtaatgcatatattcatatgatagacttccacacagcagtccaaatgaacaagctagagctatatatgtcagcatgaatacatctcaaaaacaagtgacaagagtgagtggtggaacaagtcgtgttttatgaaattagttacataaagtataaatataaaaaatgatactataaattatggctgtatatgtaggaaaaaaatttgctggtggttacctgtgggaaccaagaaagactgaattgagatttataagaggcatcaattgtgttcgtagtattttataaactgctgtttgaaaacaagtgcttattatattctaaattctagtatact

SEQ ID NO: 51114 - DNA, 4864 bp, Homo sapiens
ccctcggttctaccatgtttcatccatgagcgtggatgagacagataagagtccctgtgaagcaggaagagtgagggcaggttcactgcagctcagcagcatgtctgcagggaattcatctttgagaaggacaaagcgaaaagcaccttccccaccctccaaaatacccccgcatcaaagtgatgaaaatagtcgtgtgactgccttacagccagtagatggagttcctccagacagtgcttcagaagcaaactctcctgaggagctatccagcccagctggaataagctctgattatagccttgaagagatagatgaaaaggaagaactgagtgaagtgcctaaagttgaagctgaaaatatttctccgaagtcacaagatattccttttgtatctactgatataataaatacactgaaaaatgatcctgactcagcccttggcaatggtagtggagagttctcacaaaactccatggaagaaaaacaagaaactaaaagcacagatggacaagaaccacacagtgtagtatatgatacaagcaatggaaagaaggtagttgacagtataagaaacttgaagtcgttgggcccaaaccaagagaatgtagttcaaaatgaaataattgtctatccagagaacacagaagacaatatgaaaaatggagtgaagaaaacagaaatcaatgtagaaggtgttgccaaaaataacaacattgatatggaagttgagagaccatcaaactctgaggcacatgaaactgatactgctataagttacaaggaaaaccatctagcagcttcatcagtaccagatcaaaaactgaatcaacccagtgcagaaaagacaaaagatgcagcaattcagacaaccccttcttgtaacagttttgatgggaaacaccaagatcataatttatctgactccaaagttgaagaatgtgtgcaaacttcaaataacaacatatcaactcaacactcatgcttaagttcacaagattctgtaaatacctcaagggaattcaggagtcaaggcaccctaattatacattcagaagatccgcttaccgtaaaagatccaatttgtgcacatggtaatgatgatcttttgcctcctgtagataggattgacaaaaattccactgcttcttacctaaagaattacccactttatagacaggactacaatcccaagccaaaaccttcaaatgaaattacacgagagtatatacccaaaattggcatgactacttataaaatagtgcctcccaaatccttggaaatatcgaaagactggcaatcagaaaccatagagtataaagatgatcaggacatgcatgctttagggaaaaagcacactcatgagaatgtgaaagaaactgccatccaaacagaagattctgctatttctgaaagcccagaagagccactgccaaaccttaaaccgaagcctaacctgagaacagagcatcaagtgcccagttctgtgagctcacctgatgatgccatggttagtcctctgaaacctgctcccaaaatgacaagagacactggcacagctccttttgcaccaaatttggaagaaataaacaatattttggaatcaaaatttaaatctcgggcttcaaatgcccaggccaaacccagctctttttttttgcagatgcagaagagagtatcgggtcactatgtgacatctgcagctgccaagagtgtccatgctgcccctaatcctgctccaaaagaactgacaaataaagaggcagaaagggatatgctgccttctccggagcagactctttctcccttaagtaaaatgcctcactctgttccacaaccccttgttgaaaaaactgatgatgatgtcatcggtcaggctcctgctgaagcctcccctcctcccatagctccaaaacctgtgacaattcctgctagtcaggtatccacacaaaatctgaagactttgaaaacttttggtgccccacgaccatactcaagttctggtccttcaccgtttgctcttgctgtagtgaaaaggtcacagtctttcagtaaagagcgcaccgagtcacctagtgccagtgcattggtccaacctccagccaacacagaggaagggaagactcattctgtaaataaatttgtggacatcccacagcttggtgtgtctgataaggaaaataactctgcacataatgaacagaattcccaaataccaactccaactgatggcccatcattcactgttatgagacaaagttctttaacattccaaagctctgacccagaacagatgcgacagagtttgctgactgcaatccgttcgggagaggctgctgccaaattgaaaagggttaccattccatcaaatacaatatctgtgaatggaaggtcaagactcagccattccatgtcccctgatgcccaggacggccattaaatgttaccctgccacaccactgcacttcacttccacttcagaccaacttcatactaatggaacattttggcaaatgtatattcagatgtacactaatatattatctattaaaatattagaatttgtgttgtggcttttaatgccagaagaaaagttaccagaatttataatttatagtaattttttgatcttttttttgccttaagagttgaatatgctgctttagaactttaaaacaaggtgtaaatgattttcattttttacaaatgaaaaataattcctttgtattgatttcacttaccagcacattctctacaatggtgacttagacaaaagtataagattcatagactttatatttgtatgacatacaactaggacaaacatagatatgacatttgctgcctcagtgtagcaattggaaatatttataagttatatgaaagcctgttttgggctgaaagaatgatttagaaaactagtgataccaaataagtatattcagttcaataattattttcaatgatgaatcacttagtgtgaaagacttgccttgtgtattctttatgtaattacaaatcactgtcaattttatgggaagctcatagtattttaatattttattaacatggaactcttgtttttttaatctttagaacttaaattctacaagaattttaaatattttctgtatataattatgacattgtcacacagaaattacacattttatgtgccagaagccttaaacatctttctgtgaaaatgctgatatattgtgacagttatttcacatttgatatgtagagaggaataggggttagtttatgtttatattgaaaaactttaaagactatttggaagttccagaaattctggttttaattcaagtaaaatgataaaatagtcattatatagttcagatgctaatattctaagtaataatatatatttacattgaagctaaaactgttaagcaaaacaatgcccatttgtcggcttacagctcttccggagtctagagcctgttggtgttctgtccctactttaagaatttaattgctcacttattctgaaagctttgttcaaacaagatgatattaaatttgttttcactaaaactactgggatatctgcctcttggggatttttttttcaatttaataaaagcaagttgtatatatttggggtgctttttaaaatatatagtttgtgtcaaccagcatatttatttcccttacctgatgcatacatttctattagccagtgaacaaacaagaaatttgtaagatttaccatttatcagggatccctagtgtacatttaagccctggcattctgactccaaaatgcatggtctaagcatttaaaatgtttagcatagttcctgatacatggcatggccatcttaaatgctaaatgttgctgctgttttccttgaatcagttggagagaccctcatatatagatacttaagttatgttgttataagcaagtagagaaaggagtgaattttttttaaaaaattgtgttgtcataattatctacttataaaaatataaatttggatccctaatttaaaccttcatatattttgagttggattgaagacttaaagacaagcgacatgtaagatgttttcaatatattaatatataagaaaggcttaatttatgaagatatgaaagttcctacaactcatgataagtctacctaatagaaatatcagcacattattcttacaagaggaaattcaaaaggccaacaaacatggaaaaaaaatactcttcactgataatcagggaaatacaagttaaaaacatggaaaggtaccacatcaaattagcaaaaacggaagtttcaaaatagcaagtgttgtcaggaacatcaaacagtgggaactctactgttggtgggaaaatacactggcataactaccagttctgcaatatctagtaaaattaaagattccttaccatgttaccttaaataagtacttatgcacatgcataaggagacatctgcaaaaatgttcacggcagccttgtgtaaaacagcagaaaggggtcctaacccgtgctcagctttagtaatgcatatattcatatgatagacttccacacagcagtccaaatgaacaagctagagctatatatgtcagcatgaatacatctcaaaaacaagtgacaagagtgagtggtggaacaagtcgtgttttatgaaattagttacataaagtataaatataaaaaatgatactataaattatggctgtatatgtaggaaaaaaatttgctggtggttacctgtgggaaccaagaaagactgaattgagatttataagaggcatcaattgtgttcgtagtattttataaactgctgtttgaaaacaagtgcttattatattctaaattctagtatact

SEQ ID NO: 51115 - DNA, 5199 bp, Homo sapiens
ttccggcaccggaggccaaagacccgaagccctgggggaaggaaattccaacttgctcccggcccacccccgccccgttcctctctccggctcgctgcttccctcgctccaatgccgccgagctggtccccacttatgtgcggccgtgctgcagaggcggcggcgagctcccggactccgggcagggaaatggggcagggtgagtgagagagcgggctccagcgaggcccccagcgcccagccagcgcccgcaccccgcccgcgggacaggggaggtgctgagtcggccctgcccgcgctgggctgagcctcgcaggggttgccgcttctccattcaagtcctggcttgagagccgagcggcaagagcgcgggccggggaagggaagagtaggagaggaagccgcgagggagaacaggcgagctactgtctcctttggaaaagaaccagtgacgcgccgcctgggagctggagcccgcgcagcgccccgcagggcgatggacggccgaaccccgcgcccgcaggacgccccagccaggagaaaaccaaaagccaaggcaccacttcctccagctgagaccaaatatactgatgtctcttcagctgctgattctgtagaatccactgctttcatcatggaacagaaagaaaacatgatagataaagacgttgaactctcagtggtcctacctggggatattatcaaatctactactgttcatggcagtaaacctatgatggacttgttgatattcctttgtgcacagtatcacttaaatccatcaagttacacaatcgatctgttgtcagctgaacagaaccacattaaatttaagccaaacacaccaataggaatgttggaggtagagaaggtaattttaaagccaaaaatgttggataagaaaaaacctacacctataataccagagaaaactgtgagagtagtgattaattttaagaaaacacagaagaccatagtgagagtgagtccacatgcatcgcttcaagagcttgcccctattatatgtagcaaatgtgagtttgatccgttgcatacactattgttgaaagattatcaatcgcaggagcctcttgacttgacaaaatctcttaatgacctgggactaagagaattatatgcgatggatgtcaacagagccacttctgttactgtcttcagtaagtcatctttacaagagtcctgccaaatatcacaaaacctagatattatgaaggagaaagaaaataaagggtttttcagtttttttcaacgcagtaagaaaaagcgagaccaaactgcaagtgcccctgcaacccctctagtaaataagcaccgcccaacttttacaaggtccaataccatttccaaaccatatatttccaacaccctgccgtcggatgcacccaagaagaggcgggctccactgcccccgatgccagcatctcagagtgtcccccaagaccttgcacacatccaggagaggcctgcttcttgtatagtgaaatccatgagcgtggatgagacagataagagtccctgtgaagcaggaagagtgagggcaggttcactgcagctcagcagcatgtctgcagggaattcatctttgagaaggacaaagcgaaaagcaccttccccaccctccaaaatacccccgcatcaaagtgatgaaaatagtcgtgtgactgccttacagccagtagatggagttcctccagacagtgcttcagaagcaaactctcctgaggagctatccagcccaggaaacatttaggaggaacactcttgaatctttcatctttaagtgaaacctttcaccctgggctttccagtcaggagcagtgcactgcgcccaaactgatggaggaaacctctgtctttgagtgccctgggacacctgaggcagccataacatcattgacatctggaataagctctgattatagccttgaagagatagatgaaaaggaagaactgagtgaagtgcctaaagttgaagctgaaaatatttctccgaagtcacaagatattccttttgtatctactgatataataaatacactgaaaaatgatcctgactcagcccttggcaatggtagtggagagttctcacaaaactccatggaagaaaaacaagaaactaaaagcacagatggacaagaaccacacagtgtagtatatgatacaagcaatggaaagaaggtagttgacagtataagaaacttgaagtcgttgggcccaaaccaagagaatgtagttcaaaatgaaataattgtctatccagagaacacagaagacaatatgaaaaatggagtgaagaaaacagaaatcaatgtagaaggtgttgccaaaaataacaacattgatatggaagttgagagaccatcaaactctgaggcacatgaaactgatactgctataagttacaaggaaaaccatctagcagcttcatcagtaccagatcaaaaactgaatcaacccagtgcagaaaagacaaaagatgcagcaattcagacaaccccttcttgtaacagttttgatgggaaacaccaagatcataatttatctgactccaaagttgaagaatgtgtgcaaacttcaaataacaacatatcaactcaacactcatgcttaagttcacaagattctgtaaatacctcaagggaattcaggagtcaaggcaccctaattatacattcagaagatccgcttaccgtaaaagatccaatttgtgcacatggtaatgatgatcttttgcctcctgtagataggattgacaaaaattccactgcttcttacctaaagaattacccactttatagacaggactacaatcccaagccaaaaccttcaaatgaaattacacgagagtatatacccaaaattggcatgactacttataaaatagtgcctcccaaatccttggaaatatcgaaagactggcaatcagaaaccatagagtataaagatgatcaggacatgcatgctttagggaaaaagcacactcatgagaatgtgaaagaaactgccatccaaacagaagattctgctatttctgaaagcccagaagagccactgccaaaccttaaaccgaagcctaacctgagaacagagcatcaagtgcccagttctgtgagctcacctgatgatgccatggttagtcctctgaaacctgctcccaaaatgacaagagacactggcacagctccttttgcaccaaatttggaagaaataaacaatattttggaatcaaaatttaaatctcgggcttcaaatgcccaggccaaacccagctctttttttttgcagatgcagaagagagtatcgggtcactatgtgacatctgcagctgccaagagtgtccatgctgcccctaatcctgctccaaaagaactgacaaataaagaggcagaaagggatatgctgccttctccggagcagactctttctcccttaagtaaaatgcctcactctgttccacaaccccttgttgaaaaaactgatgatgatgtcatcggtcaggctcctgctgaagcctcccctcctcccatagctccaaaacctgtgacaattcctgctagtcaggtatccacacaaaatctgaagactttgaaaacttttggtgccccacgaccatactcaagttctggtccttcaccgtttgctcttgctgtagtgaaaaggtcacagtctttcagtaaagagcgcaccgagtcacctagtgccagtgcattggtccaacctccagccaacacagaggaagggaagactcattctgtaaataaatttgtggacatcccacagcttggtgtgtctgataaggaaaataactctgcacataatgaacagaattcccaaataccaactccaactgatggcccatcattcactgttatgagacaaagttctttaacattccaaagctctgacccagaacagatgcgacagagtttgctgactgcaatccgttcgggagaggctgctgccaaattgaaaagggttaccattccatcaaatacaatatctgtgaatggaaggtcaagactcagccattccatgtcccctgatgcccaggacggccattaaatgttaccctgccacaccactgcacttcacttccacttcagaccaacttcatactaatggaacattttggcaaatgtatattcagatgtacactaatatattatctattaaaatattagaatttgtgttgtggcttttaatgccagaagaaaagttaccagaatttataatttatagtaattttttgatcttttttttgccttaagagttgaatatgctgctttagaactttaaaacaaggtgtaaatgattttcattttttacaaatgaaaaataattcctttgtattgatttcacttaccagcacattctctacaatggtgacttagacaaaagtataagattcatagactttatatttgtatgacatacaactaggacaaacatagatatgacatttgctgcctcagtgtagcaattggaaatatttataagttatatgaaagcctgttttgggctgaaagaatgatttagaaaactagtgataccaaataagtatattcagttcaataattattttcaatgatgaatcacttagtgtgaaagacttgccttgtgtattctttatgtaattacaaatcactgtcaattttatgggaagctcatagtattttaatattttattaacatggaactcttgtttttttaatctttagaacttaaattctacaagaattttaaatattttctgtatataattatgacattgtcacacagaaattacacattttatgtgccagaagccttaaacatctttctgtgaaaatgctgatatattgtgacagttatttcacatttgatatgtagagaggaataggggttagtttatgtttatattgaaaaactttaaagactatttggaagttccagaaattctggttttaattcaagtaaaatgataaaatagtcattatatagttcagatgctaatattctaagtaataatatatatttacattgaagctaaaactgttaagcaaaacaatgcccatttgtcggcttacagctcttccggagtctagagcctgttggtgttctgtccctactttaagaatttaattgctcacttattctgaaagctttgttcaaacaagatgatattaaatttgttttcac

SEQ ID NO: 51116 - DNA, 2962 bp, Homo sapiens
gtactgtctgtgttagtctggcttggagggggctgtcttagttatctgacggatctggctagtttgctggcgttgttgcccacgtcctgactgggattctggtccttcaccgtttgctcttgctgtagtgaaaaggtcacagtctttcagtaaagagcgcaccgagtcacctagtgccagtgcattggtccaacctccagccaacacagaggaagggaagactcattctgtaaataaatttgtggacatcccacagcttggtgtgtctgataaggaaaataactctgcacataatgaacagaattcccaaataccaactccaactgatggcccatcattcactgttatgagacaaagttctttaacattccaaagctctgacccagaacagatgcgacagagtttgctgactgcaatccgttcgggagaggctgctgccaaattgaaaagggttaccattccatcaaatacaatatctgtgaatggaaggtcaagactcagccattccatgtcccctgatgcccaggacggccattaaatgttaccctgccacaccactgcacttcacttccacttcagaccaacttcatactaatggaacattttggcaaatgtatattcagatgtacactaatatattatctattaaaatattagaatttgtgttgtggcttttaatgccagaagaaaagttaccagaatttataatttatagtaattttttgatcttttttttgccttaagagttgaatatgctgctttagaactttaaaacaaggtgtaaatgattttcattttttacaaatgaaaaataattcctttgtattgatttcacttaccagcacattctctacaatggtgacttagacaaaagtataagattcatagactttatatttgtatgacatacaactaggacaaacatagatatgacatttgctgcctcagtgtagcaattggaaatatttataagttatatgaaagcctgttttgggctgaaagaatgatttagaaaactagtgataccaaataagtatattcagttcaataattattttcaatgatgaatcacttagtgtgaaagacttgccttgtgtattctttatgtaattacaaatcactgtcaattttatgggaagctcatagtattttaatattttattaacatggaactcttgtttttttaatctttagaacttaaattctacaagaattttaaatattttctgtatataattatgacattgtcacacagaaattacacattttatgtgccagaagccttaaacatctttctgtgaaaatgctgatatattgtgacagttatttcacatttgatatgtagagaggaataggggttagtttatgtttatattgaaaaactttaaagactatttggaagttccagaaattctggttttaattcaagtaaaatgataaaatagtcattatatagttcagatgctaatattctaagtaataatatatatttacattgaagctaaaactgttaagcaaaacaatgcccatttgtcggcttacagctcttccggagtctagagcctgttggtgttctgtccctactttaagaatttaattgctcacttattctgaaagctttgttcaaacaagatgatattaaatttgttttcactaaaactactgggatatctgcctcttggggatttttttttcaatttaataaaagcaagttgtatatatttggggtgctttttaaaatatatagtttgtgtcaaccagcatatttatttcccttacctgatgcatacatttctattagccagtgaacaaacaagaaatttgtaagatttaccatttatcagggatccctagtgtacatttaagccctggcattctgactccaaaatgcatggtctaagcatttaaaatgtttagcatagttcctgatacatggcatggccatcttaaatgctaaatgttgctgctgttttccttgaatcagttggagagaccctcatatatagatacttaagttatgttgttataagcaagtagagaaaggagtgaattttttttaaaaaattgtgttgtcataattatctacttataaaaatataaatttggatccctaatttaaaccttcatatattttgagttggattgaagacttaaagacaagcgacatgtaagatgttttcaatatattaatatataagaaaggcttaatttatgaagatatgaaagttcctacaactcatgataagtctacctaatagaaatatcagcacattattcttacaagaggaaattcaaaaggccaacaaacatggaaaaaaaatactcttcactgataatcagggaaatacaagttaaaaacatggaaaggtaccacatcaaattagcaaaaacggaagtttcaaaatagcaagtgttgtcaggaacatcaaacagtgggaactctactgttggtgggaaaatacactggcataactaccagttctgcaatatctagtaaaattaaagattccttaccatgttaccttaaataagtacttatgcacatgcataaggagacatctgcaaaaatgttcacggcagccttgtgtaaaacagcagaaaggggtcctaacccgtgctcagctttagtaatgcatatattcatatgatagacttccacacagcagtccaaatgaacaagctagagctatatatgtcagcatgaatacatctcaaaaacaagtgacaagagtgagtggtggaacaagtcgtgttttatgaaattagttacataaagtataaatataaaaaatgatactataaattatggctgtatatgtaggaaaaaaatttgctggtggttacctgtgggaaccaagaaagactgaattgagatttataagaggcatcaattgtgttcgtagtattttataaactgctgtttgaaaacaagtgcttattatattctaaattctagtatact

SEQ ID NO: 51117 - DNA, 2721 bp, Homo sapiens
cgtcgcgacaggtatatccccctcccaagggctagtttttttgtttagaataaatagggggccattgggagggggatttcacgttaatttataccatcagtacaaaacttgtaaaattcattgctttgtggaattcactttatctttctacattctcagaggcagttttggggagccagaattacagaattaatctagctaaaaatgctctttaacagcttggtttgcagtctgtttgtgctcttgtccttggtgttgatttggtaattctgtacagattaagatgtgttaatggattatttatcttatttgttgtgaaaataacgactctctctttttaaattttatggtagaatgaacattttggcaaatgtatattcagatgtacactaatatattatctattaaaatattagaatttgtgttgtggcttttaatgccagaagaaaagttaccagaatttataatttatagtaattttttgatcttttttttgccttaagagttgaatatgctgctttagaactttaaaacaaggtgtaaatgattttcattttttacaaatgaaaaataattcctttgtattgatttcacttaccagcacattctctacaatggtgacttagacaaaagtataagattcatagactttatatttgtatgacatacaactaggacaaacatagatatgacatttgctgcctcagtgtagcaattggaaatatttataagttatatgaaagcctgttttgggctgaaagaatgatttagaaaactagtgataccaaataagtatattcagttcaataattattttcaatgatgaatcacttagtgtgaaagacttgccttgtgtattctttatgtaattacaaatcactgtcaattttatgggaagctcatagtattttaatattttattaacatggaactcttgtttttttaatctttagaacttaaattctacaagaattttaaatattttctgtatataattatgacattgtcacacagaaattacacattttatgtgccagaagccttaaacatctttctgtgaaaatgctgatatattgtgacagttatttcacatttgatatgtagagaggaataggggttagtttatgtttatattgaaaaactttaaagactatttggaagttccagaaattctggttttaattcaagtaaaatgataaaatagtcattatatagttcagatgctaatattctaagtaataatatatatttacattgaagctaaaactgttaagcaaaacaatgcccatttgtcggcttacagctcttccggagtctagagcctgttggtgttctgtccctactttaagaatttaattgctcacttattctgaaagctttgttcaaacaagatgatattaaatttgttttcactaaaactactgggatatctgcctcttggggatttttttttcaatttaataaaagcaagttgtatatatttggggtgctttttaaaatatatagtttgtgtcaaccagcatatttatttcccttacctgatgcatacatttctattagccagtgaacaaacaagaaatttgtaagatttaccatttatcagggatccctagtgtacatttaagccctggcattctgactccaaaatgcatggtctaagcatttaaaatgtttagcatagttcctgatacatggcatggccatcttaaatgctaaatgttgctgctgttttccttgaatcagttggagagaccctcatatatagatacttaagttatgttgttataagcaagtagagaaaggagtgaattttttttaaaaaattgtgttgtcataattatctacttataaaaatataaatttggatccctaatttaaaccttcatatattttgagttggattgaagacttaaagacaagcgacatgtaagatgttttcaatatattaatatataagaaaggcttaatttatgaagatatgaaagttcctacaactcatgataagtctacctaatagaaatatcagcacattattcttacaagaggaaattcaaaaggccaacaaacatggaaaaaaaatactcttcactgataatcagggaaatacaagttaaaaacatggaaaggtaccacatcaaattagcaaaaacggaagtttcaaaatagcaagtgttgtcaggaacatcaaacagtgggaactctactgttggtgggaaaatacactggcataactaccagttctgcaatatctagtaaaattaaagattccttaccatgttaccttaaataagtacttatgcacatgcataaggagacatctgcaaaaatgttcacggcagccttgtgtaaaacagcagaaaggggtcctaacccgtgctcagctttagtaatgcatatattcatatgatagacttccacacagcagtccaaatgaacaagctagagctatatatgtcagcatgaatacatctcaaaaacaagtgacaagagtgagtggtggaacaagtcgtgttttatgaaattagttacataaagtataaatataaaaaatgatactataaattatggctgtatatgtaggaaaaaaatttgctggtggttacctgtgggaaccaagaaagactgaattgagatttataagaggcatcaattgtgttcgtagtattttataaactgctgtttgaaaacaagtgcttattatattctaaattctagtatact

SEQ ID NO: 51118 - DNA, 1750 bp, Homo sapiens
ttccggcaccggaggccaaagacccgaagccctgggggaaggaaattccaacttgctcccggcccacccccgccccgttcctctctccggctcgctgcttccctcgctccaatgccgccgagctggtccccacttatgtgcggccgtgctgcagaggcggcggcgagctcccggactccgggcagggaaatggggcagggtgagtgagagagcgggctccagcgaggcccccagcgcccagccagcgcccgcaccccgcccgcgggacaggggaggtgctgagtcggccctgcccgcgctgggctgagcctcgcaggggttgccgcttctccattcaagtcctggcttgagagccgagcggcaagagcgcgggccggggaagggaagagtaggagaggaagccgcgagggagaacaggcgagctactgtctcctttggaaaagaaccagtgacgcgccgcctgggagctggagcccgcgcagcgccccgcagggcgatggacggccgaaccccgcgcccgcaggacgccccagccaggagaaaaccaaaagccaaggcaccacttcctccagctgagaccaaatatactgatgtctcttcagctgctgattctgtagaatccactgctttcatcatggaacagaaagaaaacatgatagataaagacgttgaactctcagtggtcctacctggggatattatcaaatctactactgttcatggcagtaaacctatgatggacttgttgatattcctttgtgcacagtatcacttaaatccatcaagttacacaatcgatctgttgtcagctgaacagaaccacattaaatttaagccaaacacaccaataggaatgttggaggtagagaaggtaattttaaagccaaaaatgttggataagaaaaaacctacacctataataccagagaaaactgtgagagtagtgattaattttaagaaaacacagaagaccatagtgagagtgagtccacatgcatcgcttcaagagcttgcccctattatatgtagcaaatgtgagtttgatccgttgcatacactattgttgaaagattatcaatcgcaggagcctcttgacttgacaaaatctcttaatgacctgggactaagagaattatatgcgatggatgtcaacagagagtcctgccaaatatcacaaaacctagatattatgaaggagaaagaaaataaagggtttttcagtttttttcaacgcagtaagaaaaagcgagaccaaactgcaagtgcccctgcaacccctctagtaaataagcaccgcccaacttttacaaggtccaataccatttccaaaccatatatttccaacaccctgccgtcggatgcacccaagaagaggcgggctccactgcccccgatgccagcatctcagagtgtcccccaagaccttgcacacatccaggagaggcctgcttcttgtatagtgaaatccatgagcgtggatgagacagataaggtgtgtagttttgttttctattttgtttttttggatgaggcagtgtaccatttatttttcctcttacctaacatcttttctaggtagactagtaagaagtagtcctataacagttggtaattagtaacagttactaatatgtaataagatgaatagctcattctaagattggtactaggaatagatcttctatgtacatacaggtctgtgatgcagtaaaggataaatgtccattttaagtaactttcatattcaagc

SEQ ID NO: 51119 - DNA, 698 bp, Homo sapiens
gtgcctggcgcttacacatacatgataaacagttgagttagtaacagagcaggacagttggttcagcattctctaaaagtaaagcgctagaggaacaatactgttttatggagactttctggaacagttggcatgaggttagatgatcgagactataaataagcaaacttaatgatgtcattaataaggaagaggagaaggtacctcttggtgtcttgtttactcccactatgcatacgttctttagaaagcaaattactgaaccatatggaaaaggaaaaagctaaggtgaatgtgttgaaatgtttgatctacgtagaaaaggagaacatcaaaggcaagcctttgtatgctatgtgtgcaagaaggacaggatgaaaatcccatcagtgggtacatttaaaaaataaagctttcactctacatcaaagagcagtgaatgaatttacatctgtgcatcttaagttagaatgtttgaggttatatgaacttttgatttcccactttacctgccctttttataacctgctgactagaaatattagagaattttgttatatttgcctccttttttgataatttttctaaatcattaatcctaaactattttccataagataatggtagtgtctcttctaactatatgttttaaaactctagtgatttttccaaaaaatgaacttatttaaatatgtgag

SEQ ID NO: 51120 - DNA, 513 bp, Homo sapiens
gtgagttatataaattaatagccaacactttcttacttttattatgtgccaaggacagttcttaacactttatatgtattaactcatttaatctcctgtaactcacttaatacctacctcatttatggatattatgggtactattatttttagttccattttacagatgattgtgccacagagatattaaataactcacctgaggtctcacaactactacggtaagtggtgaacctaggatttaaactggggcaatattgctctagagtgtgcccttaactaccatgtgtactacttttgttgttaaaacatagaaattatctaatttagactttggatcttaaaaatgtttcttctgtgtatctatttgcgatctgtttctctttttttccatctaacttccttggatgaaacttttctgcctgatttttcaaggcccaaatcatctaataatataaccttatttaccactgtttcccagttcccatcctcatattagcacaacttattttt

SEQ ID NO: 51121 - DNA, 957 bp, Homo sapiens
ttccggcaccggaggccaaagacccgaagccctgggggaaggaaattccaacttgctcccggcccacccccgccccgttcctctctccggctcgctgcttccctcgctccaatgccgccgagctggtccccacttatgtgcggccgtgctgcagaggcggcggcgagctcccggactccgggcagggaaatggggcagggtgagtgagagagcgggctccagcgaggcccccagcgcccagccagcgcccgcaccccgcccgcgggacaggggaggtgctgagtcggccctgcccgcgctgggctgagcctcgcaggggttgccgcttctccattcaagtcctggcttgagagccgagcggcaagagcgcgggccggggaagggaagagtaggagaggaagccgcgagggagaacaggcgagctactgtctcctttggaaaagaaccagtgacgcgccgcctgggagctggagcccgcgcagcgccccgcagggcgatggacggccgaaccccgcgcccgcaggacgccccagccaggagaaaaccaaaagccaaggcaccacttcctccagctgagaccaaatatactgatgtctcttcagctgctgattctgtagaatccactgctttcatcatggaacagaaagaaaacatgatagataaagacgttgaactctcagtggtcctacctggggatattatcaaatctactactgttcatggcaggtacgctggagtaaatgaaatatcaggacctccccttcttattccaccattgaaagtctctgtgatatacgtcttgatgtttgttctttgacaaaacacttcatttatcactcagtttagttacctgttaaaaaaaaagactgctaaaatggtgttaaaaattttctatcaatgttttaatatcagtgctatgaattccacaaacccaattaaatgactcttgaaatttgg

SEQ ID NO: 51122 - DNA, 6144 bp, Homo sapiens
cggcgcccgcgggctgggagccggggcccgcaggtggaagcgcacccgggaggcgggccggccggggctggagcggctcgggcgggctcttgacgctcagccagcttcgctccggcctcgggaaggcgcgcgtcccgccctgacccgccggcctctcccaccccagcagtgacgcgccgcctgggagctggagcccgcgcagcgccccgcagggcgatggacggccgaaccccgcgcccgcaggacgccccagccaggagaaaaccaaaagccaaggcaccacttcctccagctgagaccaaatatactgatgtctcttcagctgctgattctgtagaatccactgctttcatcatggaacagaaagaaaacatgatagataaagacgttgaactctcagtggtcctacctggggatattatcaaatctactactgttcatggcagtaaacctatgatggacttgttgatattcctttgtgcacagtatcacttaaatccatcaagttacacaatcgatctgttgtcagctgaacagaaccacattaaatttaagccaaacacaccaataggaatgttggaggtagagaaggtaattttaaagccaaaaatgttggataagaaaaaacctacacctataataccagagaaaactgtgagagtagtgattaattttaagaaaacacagaagaccatagtgagagtgagtccacatgcatcgcttcaagagcttgcccctattatatgtagcaaatgtgagtttgatccgttgcatacactattgttgaaagattatcaatcgcaggagcctcttgacttgacaaaatctcttaatgacctgggactaagagaattatatgcgatggatgtcaacagagagtcctgccaaatatcacaaaacctagatattatgaaggagaaagaaaataaagggtttttcagtttttttcaacgcagtaagaaaaagcgagaccaaactgcaagtgcccctgcaacccctctagtaaataagcaccgcccaacttttacaaggtccaataccatttccaaaccatatatttccaacaccctgccgtcggatgcacccaagaagaggcgggctccactgcccccgatgccagcatctcagagtgtcccccaagaccttgcacacatccaggagaggcctgcttcttgtatagtgaaatccatgagcgtggatgagacagataagagtccctgtgaagcaggaagagtgagggcaggttcactgcagctcagcagcatgtctgcagggaattcatctttgagaaggacaaagcgaaaagcaccttccccaccctccaaaatacccccgcatcaaagtgatgaaaatagtcgtgtgactgccttacagccagtagatggagttcctccagacagtgcttcagaagcaaactctcctgaggagctatccagcccagaaacctttcaccctgggctttccagtcaggagcagtgcactgcgcccaaactgatggaggaaacctctgtctttgagtgccctgggacacctgaggcagccataacatcattgacatctggaataagctctgattatagccttgaagagatagatgaaaaggaagaactgagtgaagtgcctaaagttgaagctgaaaatatttctccgaagtcacaagatattccttttgtatctactgatataataaatacactgaaaaatgatcctgactcagcccttggcaatggtagtggagagttctcacaaaactccatggaagaaaaacaagaaactaaaagcacagatggacaagaaccacacagtgtagtatatgatacaagcaatggaaagaaggtagttgacagtataagaaacttgaagtcgttgggcccaaaccaagagaatgtagttcaaaatgaaataattgtctatccagagaacacagaagacaatatgaaaaatggagtgaagaaaacagaaatcaatgtagaaggtgttgccaaaaataacaacattgatatggaagttgagagaccatcaaactctgaggcacatgaaactgatactgctataagttacaaggaaaaccatctagcagcttcatcagtaccagatcaaaaactgaatcaacccagtgcagaaaagacaaaagatgcagcaattcagacaaccccttcttgtaacagttttgatgggaaacaccaagatcataatttatctgactccaaagttgaagaatgtgtgcaaacttcaaataacaacatatcaactcaacactcatgcttaagttcacaagattctgtaaatacctcaagggaattcaggagtcaaggcaccctaattatacattcagaagatccgcttaccgtaaaagatccaatttgtgcacatggtaatgatgatcttttgcctcctgtagataggattgacaaaaattccactgcttcttacctaaagaattacccactttatagacaggactacaatcccaagccaaaaccttcaaatgaaattacacgagagtatatacccaaaattggcatgactacttataaaatagtgcctcccaaatccttggaaatatcgaaagactggcaatcagaaaccatagagtataaagatgatcaggacatgcatgctttagggaaaaagcacactcatgagaatgtgaaagaaactgccatccaaacagaagattctgctatttctgaaagcccagaagagccactgccaaaccttaaaccgaagcctaacctgagaacagagcatcaagtgcccagttctgtgagctcacctgatgatgccatggttagtcctctgaaacctgctcccaaaatgacaagagacactggcacagctccttttgcaccaaatttggaagaaataaacaatattttggaatcaaaatttaaatctcgggcttcaaatgcccaggccaaacccagctctttttttttgcagatgcagaagagagtatcgggtcactatgtgacatctgcagctgccaagagtgtccatgctgcccctaatcctgctccaaaagaactgacaaataaagaggcagaaagggatatgctgccttctccggagcagactctttctcccttaagtaaaatgcctcactctgttccacaaccccttgttgaaaaaactgatgatgatgtcatcggtcaggctcctgctgaagcctcccctcctcccatagctccaaaacctgtgacaattcctgctagtcaggtatccacacaaaatctgaagactttgaaaacttttggtgccccacgaccatactcaagttctggtccttcaccgtttgctcttgctgtagtgaaaaggtcacagtctttcagtaaagagcgcaccgagtcacctagtgccagtgcattggtccaacctccagccaacacagaggaagggaagactcattctgtaaataaatttgtggacatcccacagcttggtgtgtctgataaggaaaataactctgcacataatgaacagaattcccaaataccaactccaactgatggcccatcattcactgttatgagacaaagttctttaacattccaaagctctgacccagaacagatgcgacagagtttgctgactgcaatccgttcgggagaggctgctgccaaattgaaaagggttaccattccatcaaatacaatatctgtgaatggaaggtcaagactcagccattccatgtcccctgatgcccaggacggccattaaatgttaccctgccacaccactgcacttcacttccacttcagaccaacttcatactaatggaacattttggcaaatgtatattcagatgtacactaatatattatctattaaaatattagaatttgtgttgtggcttttaatgccagaagaaaagttaccagaatttataatttatagtaattttttgatcttttttttgccttaagagttgaatatgctgctttagaactttaaaacaaggtgtaaatgattttcattttttacaaatgaaaaataattcctttgtattgatttcacttaccagcacattctctacaatggtgacttagacaaaagtataagattcatagactttatatttgtatgacatacaactaggacaaacatagatatgacatttgctgcctcagtgtagcaattggaaatatttataagttatatgaaagcctgttttgggctgaaagaatgatttagaaaactagtgataccaaataagtatattcagttcaataattattttcaatgatgaatcacttagtgtgaaagacttgccttgtgtattctttatgtaattacaaatcactgtcaattttatgggaagctcatagtattttaatattttattaacatggaactcttgtttttttaatctttagaacttaaattctacaagaattttaaatattttctgtatataattatgacattgtcacacagaaattacacattttatgtgccagaagccttaaacatctttctgtgaaaatgctgatatattgtgacagttatttcacatttgatatgtagagaggaataggggttagtttatgtttatattgaaaaactttaaagactatttggaagttccagaaattctggttttaattcaagtaaaatgataaaatagtcattatatagttcagatgctaatattctaagtaataatatatatttacattgaagctaaaactgttaagcaaaacaatgcccatttgtcggcttacagctcttccggagtctagagcctgttggtgttctgtccctactttaagaatttaattgctcacttattctgaaagctttgttcaaacaagatgatattaaatttgttttcactaaaactactgggatatctgcctcttggggatttttttttcaatttaataaaagcaagttgtatatatttggggtgctttttaaaatatatagtttgtgtcaaccagcatatttatttcccttacctgatgcatacatttctattagccagtgaacaaacaagaaatttgtaagatttaccatttatcagggatccctagtgtacatttaagccctggcattctgactccaaaatgcatggtctaagcatttaaaatgtttagcatagttcctgatacatggcatggccatcttaaatgctaaatgttgctgctgttttccttgaatcagttggagagaccctcatatatagatacttaagttatgttgttataagcaagtagagaaaggagtgaattttttttaaaaaattgtgttgtcataattatctacttataaaaatataaatttggatccctaatttaaaccttcatatattttgagttggattgaagacttaaagacaagcgacatgtaagatgttttcaatatattaatatataagaaaggcttaatttatgaagatatgaaagttcctacaactcatgataagtctacctaatagaaatatcagcacattattcttacaagaggaaattcaaaaggccaacaaacatggaaaaaaaatactcttcactgataatcagggaaatacaagttaaaaacatggaaaggtaccacatcaaattagcaaaaacggaagtttcaaaatagcaagtgttgtcaggaacatcaaacagtgggaactctactgttggtgggaaaatacactggcataactaccagttctgcaatatctagtaaaattaaagattccttaccatgttaccttaaataagtacttatgcacatgcataaggagacatctgcaaaaatgttcacggcagccttgtgtaaaacagcagaaaggggtcctaacccgtgctcagctttagtaatgcatatattcatatgatagacttccacacagcagtccaaatgaacaagctagagctatatatgtcagcatgaatacatctcaaaaacaagtgacaagagtgagtggtggaacaagtcgtgttttatgaaattagttacataaagtataaatataaaaaatgatactataaattatggctgtatatgtaggaaaaaaatttgctggtggttacctgtgggaaccaagaaagactgaattgagatttataagaggcatcaattgtgttcgtagtattttataaactgctgtttgaaaacaagtgcttattatattctaaattctagtatact

SEQ ID NO: 51123 - DNA, 6507 bp, Homo sapiens
ttccggcaccggaggccaaagacccgaagccctgggggaaggaaattccaacttgctcccggcccacccccgccccgttcctctctccggctcgctgcttccctcgctccaatgccgccgagctggtccccacttatgtgcggccgtgctgcagaggcggcggcgagctcccggactccgggcagggaaatggggcagggtgagtgagagagcgggctccagcgaggcccccagcgcccagccagcgcccgcaccccgcccgcgggacaggggaggtgctgagtcggccctgcccgcgctgggctgagcctcgcaggggttgccgcttctccattcaagtcctggcttgagagccgagcggcaagagcgcgggccggggaagggaagagtaggagaggaagccgcgagggagaacaggcgagctactgtctcctttggaaaagaaccagtgacgcgccgcctgggagctggagcccgcgcagcgccccgcagggcgatggacggccgaaccccgcgcccgcaggacgccccagccaggagaaaaccaaaagccaaggcaccacttcctccagctgagaccaaatatactgatgtctcttcagctgctgattctgtagaatccactgctttcatcatggaacagaaagaaaacatgatagataaagacgttgaactctcagtggtcctacctggggatattatcaaatctactactgttcatggcagtaaacctatgatggacttgttgatattcctttgtgcacagtatcacttaaatccatcaagttacacaatcgatctgttgtcagctgaacagaaccacattaaatttaagccaaacacaccaataggaatgttggaggtagagaaggtaattttaaagccaaaaatgttggataagaaaaaacctacacctataataccagagaaaactgtgagagtagtgattaattttaagaaaacacagaagaccatagtgagagtgagtccacatgcatcgcttcaagagcttgcccctattatatgtagcaaatgtgagtttgatccgttgcatacactattgttgaaagattatcaatcgcaggagcctcttgacttgacaaaatctcttaatgacctgggactaagagaattatatgcgatggatgtcaacagagccacttctgttactgtcttcagtaagtcatctttacaagagtcctgccaaatatcacaaaacctagatattatgaaggagaaagaaaataaagggtttttcagtttttttcaacgcagtaagaaaaagcgagaccaaactgcaagtgcccctgcaacccctctagtaaataagcaccgcccaacttttacaaggtccaataccatttccaaaccatatatttccaacaccctgccgtcggatgcacccaagaagaggcgggctccactgcccccgatgccagcatctcagagtgtcccccaagaccttgcacacatccaggagaggcctgcttcttgtatagtgaaatccatgagcgtggatgagacagataagagtccctgtgaagcaggaagagtgagggcaggttcactgcagctcagcagcatgtctgcagggaattcatctttgagaaggacaaagcgaaaagcaccttccccaccctccaaaatacccccgcatcaaagtgatgaaaatagtcgtgtgactgccttacagccagtagatggagttcctccagacagtgcttcagaagcaaactctcctgaggagctatccagcccaggaaacatttaggaggaacactcttgaatctttcatctttaagtgaaacctttcaccctgggctttccagtcaggagcagtgcactgcgcccaaactgatggaggaaacctctgtctttgagtgccctgggacacctgaggcagccataacatcattgacatctggaataagctctgattatagccttgaagagatagatgaaaaggaagaactgagtgaagtgcctaaagttgaagctgaaaatatttctccgaagtcacaagatattccttttgtatctactgatataataaatacactgaaaaatgatcctgactcagcccttggcaatggtagtggagagttctcacaaaactccatggaagaaaaacaagaaactaaaagcacagatggacaagaaccacacagtgtagtatatgatacaagcaatggaaagaaggtagttgacagtataagaaacttgaagtcgttgggcccaaaccaagagaatgtagttcaaaatgaaataattgtctatccagagaacacagaagacaatatgaaaaatggagtgaagaaaacagaaatcaatgtagaaggtgttgccaaaaataacaacattgatatggaagttgagagaccatcaaactctgaggcacatgaaactgatactgctataagttacaaggaaaaccatctagcagcttcatcagtaccagatcaaaaactgaatcaacccagtgcagaaaagacaaaagatgcagcaattcagacaaccccttcttgtaacagttttgatgggaaacaccaagatcataatttatctgactccaaagttgaagaatgtgtgcaaacttcaaataacaacatatcaactcaacactcatgcttaagttcacaagattctgtaaatacctcaagggaattcaggagtcaaggcaccctaattatacattcagaagatccgcttaccgtaaaagatccaatttgtgcacatggtaatgatgatcttttgcctcctgtagataggattgacaaaaattccactgcttcttacctaaagaattacccactttatagacaggactacaatcccaagccaaaaccttcaaatgaaattacacgagagtatatacccaaaattggcatgactacttataaaatagtgcctcccaaatccttggaaatatcgaaagactggcaatcagaaaccatagagtataaagatgatcaggacatgcatgctttagggaaaaagcacactcatgagaatgtgaaagaaactgccatccaaacagaagattctgctatttctgaaagcccagaagagccactgccaaaccttaaaccgaagcctaacctgagaacagagcatcaagtgcccagttctgtgagctcacctgatgatgccatggttagtcctctgaaacctgctcccaaaatgacaagagacactggcacagctccttttgcaccaaatttggaagaaataaacaatattttggaatcaaaatttaaatctcgggcttcaaatgcccaggccaaacccagctctttttttttgcagatgcagaagagagtatcgggtcactatgtgacatctgcagctgccaagagtgtccatgctgcccctaatcctgctccaaaagaactgacaaataaagaggcagaaagggatatgctgccttctccggagcagactctttctcccttaagtaaaatgcctcactctgttccacaaccccttgttgaaaaaactgatgatgatgtcatcggtcaggctcctgctgaagcctcccctcctcccatagctccaaaacctgtgacaattcctgctagtcaggtatccacacaaaatctgaagactttgaaaacttttggtgccccacgaccatactcaagttctggtccttcaccgtttgctcttgctgtagtgaaaaggtcacagtctttcagtaaagagcgcaccgagtcacctagtgccagtgcattggtccaacctccagccaacacagaggaagggaagactcattctgtaaataaatttgtggacatcccacagcttggtgtgtctgataaggaaaataactctgcacataatgaacagaattcccaaataccaactccaactgatggcccatcattcactgttatgagacaaagttctttaacattccaaagctctgacccagaacagatgcgacagagtttgctgactgcaatccgttcgggagaggctgctgccaaattgaaaagggttaccattccatcaaatacaatatctgtgaatggaaggtcaagactcagccattccatgtcccctgatgcccaggacggccattaaatgttaccctgccacaccactgcacttcacttccacttcagaccaacttcatactaatggaacattttggcaaatgtatattcagatgtacactaatatattatctattaaaatattagaatttgtgttgtggcttttaatgccagaagaaaagttaccagaatttataatttatagtaattttttgatcttttttttgccttaagagttgaatatgctgctttagaactttaaaacaaggtgtaaatgattttcattttttacaaatgaaaaataattcctttgtattgatttcacttaccagcacattctctacaatggtgacttagacaaaagtataagattcatagactttatatttgtatgacatacaactaggacaaacatagatatgacatttgctgcctcagtgtagcaattggaaatatttataagttatatgaaagcctgttttgggctgaaagaatgatttagaaaactagtgataccaaataagtatattcagttcaataattattttcaatgatgaatcacttagtgtgaaagacttgccttgtgtattctttatgtaattacaaatcactgtcaattttatgggaagctcatagtattttaatattttattaacatggaactcttgtttttttaatctttagaacttaaattctacaagaattttaaatattttctgtatataattatgacattgtcacacagaaattacacattttatgtgccagaagccttaaacatctttctgtgaaaatgctgatatattgtgacagttatttcacatttgatatgtagagaggaataggggttagtttatgtttatattgaaaaactttaaagactatttggaagttccagaaattctggttttaattcaagtaaaatgataaaatagtcattatatagttcagatgctaatattctaagtaataatatatatttacattgaagctaaaactgttaagcaaaacaatgcccatttgtcggcttacagctcttccggagtctagagcctgttggtgttctgtccctactttaagaatttaattgctcacttattctgaaagctttgttcaaacaagatgatattaaatttgttttcactaaaactactgggatatctgcctcttggggatttttttttcaatttaataaaagcaagttgtatatatttggggtgctttttaaaatatatagtttgtgtcaaccagcatatttatttcccttacctgatgcatacatttctattagccagtgaacaaacaagaaatttgtaagatttaccatttatcagggatccctagtgtacatttaagccctggcattctgactccaaaatgcatggtctaagcatttaaaatgtttagcatagttcctgatacatggcatggccatcttaaatgctaaatgttgctgctgttttccttgaatcagttggagagaccctcatatatagatacttaagttatgttgttataagcaagtagagaaaggagtgaattttttttaaaaaattgtgttgtcataattatctacttataaaaatataaatttggatccctaatttaaaccttcatatattttgagttggattgaagacttaaagacaagcgacatgtaagatgttttcaatatattaatatataagaaaggcttaatttatgaagatatgaaagttcctacaactcatgataagtctacctaatagaaatatcagcacattattcttacaagaggaaattcaaaaggccaacaaacatggaaaaaaaatactcttcactgataatcagggaaatacaagttaaaaacatggaaaggtaccacatcaaattagcaaaaacggaagtttcaaaatagcaagtgttgtcaggaacatcaaacagtgggaactctactgttggtgggaaaatacactggcataactaccagttctgcaatatctagtaaaattaaagattccttaccatgttaccttaaataagtacttatgcacatgcataaggagacatctgcaaaaatgttcacggcagccttgtgtaaaacagcagaaaggggtcctaacccgtgctcagctttagtaatgcatatattcatatgatagacttccacacagcagtccaaatgaacaagctagagctatatatgtcagcatgaatacatctcaaaaacaagtgacaagagtgagtggtggaacaagtcgtgttttatgaaattagttacataaagtataaatataaaaaatgatactataaattatggctgtatatgtaggaaaaaaatttgctggtggttacctgtgggaaccaagaaagactgaattgagatttataagaggcatcaattgtgttcgtagtattttataaactgctgtttgaaaacaagtgcttattatattctaaattctagtatact

SEQ ID NO: 51124 - DNA, 5910 bp, Homo sapiens
ttccggcaccggaggccaaagacccgaagccctgggggaaggaaattccaacttgctcccggcccacccccgccccgttcctctctccggctcgctgcttccctcgctccaatgccgccgagctggtccccacttatgtgcggccgtgctgcagaggcggcggcgagctcccggactccgggcagggaaatggggcaggcagtgacgcgccgcctgggagctggagcccgcgcagcgccccgcagggcgatggacggccgaaccccgcgcccgcaggacgccccagccagtaaacctatgatggacttgttgatattcctttgtgcacagtatcacttaaatccatcaagttacacaatcgatctgttgtcagctgaacagaaccacattaaatttaagccaaacacaccaataggaatgttggaggtagagaaggtaattttaaagccaaaaatgttggataagaaaaaacctacacctataataccagagaaaactgtgagagtagtgattaattttaagaaaacacagaagaccatagtgagagtgagtccacatgcatcgcttcaagagcttgcccctattatatgtagcaaatgtgagtttgatccgttgcatacactattgttgaaagattatcaatcgcaggagcctcttgacttgacaaaatctcttaatgacctgggactaagagaattatatgcgatggatgtcaacagagccacttctgttactgtcttcagtaagtcatctttacaagagtcctgccaaatatcacaaaacctagatattatgaaggagaaagaaaataaagggtttttcagtttttttcaacgcagtaagaaaaagcgagaccaaactgcaagtgcccctgcaacccctctagtaaataagcaccgcccaacttttacaaggtccaataccatttccaaaccatatatttccaacaccctgccgtcggatgcacccaagaagaggcgggctccactgcccccgatgccagcatctcagagtgtcccccaagaccttgcacacatccaggagaggcctgcttcttgtatagtgaaatccatgagcgtggatgagacagataagagtccctgtgaagcaggaagagtgagggcaggttcactgcagctcagcagcatgtctgcagggaattcatctttgagaaggacaaagcgaaaagcaccttccccaccctccaaaatacccccgcatcaaagtgatgaaaatagtcgtgtgactgccttacagccagtagatggagttcctccagacagtgcttcagaagcaaactctcctgaggagctatccagcccagctggaataagctctgattatagccttgaagagatagatgaaaaggaagaactgagtgaagtgcctaaagttgaagctgaaaatatttctccgaagtcacaagatattccttttgtatctactgatataataaatacactgaaaaatgatcctgactcagcccttggcaatggtagtggagagttctcacaaaactccatggaagaaaaacaagaaactaaaagcacagatggacaagaaccacacagtgtagtatatgatacaagcaatggaaagaaggtagttgacagtataagaaacttgaagtcgttgggcccaaaccaagagaatgtagttcaaaatgaaataattgtctatccagagaacacagaagacaatatgaaaaatggagtgaagaaaacagaaatcaatgtagaaggtgttgccaaaaataacaacattgatatggaagttgagagaccatcaaactctgaggcacatgaaactgatactgctataagttacaaggaaaaccatctagcagcttcatcagtaccagatcaaaaactgaatcaacccagtgcagaaaagacaaaagatgcagcaattcagacaaccccttcttgtaacagttttgatgggaaacaccaagatcataatttatctgactccaaagttgaagaatgtgtgcaaacttcaaataacaacatatcaactcaacactcatgcttaagttcacaagattctgtaaatacctcaagggaattcaggagtcaaggcaccctaattatacattcagaagatccgcttaccgtaaaagatccaatttgtgcacatggtaatgatgatcttttgcctcctgtagataggattgacaaaaattccactgcttcttacctaaagaattacccactttatagacaggactacaatcccaagccaaaaccttcaaatgaaattacacgagagtatatacccaaaattggcatgactacttataaaatagtgcctcccaaatccttggaaatatcgaaagactggcaatcagaaaccatagagtataaagatgatcaggacatgcatgctttagggaaaaagcacactcatgagaatgtgaaagaaactgccatccaaacagaagattctgctatttctgaaagcccagaagagccactgccaaaccttaaaccgaagcctaacctgagaacagagcatcaagtgcccagttctgtgagctcacctgatgatgccatggttagtcctctgaaacctgctcccaaaatgacaagagacactggcacagctccttttgcaccaaatttggaagaaataaacaatattttggaatcaaaatttaaatctcgggcttcaaatgcccaggccaaacccagctctttttttttgcagatgcagaagagagtatcgggtcactatgtgacatctgcagctgccaagagtgtccatgctgcccctaatcctgctccaaaagaactgacaaataaagaggcagaaagggatatgctgccttctccggagcagactctttctcccttaagtaaaatgcctcactctgttccacaaccccttgttgaaaaaactgatgatgatgtcatcggtcaggctcctgctgaagcctcccctcctcccatagctccaaaacctgtgacaattcctgctagtcaggtatccacacaaaatctgaagactttgaaaacttttggtgccccacgaccatactcaagttctggtccttcaccgtttgctcttgctgtagtgaaaaggtcacagtctttcagtaaagagcgcaccgagtcacctagtgccagtgcattggtccaacctccagccaacacagaggaagggaagactcattctgtaaataaatttgtggacatcccacagcttggtgtgtctgataaggaaaataactctgcacataatgaacagaattcccaaataccaactccaactgatggcccatcattcactgttatgagacaaagttctttaacattccaaagctctgacccagaacagatgcgacagagtttgctgactgcaatccgttcgggagaggctgctgccaaattgaaaagggttaccattccatcaaatacaatatctgtgaatggaaggtcaagactcagccattccatgtcccctgatgcccaggacggccattaaatgttaccctgccacaccactgcacttcacttccacttcagaccaacttcatactaatggaacattttggcaaatgtatattcagatgtacactaatatattatctattaaaatattagaatttgtgttgtggcttttaatgccagaagaaaagttaccagaatttataatttatagtaattttttgatcttttttttgccttaagagttgaatatgctgctttagaactttaaaacaaggtgtaaatgattttcattttttacaaatgaaaaataattcctttgtattgatttcacttaccagcacattctctacaatggtgacttagacaaaagtataagattcatagactttatatttgtatgacatacaactaggacaaacatagatatgacatttgctgcctcagtgtagcaattggaaatatttataagttatatgaaagcctgttttgggctgaaagaatgatttagaaaactagtgataccaaataagtatattcagttcaataattattttcaatgatgaatcacttagtgtgaaagacttgccttgtgtattctttatgtaattacaaatcactgtcaattttatgggaagctcatagtattttaatattttattaacatggaactcttgtttttttaatctttagaacttaaattctacaagaattttaaatattttctgtatataattatgacattgtcacacagaaattacacattttatgtgccagaagccttaaacatctttctgtgaaaatgctgatatattgtgacagttatttcacatttgatatgtagagaggaataggggttagtttatgtttatattgaaaaactttaaagactatttggaagttccagaaattctggttttaattcaagtaaaatgataaaatagtcattatatagttcagatgctaatattctaagtaataatatatatttacattgaagctaaaactgttaagcaaaacaatgcccatttgtcggcttacagctcttccggagtctagagcctgttggtgttctgtccctactttaagaatttaattgctcacttattctgaaagctttgttcaaacaagatgatattaaatttgttttcactaaaactactgggatatctgcctcttggggatttttttttcaatttaataaaagcaagttgtatatatttggggtgctttttaaaatatatagtttgtgtcaaccagcatatttatttcccttacctgatgcatacatttctattagccagtgaacaaacaagaaatttgtaagatttaccatttatcagggatccctagtgtacatttaagccctggcattctgactccaaaatgcatggtctaagcatttaaaatgtttagcatagttcctgatacatggcatggccatcttaaatgctaaatgttgctgctgttttccttgaatcagttggagagaccctcatatatagatacttaagttatgttgttataagcaagtagagaaaggagtgaattttttttaaaaaattgtgttgtcataattatctacttataaaaatataaatttggatccctaatttaaaccttcatatattttgagttggattgaagacttaaagacaagcgacatgtaagatgttttcaatatattaatatataagaaaggcttaatttatgaagatatgaaagttcctacaactcatgataagtctacctaatagaaatatcagcacattattcttacaagaggaaattcaaaaggccaacaaacatggaaaaaaaatactcttcactgataatcagggaaatacaagttaaaaacatggaaaggtaccacatcaaattagcaaaaacggaagtttcaaaatagcaagtgttgtcaggaacatcaaacagtgggaactctactgttggtgggaaaatacactggcataactaccagttctgcaatatctagtaaaattaaagattccttaccatgttaccttaaataagtacttatgcacatgcataaggagacatctgcaaaaatgttcacggcagccttgtgtaaaacagcagaaaggggtcctaacccgtgctcagctttagtaatgcatatattcatatgatagacttccacacagcagtccaaatgaacaagctagagctatatatgtcagcatgaatacatctcaaaaacaagtgacaagagtgagtggtggaacaagtcgtgttttatgaaattagttacataaagtataaatataaaaaatgatactataaattatggctgtatatgtaggaaaaaaatttgctggtggttacctgtgggaaccaagaaagactgaattgagatttataagaggcatcaattgtgttcgtagtattttataaactgctgtttgaaaacaagtgcttattatattctaaattctagtatact

SEQ ID NO: 51125 - DNA, 6453 bp, Homo sapiens
ttccggcaccggaggccaaagacccgaagccctgggggaaggaaattccaacttgctcccggcccacccccgccccgttcctctctccggctcgctgcttccctcgctccaatgccgccgagctggtccccacttatgtgcggccgtgctgcagaggcggcggcgagctcccggactccgggcagggaaatggggcagggtgagtgagagagcgggctccagcgaggcccccagcgcccagccagcgcccgcaccccgcccgcgggacaggggaggtgctgagtcggccctgcccgcgctgggctgagcctcgcaggggttgccgcttctccattcaagtcctggcttgagagccgagcggcaagagcgcgggccggggaagggaagagtaggagaggaagccgcgagggagaacaggcgagctactgtctcctttggaaaagaaccagtgacgcgccgcctgggagctggagcccgcgcagcgccccgcagggcgatggacggccgaaccccgcgcccgcaggacgccccagccaggagaaaaccaaaagccaaggcaccacttcctccagctgagaccaaatatactgatgtctcttcagctgctgattctgtagaatccactgctttcatcatggaacagaaagaaaacatgatagataaagacgttgaactctcagtggtcctacctggggatattatcaaatctactactgttcatggcagtaaacctatgatggacttgttgatattcctttgtgcacagtatcacttaaatccatcaagttacacaatcgatctgttgtcagctgaacagaaccacattaaatttaagccaaacacaccaataggaatgttggaggtagagaaggtaattttaaagccaaaaatgttggataagaaaaaacctacacctataataccagagaaaactgtgagagtagtgattaattttaagaaaacacagaagaccatagtgagagtgagtccacatgcatcgcttcaagagcttgcccctattatatgtagcaaatgtgagtttgatccgttgcatacactattgttgaaagattatcaatcgcaggagcctcttgacttgacaaaatctcttaatgacctgggactaagagaattatatgcgatggatgtcaacagagccacttctgttactgtcttcagtaagtcatctttacaagagtcctgccaaatatcacaaaacctagatattatgaaggagaaagaaaataaagggtttttcagtttttttcaacgcagtaagaaaaagcgagaccaaactgcaagtgcccctgcaacccctctagtaaataagcaccgcccaacttttacaaggtccaataccatttccaaaccatatatttccaacaccctgccgtcggatgcacccaagaagaggcgggctccactgcccccgatgccagcatctcagagtgtcccccaagaccttgcacacatccaggagaggcctgcttcttgtatagtgaaatccatgagcgtggatgagacagataagagtccctgtgaagcaggaagagtgagggcaggttcactgcagctcagcagcatgtctgcagggaattcatctttgagaaggacaaagcgaaaagcaccttccccaccctccaaaatacccccgcatcaaagtgatgaaaatagtcgtgtgactgccttacagccagtagatggagttcctccagacagtgcttcagaagcaaactctcctgaggagctatccagcccaggaaacatttaggaggaacactcttgaatctttcatctttaagtgaaacctttcaccctgggctttccagtcaggagcagtgcactgcgcccaaactgatggaggaaacctctgtctttgagtgccctgggacacctgaggcagccataacatcattgacatctggaataagctctgattatagccttgaagagatagatgaaaaggaagaactgagtgaagtgcctaaagttgaagctgaaaatatttctccgaagtcacaagatattccttttgtatctactgatataataaatacactgaaaaatgatcctgactcagcccttggcaatggtagtggagagttctcacaaaactccatggaagaaaaacaagaaactaaaagcacagatggacaagaaccacacagtgtagtatatgatacaagcaatggaaagaaggtagttgacagtataagaaacttgaagtcgttgggcccaaaccaagagaatgtagttcaaaatgaaataattgtctatccagagaacacagaagacaatatgaaaaatggagtgaagaaaacagaaatcaatgtagaaggtgttgccaaaaataacaacattgatatggaagttgagagaccatcaaactctgaggcacatgaaactgatactgctataagttacaaggaaaaccatctagcagcttcatcagtaccagatcaaaaactgaatcaacccagtgcagaaaagacaaaagatgcagcaattcagacaaccccttcttgtaacagttttgatgggaaacaccaagatcataatttatctgactccaaagttgaagaatgtgtgcaaacttcaaataacaacatatcaactcaacactcatgcttaagttcacaagattctgtaaatacctcaagggaattcaggagtcaaggcaccctaattatacattcagaagatccgcttaccgtaaaagatccaatttgtgcacatggtaatgatgatcttttgcctcctgtagataggattgacaaaaattccactgcttcttacctaaagaattacccactttatagacaggactacaatcccaagccaaaaccttcaaatgaaattacacgagagtatatacccaaaattggcatgactacttataaaatagtgcctcccaaatccttggaaatatcgaaagactggcaatcagaaaccatagagtataaagatgatcaggacatgcatgctttagggaaaaagcacactcatgagaatgtgaaagaaactgccatccaaacagaagattctgctatttctgaaagcccagaagagccactgccaaaccttaaaccgaagcctaacctgagaacagagcatcaagtgcccagttctgtgagctcacctgatgatgccatggttagtcctctgaaacctgctcccaaaatgacaagagacactggcacagctccttttgcaccaaatttggaagaaataaacaatattttggaatcaaaatttaaatctcgggcttcaaatgcccaggccaaacccagctctttttttttgcagatgcagaagagagtatcgggtcactatgtgacatctgcagctgccaagagtgtccatgctgcccctaatcctgctccaaaagaactgacaaataaagaggcagaaagggatatgctgccttctccggagcagactctttctcccttaagtaaaatgcctcactctgttccacaaccccttgttgaaaaaactgatgatgatgtcatcggtcaggctcctgctgaagcctcccctcctcccatagctccaaaacctgtgacaattcctgctagtcaggtatccacacaaaatctgaagactttgaaaacttttggtgccccacgaccatactcaagttctggtccttcaccgtttgctcttgctgtagtgaaaaggtcacagtctttcagtaaagagcgcaccgagtcacctagtgccagtgcattggtccaacctccagccaacacagaggaagggaagactcattctgtaaataaatttgtggacatcccacagcttggtgtgtctgataagggcccatcattcactgttatgagacaaagttctttaacattccaaagctctgacccagaacagatgcgacagagtttgctgactgcaatccgttcgggagaggctgctgccaaattgaaaagggttaccattccatcaaatacaatatctgtgaatggaaggtcaagactcagccattccatgtcccctgatgcccaggacggccattaaatgttaccctgccacaccactgcacttcacttccacttcagaccaacttcatactaatggaacattttggcaaatgtatattcagatgtacactaatatattatctattaaaatattagaatttgtgttgtggcttttaatgccagaagaaaagttaccagaatttataatttatagtaattttttgatcttttttttgccttaagagttgaatatgctgctttagaactttaaaacaaggtgtaaatgattttcattttttacaaatgaaaaataattcctttgtattgatttcacttaccagcacattctctacaatggtgacttagacaaaagtataagattcatagactttatatttgtatgacatacaactaggacaaacatagatatgacatttgctgcctcagtgtagcaattggaaatatttataagttatatgaaagcctgttttgggctgaaagaatgatttagaaaactagtgataccaaataagtatattcagttcaataattattttcaatgatgaatcacttagtgtgaaagacttgccttgtgtattctttatgtaattacaaatcactgtcaattttatgggaagctcatagtattttaatattttattaacatggaactcttgtttttttaatctttagaacttaaattctacaagaattttaaatattttctgtatataattatgacattgtcacacagaaattacacattttatgtgccagaagccttaaacatctttctgtgaaaatgctgatatattgtgacagttatttcacatttgatatgtagagaggaataggggttagtttatgtttatattgaaaaactttaaagactatttggaagttccagaaattctggttttaattcaagtaaaatgataaaatagtcattatatagttcagatgctaatattctaagtaataatatatatttacattgaagctaaaactgttaagcaaaacaatgcccatttgtcggcttacagctcttccggagtctagagcctgttggtgttctgtccctactttaagaatttaattgctcacttattctgaaagctttgttcaaacaagatgatattaaatttgttttcactaaaactactgggatatctgcctcttggggatttttttttcaatttaataaaagcaagttgtatatatttggggtgctttttaaaatatatagtttgtgtcaaccagcatatttatttcccttacctgatgcatacatttctattagccagtgaacaaacaagaaatttgtaagatttaccatttatcagggatccctagtgtacatttaagccctggcattctgactccaaaatgcatggtctaagcatttaaaatgtttagcatagttcctgatacatggcatggccatcttaaatgctaaatgttgctgctgttttccttgaatcagttggagagaccctcatatatagatacttaagttatgttgttataagcaagtagagaaaggagtgaattttttttaaaaaattgtgttgtcataattatctacttataaaaatataaatttggatccctaatttaaaccttcatatattttgagttggattgaagacttaaagacaagcgacatgtaagatgttttcaatatattaatatataagaaaggcttaatttatgaagatatgaaagttcctacaactcatgataagtctacctaatagaaatatcagcacattattcttacaagaggaaattcaaaaggccaacaaacatggaaaaaaaatactcttcactgataatcagggaaatacaagttaaaaacatggaaaggtaccacatcaaattagcaaaaacggaagtttcaaaatagcaagtgttgtcaggaacatcaaacagtgggaactctactgttggtgggaaaatacactggcataactaccagttctgcaatatctagtaaaattaaagattccttaccatgttaccttaaataagtacttatgcacatgcataaggagacatctgcaaaaatgttcacggcagccttgtgtaaaacagcagaaaggggtcctaacccgtgctcagctttagtaatgcatatattcatatgatagacttccacacagcagtccaaatgaacaagctagagctatatatgtcagcatgaatacatctcaaaaacaagtgacaagagtgagtggtggaacaagtcgtgttttatgaaattagttacataaagtataaatataaaaaatgatactataaattatggctgtatatgtaggaaaaaaatttgctggtggttacctgtgggaaccaagaaagactgaattgagatttataagaggcatcaattgtgttcgtagtattttataaactgctgtttgaaaacaagtgcttattatattctaaattctagtatact

SEQ ID NO: 51126 - DNA, 4342 bp, Homo sapiens
ttccggcaccggaggccaaagacccgaagccctgggggaaggaaattccaacttgctcccggcccacccccgccccgttcctctctccggctcgctgcttccctcgctccaatgccgccgagctggtccccacttatgtgcggccgtgctgcagaggcggcggcgagctcccggactccgggcagggaaatggggcagggtgagtgagagagcgggctccagcgaggcccccagcgcccagccagcgcccgcaccccgcccgcgggacaggggaggtgctgagtcggccctgcccgcgctgggctgagcctcgcaggggttgccgcttctccattcaagtcctggcttgagagccgagcggcaagagcgcgggccggggaagggaagagtaggagaggaagccgcgagggagaacaggcgagctactgtctcctttggaaaagaaccagtgacgcgccgcctgggagctggagcccgcgcagcgccccgcagggcgatggacggccgaaccccgcgcccgcaggacgccccagccaggagaaaaccaaaagccaaggcaccacttcctccagctgagaccaaatatactgatgtctcttcagctgctgattctgtagaatccactgctttcatcatggaacagaaagaaaacatgatagataaagacgttgaactctcagtggtcctacctggggatattatcaaatctactactgttcatggcagtaaacctatgatggacttgttgatattcctttgtgcacagtatcacttaaatccatcaagttacacaatcgatctgttgtcagctgaacagaaccacattaaatttaagccaaacacaccaataggaatgttggaggtagagaaggtaattttaaagccaaaaatgttggataagaaaaaacctacacctataataccagagaaaactgtgagagtagtgattaattttaagaaaacacagaagaccatagtgagagtgagtccacatgcatcgcttcaagagcttgcccctattatatgtagcaaatgtgagtttgatccgttgcatacactattgttgaaagattatcaatcgcaggagcctcttgacttgacaaaatctcttaatgacctgggactaagagaattatatgcgatggatgtcaacagagccacttctgttactgtcttcagtaagtcatctttacaagagtcctgccaaatatcacaaaacctagatattatgaaggagaaagaaaataaagggtttttcagtttttttcaacgcagtaagaaaaagcgagaccaaactgcaagtgcccctgcaacccctctagtaaataagcaccgcccaacttttacaaggtccaataccatttccaaaccatatatttccaacaccctgccgtcggatgcacccaagaagaggcgggctccactgcccccgatgccagcatctcagagtgtcccccaagaccttgcacacatccaggagaggcctgcttcttgtatagtgaaatccatgagcgtggatgagacagataagagtccctgtgaagcaggaagagtgagggcaggttcactgcagctcagcagcatgtctgcagggaattcatctttgagaaggacaaagcgaaaagcaccttccccaccctccaaaatacccccgcatcaaagtgatgaaaatagtcgtgtgactgccttacagccagtagatggagttcctccagacagtgcttcagaagcaaactctcctgaggagctatccagcccaggaaacatttaggaggaacactcttgaatctttcatctttaagtgaaacctttcaccctgggctttccagtcaggagcagtgcactgcgcccaaactgatggaggaaacctctgtctttgagtgccctgggacacctgaggcagccataacatcattgacatctggaataagctctgattatagccttgaagagatagatgaaaaggaagaactgagtgaagtgcctaaagttgaagctgaaaatatttctccgaagtcacaagatattccttttgtatctactgatataataaatacactgaaaaatgatcctgactcagcccttggcaatggtagtggagagttctcacaaaactccatggaagaaaaacaagaaactaaaagcacagatggacaagaaccacacagtgtagtatatgatacaagcaatggaaagaaggtagttgacagtataagaaacttgaagtcgttgggcccaaaccaagagaatgtagttcaaaatgaaataattgtctatccagagaacacagaagacaatatgaaaaatggagtgaagaaaacagaaatcaatgtagaaggtgttgccaaaaataacaacattgatatggaagttgagagaccatcaaactctgaggcacatgaaactgatactgctataagttacaaggaaaaccatctagcagcttcatcagtaccagatcaaaaactgaatcaacccagtgcagaaaagacaaaagatgcagcaattcagacaaccccttcttgtaacagttttgatgggaaacaccaagatcataatttatctgactccaaagttgaagaatgtgtgcaaacttcaaataacaacatatcaactcaacactcatgcttaagttcacaagattctgtaaatacctcaagggaattcaggagtcaaggcaccctaattatacattcagaagatccgcttaccgtaaaagatccaatttgtgcacatggtaatgatgatcttttgcctcctgtagataggattgacaaaaattccactgcttcttacctaaagaattacccactttatagacaggactacaatcccaagccaaaaccttcaaatgaaattacacgagagtatatacccaaaattggcatgactacttataaaatagtgcctcccaaatccttggaaatatcgaaagactggcaatcagaaaccatagagtataaagatgatcaggacatgcatgctttagggaaaaagcacactcatgagaatgtgaaagaaactgccatccaaacagaagattctgctatttctgaaagcccagaagagccactgccaaaccttaaaccgaagcctaacctgagaacagagcatcaagtgcccagttctgtgagctcacctgatgatgccatggttagtcctctgaaacctgctcccaaaatgacaagagacactggcacagctccttttgcaccaaatttggaagaaataaacaatattttggaatcaaaatttaaatctcgggcttcaaatgcccaggccaaacccagctctttttttttgcagatgcagaagagagtatcgggtcactatgtgacatctgcagctgccaagagtgtccatgctgcccctaatcctgctccaaaagaactgacaaataaagaggcagaaagggatatgctgccttctccggagcagactctttctcccttaagtaaaatgcctcactctgttccacaaccccttgttgaaaaaactgatgatgatgtcatcggtcaggctcctgctgaagcctcccctcctcccatagctccaaaacctgtgacaattcctgctagtcaggtatccacacaaaatctgaagactttgaaaacttttggtgccccacgaccatactcaagttctggtccttcaccgtttgctcttgctgtagtgaaaaggtcacagtctttcagtaaagagcgcaccgagtcacctagtgccagtgcattggtccaacctccagccaacacagaggaagggaagactcattctgtaaataaatttgtggacatcccacagcttggtgtgtctgataaggaaaataactctgcacataatgaacagaattcccaaataccaactccaactgatggcccatcattcactgttatgagacaaagttctttaacattccaaagctctgacccagaacagatgcgacagagtttgctgactgcaatccgttcgggagaggctgctgccaaattgaaaagggatggataatgcatctgtaaacctgaaacgtacccattctccttgaaggcaaatgttagggcatctgccttaactttggcataaagatgttcactgatcctggcttactggactttaatccagtactaatgacttgaagcacactgtgaactacaaacatattttcattcatcatggcagatgctctttgagacttgcattgtgaggacagaagttcaattaatgtgtttcccatttgttcttctgacagatagaggccaaatgacacaatgggaagatcttcaactaagtgtcaagaaaaaaaactagtgttctagtgttctagagtcctctttgccacttaaaa

SEQ ID NO: 51127 - DNA, 1365 bp, Homo sapiens
cggacgcgtgggctgagacgagcgggagcgcggagcagcagcctctgctgccctgactttttaagaaatctcaatgaactatttgtagagaatcactgatccggcctgcaagcattttgcacggcaaaaatatcgatcagtgttaagtgaagatcacattttatatgcgatcttgacttttttgtcttacattatatttttatagattttgttataaacatggtgctgggaaaggtgaagagtttgacaataagctttgactgtcttaatgacagcaatgtccctgtgtattctagtggggataccgtctcaggaagggtaaatttagaagttactggggaaatcagagtaaaatctcttaaaattcatgcaagaggacatgcgaaagtacgctggactgaatctagaaacgccggctccaatactgcctatacacagaattacactgaagaagtagagtatttcaaccataaagacatcttaattgggcacgaaagagatgatgataattccgaagaaggcttccacactattcattcaggaaggcatgaatatgcattcagcttcgagcttccacagacaccactcgctacctcattcgaaggccgacatggcagtgtgcgctattgggtgaaagccgaattgcacaggccttggctactaccagtaaaattaaagaaggaatttacagtctttgagcatatagatatcaacactccttcattactgtcaccccaagcaggcacaaaagaaaagacactctgttgctggttctgtacctcaggcccaatatccttaagtgccaaaattgaaaggaagggctataccccaggtgaatcaattcagatatttgctgagattgagaactgctcttcccgaatggtggtgccaaaggcagccatttaccaaacacaggccttctatgccaaagggaaaatgaaggaagtaaaacagcttgtggctaacttgcgtggggaatccttatcatctggaaagacagagacgtggaatggcaagttgctgaaaattccaccagtttctccctctatcctcgactgtagtataatccgcgtggaatattcactaatggtatatgtggatattcctggagctatggatttatttcttaatttgccacttgtcatcggtaccattcctctacatccatttggtagcagaacctcaagtgtaagcagtcagtgtagcatgaatatgaactggctcagtttatcacttcctgaaagacctgaagatatgcaaacagtggtccttgaagggctctctcaaagtcatcacaagcactcactggtgcaagattgttccgcctttgttcctctgttaccacttctgcatagctgggtggtg

SEQ ID NO: 51128 - DNA, 3520 bp, Homo sapiens
gggttgttccacatttagatgcaagtggatggggtctcgtccaaaagctctttcagtaaaaaatatattaaacccaacaatttgcttttctatgaccattctctttgtacttgagaagcaacttttcattaaaaatatgtgcatataaaagtcactctgaagataaagaaggtgggaggaaacctcttgagtgttttgggttcagcagttttatttcctgatacactgcgtttttggccctctgtgggattttacacccatgagttattacctcacataagcacattgttcatgtgagtaaacaaattgtttgcacattgtataaacaaagagcattgtttatacgatttcatttttccaaagtcagaggaagcgatgagttaacttttttgtagaaggatgaaaggggtgctttacaaaagaagatgattgctatgaagatattctacgttgtgtatttaggtcttaattaagtactactaaagtactgagtaaaagtcttcattcactgataaaattttactgttaatttttgtgaaataggggactattcagacatgcctttataaagcttgttaatctagtaattaaatatcaggtactgtaggtaccaacaccctttcctccccacatagcatttcacgtatgaaaagagaataattggatataatatgctaacaagctgtgtttgctctctgattacatttcttgactagtattcagaattgtagtcatttgctacattcttccgtagacctcatgaaataactctgtaaactttttttctcatttctttctagattgatccaaatcctgatcagtcagcagatgatagaccatcctgcccctctcgttgaaggaacacttggttgaatcaagttgatgtgggttccgaactgtatctcttccggctgaggacagagaagtatcttggagacacgtttcagaggaagtggaattacttttgcccagaaaaatggcgaatacatgaaacaaccagtgatcatgctttagaagcctacagcaacattctgagactgctccaacatgcttgaagatctaagcttttctcttttaaaactggcacatactcagagcagtcttcttagcctatggtcgtacgtgtcaagacatcacgttgtaaagagggatgatttccttcttttgatttgaaaatttgcacatgctcaatgcttacattgtgcggttcgacgtcactacagcttctttttttttttttttttttttctatttttgccagactcttgatactcttaaaacttgtttgtggtcagcacaacaaggaacaaaacaaagctttgaaaaaactttaacatgaaaaaacgcactgacatttttttttatttaatatagcctggactttacctgcgtatgcacatgctcagaattgtctactaggctgactatgtatcacctcttcagcttggatccaattgtggatttatttacaaacatcaaatgccttcaagccaatcctttttgctgtatgttttgcagcctactgtagtagatacgcaacagataatgtgggaaaaaaagagataagaggaggaagctaataagagactgtcaagattgtataccttcttggtttcttttaagaatttgttgcctttctactattacagcaaagcagcattttgttactgactgcctaaaatcacttaatctcaggtgaacgcatcacttgccaaactgttggaatgctatttgtgttttgttgcactgtttttttcgtttgtttgtttgtttatttggttggctttttggagagggaaatttggaaacgggacatacacaaaagttacacacccacattccctttttatcatgacatacaagaagaaactagcagagctaagaatggagtgaagaaaggcagtatggcaggcaccagcaaagagttgagggctgttgctcttaaaaattattttttttattattattttgaaagtatggaagttttccattcactggggaaaggagggaaaagtgcatttatttttatacagagttacttaattacctccaaaacacatatgttggaaatcgcttttgctggtgcaaagtatattaatgagcaggaatacatacattgaggttatgaatagagagctcaatttgtacctttgctgtcttgctcaagcttggtatggcatgaaaactcgactttattccaaaagtaacttcaaaatttaaaatactagaacgtttgctgcgataaatcttttggatttttgtgtttttctaatgagaatactgtttttcattacctaaagaacaatttgctaaacatgagaaatcactcactttgattatgtatagattacataggaagaacaatcacatcagtaagttatagtttatattaaaggtaattttctgttggctcataacaaatataccagcattcatgatagcatttcagcattttccaaggtaccaagtgtacttattttgttgttgttgttgttgttgtattttagaaggaattcagctctgatgtttttaaagaaaaccagcatctctgatgttgcaacatacgtgtaaaatgggtgttacatctatcctgccatttaaccccacagttaataaagtggctgaaaataatagtagctctggcttggtgcttgacctggttaaatactgtcttaaagctcatacaaaacaaataggcttttccataagtggcctttaagaaaacatggaagacaattcatgtttgacaaatgctgacagggtgaagaaagcccagtgtaaaaatgaatcgcgttttaagtgattcggttaaagagtttgggctcccgtagcaaactaatactagataataaggaaatgggggtgaaatatttttttattgttgaatcattttgtgaatgtccccctcaaaaaaagctaatggaatatttggcataaagggcatttggtggttttatttttgtttgagggggattgtcagaaaatcccttttctctcttacgtctaactgactagggaacaattgttgatatgcatagcattggaatacttgtcattatatactcttacaaataacacatgaagcaagaatgaccaatattctgataattggcactggatcacaaaatgtgataaaactttaaatgtataaaactttatcaaataaagttttattttcccctttaaaatgtatttctttagaggcattacttttttaaaaatattggtcaattcctgacataagatgtgaggttcacagttgtattccagtattcaagatagattcctgatttttcaattaggaaaagtaaaatccaaaatgttagcaaaacaaagtgcaatattaaatgtttgctttatagattatattctatggctgtttgtaatttctctttttttccttttttatttggtgctgaatatgtccttgtaggctctgttttaagaaaacaatatgtgggaaatgatttaatttttcctattgctcttccttgtggaaaataaagtgttttgttttttt

SEQ ID NO: 51129 - DNA, 2586 bp, Homo sapiens
cggacgcgtgggctgagacgagcgggagcgcggagcagcagcctctgctgccctgactttttaagaaatctcaatgaactatttgtagagaatcactgatccggcctgcaagcattttgcacggcaaaaatatcgatcagtgttaagtgaagatcacattttatatgcgatcttgacttttttgtcttacattatatttttatagattttgttataaacatggtgctgggaaaggtgaagagtttgacaataagctttgactgtcttaatgacagcaatgtccctgtgtattctagtggggataccgtctcaggaagggtaaatttagaagttactggggaaatcagagtaaaatctcttaaaattcatgcaagaggacatgcgaaagtacgctggactgaatctagaaacgccggctccaatactgcctatacacagaattacactgaagaagtagagtatttcaaccataaagacatcttaattgggcacgaaagagatgatgataattccgaagaaggcttccacactattcattcaggaaggcatgaatatgcattcagcttcgagcttccacagacaccactcgctacctcattcgaaggccgacatggcagtgtgcgctattgggtgaaagccgaattgcacaggccttggctactaccagtaaaattaaagaaggaatttacagtctttgagcatatagatatcaacactccttcattactgtcaccccaagcaggcacaaaagaaaagacactctgttgctggttctgtacctcaggcccaatatccttaagtgccaaaattgaaaggaagggctataccccaggtgaatcaattcagatatttgctgagattgagaactgctcttcccgaatggtggtgccaaaggcagccatttaccaaacacaggccttctatgccaaagggaaaatgaaggaagtaaaacagcttgtggctaacttgcgtggggaatccttatcatctggaaagacagagacgtggaatggcaagttgctgaaaattccaccagtttctccctctatcctcgactgtagtataatccgcgtggaatattcactaatggtatatgtggatattcctggagctatggatttatttcttaatttgccacttgtcatcggtaccattcctctacatccatttggtagcagaacctcaagtgtaagcagtcagtgtagcatgaatatgaactggctcagtttatcacttcctgaaagacctgaagcaccacccagctatgcagaagtggtaacagaggaacaaaggcggaacaatcttgcaccagtgagtgcttgtgatgactttgagagagcccttcaaggaccactgtttgcatatatccaggagtttcgattcttgcctccacctctttattcagagattgatccaaatcctgatcagtcagcagatgatagaccatcctgcccctctcgttgaaggaacacttggttgaatcaagttgatgtgggttccgaactgtatctcttccggctgaggacagagaagtatcttggagacacgtttcagaggaagtggaattacttttgcccagaaaaatggcgaatacatgaaacaaccagtgatcatgctttagaagcctacagcaacattctgagactgctccaacatgcttgaagatctaagcttttctcttttaaaactggcacatactcagagcagtcttcttagcctatggtcgtacgtgtcaagacatcacgttgtaaagagggatgatttccttcttttgatttgaaaatttgcacatgctcaatgcttacattgtgcggttcgacgtcactacagcttctttttttttttttttttttttctatttttgccagactcttgatactcttaaaacttgtttgtggtcagcacaacaaggaacaaaacaaagctttgaaaaaactttaacatgaaaaaacgcactgacatttttttttatttaatatagcctggactttacctgcgtatgcacatgctcagaattgtctactaggctgactatgtatcacctcttcagcttggatccaattgtggatttatttacaaacatcaaatgccttcaagccaatcctttttgctgtatgttttgcagcctactgtagtagatacgcaacagataatgtgggaaaaaaagagataagaggaggaagctaataagagactgtcaagattgtataccttcttggtttcttttaagaatttgttgcctttctactattacagcaaagcagcattttgttactgactgcctaaaatcacttaatctcaggtgaacgcatcacttgccaaactgttggaatgctatttgtgttttgttgcactgtttttttcgtttgtttgtttgtttatttggttggctttttggagagggaaatttggaaacgggacatacacaaaagttacacacccacattccctttttatcatgacatacaagaagaaactagcagagcttgggtgagaaagggtatggggcccgcaagatgaggggtggccttcttttgatatattggaattggagtcccccggaagggaggctttttcgactctccc

SEQ ID NO: 51130 - DNA, 4127 bp, Homo sapiens
cggacgcgtgggctgagacgagcgggagcgcggagcagcagcctctgctgccctgactttttaagaaatctcaatgaactatttgtagagaatcactgatccggcctgcaagcattttgcacggcaaaaatatcgatcagtgttaagtgaagatcacattttatatgcgatcttgacttttttgtcttacattatatttttatagattttgttataaacatggtgctgggaaaggtgaagagtttgacaataagctttgactgtcttaatgacagcaatgtccctgtgtattctagtggggataccgtctcaggaagggtaaatttagaagttactggggaaatcagagtaaaatctcttaaaattcatgcaagaggacatgcgaaagtacgctggactgaatctagaaacgccggctccaatactgcctatacacagaattacactgaagaagtagagtatttcaaccataaagacatcttaattgggcacgaaagagatgatgataattccgaagaaggcttccacactattcattcaggaaggcatgaatatgcattcagcttcgagcttccacagacaccactcgctacctcattcgaaggccgacatggcagtgtgcgctattgggtgaaagccgaattgcacaggccttggctactaccagtaaaattaaagaaggaatttacagtctttgagcatatagatatcaacactccttcattactgtcaccccaagcaggcacaaaagaaaagacactctgttgctggttctgtacctcaggcccaatatccttaagtgccaaaattgaaaggaagggctataccccaggtgaatcaattcagatatttgctgagattgagaactgctcttcccgaatggtggtgccaaaggcagccatttaccaaacacaggccttctatgccaaagggaaaatgaaggaagtaaaacagcttgtggctaacttgcgtggggaatccttatcatctggaaagacagagacgtggaatggcaagttgctgaaaattccaccagtttctccctctatcctcgactgtagtataatccgcgtggaatattcactaatggtatatgtggatattcctggagctatggatttatttcttaatttgccacttgtcatcggtaccattcctctacatccatttggtagcagaacctcaagtgtaagcagtcagtgtagcatgaatatgaactggctcagtttatcacttcctgaaagacctgaagcaccacccagctatgcagaagtggtaacagaggaacaaaggcggaacaatcttgcaccagtgagtgcttgtgatgactttgagagagcccttcaaggaccactgtttgcatatatccaggagtttcgattcttgcctccacctctttattcagagattgatccaaatcctgatcagtcagcagatgatagaccatcctgcccctctcgttgaaggaacacttggttgaatcaagttgatgtgggttccgaactgtatctcttccggctgaggacagagaagtatcttggagacacgtttcagaggaagtggaattacttttgcccagaaaaatggcgaatacatgaaacaaccagtgatcatgctttagaagcctacagcaacattctgagactgctccaacatgcttgaagatctaagcttttctcttttaaaactggcacatactcagagcagtcttcttagcctatggtcgtacgtgtcaagacatcacgttgtaaagagggatgatttccttcttttgatttgaaaatttgcacatgctcaatgcttacattgtgcggttcgacgtcactacagcttctttttttttttttttttttttctatttttgccagactcttgatactcttaaaacttgtttgtggtcagcacaacaaggaacaaaacaaagctttgaaaaaactttaacatgaaaaaacgcactgacatttttttttatttaatatagcctggactttacctgcgtatgcacatgctcagaattgtctactaggctgactatgtatcacctcttcagcttggatccaattgtggatttatttacaaacatcaaatgccttcaagccaatcctttttgctgtatgttttgcagcctactgtagtagatacgcaacagataatgtgggaaaaaaagagataagaggaggaagctaataagagactgtcaagattgtataccttcttggtttcttttaagaatttgttgcctttctactattacagcaaagcagcattttgttactgactgcctaaaatcacttaatctcaggtgaacgcatcacttgccaaactgttggaatgctatttgtgttttgttgcactgtttttttcgtttgtttgtttgtttatttggttggctttttggagagggaaatttggaaacgggacatacacaaaagttacacacccacattccctttttatcatgacatacaagaagaaactagcagagctaagaatggagtgaagaaaggcagtatggcaggcaccagcaaagagttgagggctgttgctcttaaaaattattttttttattattattttgaaagtatggaagttttccattcactggggaaaggagggaaaagtgcatttatttttatacagagttacttaattacctccaaaacacatatgttggaaatcgcttttgctggtgcaaagtatattaatgagcaggaatacatacattgaggttatgaatagagagctcaatttgtacctttgctgtcttgctcaagcttggtatggcatgaaaactcgactttattccaaaagtaacttcaaaatttaaaatactagaacgtttgctgcgataaatcttttggatttttgtgtttttctaatgagaatactgtttttcattacctaaagaacaatttgctaaacatgagaaatcactcactttgattatgtatagattacataggaagaacaatcacatcagtaagttatagtttatattaaaggtaattttctgttggctcataacaaatataccagcattcatgatagcatttcagcattttccaaggtaccaagtgtacttattttgttgttgttgttgttgttgtattttagaaggaattcagctctgatgtttttaaagaaaaccagcatctctgatgttgcaacatacgtgtaaaatgggtgttacatctatcctgccatttaaccccacagttaataaagtggctgaaaataatagtagctctggcttggtgcttgacctggttaaatactgtcttaaagctcatacaaaacaaataggcttttccataagtggcctttaagaaaacatggaagacaattcatgtttgacaaatgctgacagggtgaagaaagcccagtgtaaaaatgaatcgcgttttaagtgattcggttaaagagtttgggctcccgtagcaaactaatactagataataaggaaatgggggtgaaatatttttttattgttgaatcattttgtgaatgtccccctcaaaaaaagctaatggaatatttggcataaagggcatttggtggttttatttttgtttgagggggattgtcagaaaatcccttttctctcttacgtctaactgactagggaacaattgttgatatgcatagcattggaatacttgtcattatatactcttacaaataacacatgaagcaagaatgaccaatattctgataattggcactggatcacaaaatgtgataaaactttaaatgtataaaactttatcaaataaagttttattttcccctttaaaatgtatttctttagaggcattacttttttaaaaatattggtcaattcctgacataagatgtgaggttcacagttgtattccagtattcaagatagattcctgatttttcaattaggaaaagtaaaatccaaaatgttagcaaaacaaagtgcaatattaaatgtttgctttatagattatattctatggctgtttgtaatttctctttttttccttttttatttggtgctgaatatgtccttgtaggctctgttttaagaaaacaatatgtgggaaatgatttaatttttcctattgctcttccttgtggaaaataaagtgttttgttttttt

SEQ ID NO: 51131 - DNA, 4157 bp, Homo sapiens
cggacgcgtgggctgagacgagcgggagcgcggagcagcagcctctgctgccctgactttttaagaaatctcaatgaactatttgtagagaatcactgatccggcctgcaagcattttgcacggcaaaaatatcgatcagtgttaagtgaagatcacattttatatgcgatcttgacttttttgtcttacattatatttttatagattttgttataaacatggtgctgggaaaggtgaagagtttgacaataagctttgactgtcttaatgacagcaatgtccctgtgtattctagtggggataccgtctcaggaagggtaaatttagaagttactggggaaatcagagtaaaatctcttaaaattcatgcaagaggacatgcgaaagtacgctggactgaatctagaaacgccggctccaatactgcctatacacagaattacactgaagaagtagagtatttcaaccataaagacatcttaattgggcacgaaagagatgatgataattccgaagaaggcttccacactattcattcaggaaggcatgaatatgcattcagcttcgagcttccacagacaccactcgctacctcattcgaaggccgacatggcagtgtgcgctattgggtgaaagccgaattgcacaggccttggctactaccagtaaaattaaagaaggaatttacagtctttgagcatatagatatcaacactccttcattactgtcaccccaagcaggcacaaaagaaaagacactctgttgctggttctgtacctcaggcccaatatccttaagtgccaaaattgaaaggaagggctataccccaggtgaatcaattcagatatttgctgagattgagaactgctcttcccgaatggtggtgccaaaggcagccatttaccaaacacaggccttctatgccaaagggaaaatgaaggaagtaaaacagcttgtggctaacttgcgtggggaatccttatcatctggaaagacagagacgtggaatggcaagttgctgaaaattccaccagtttctccctctatcctcgactgtagtataatccgcgtggaatattcactaatggtatatgtggatattcctggagctatggatttatttcttaatttgccacttgtcatcggtaccattcctctacatccatttggtagcagaacctcaagtgtaagcagtcagtgtagcatgaatatgaactggctcagtttatcacttcctgaaagacctgaagcaccacccagctatgcagaagtggtaacagaggaacaaaggcggaacaatcttgcaccagtgagtgcttgtgatgactttgagagagcccttcaaggaccactgtttgcatatatccaggagtttcgattcttgcctccacctctttattcagagattgatccaaatcctgatcagtcagcagatgatagaccatcctgcccctctcgttgaaggaacacttggttgaatcaagttgatgtgggttccgaactgtatctcttccggctgaggacagagaagtatcttggagacacgtttcagaggaagtggaattacttttgcccagaaaaatggcgaatacatgaaacaaccagtgatcatgctttagaagcctacagcaacattctgagactgctccaacatgcttgaagatctaagcttttctcttttaaaactggcacatactcagagcagtcttcttagcctatggtcgtacgtgtcaagacatcacgttgtaaagagggatgatttccttcttttgatttgaaaatttgcacatgctcaatgcttacattgtgcggttcgacgtcactacagcttctttttttttttttttttttttctatttttgccagactcttgatactcttaaaacttgtttgtggtcagcacaacaaggaacaaaacaaagctttgaaaaaactttaacatgaaaaaacgcactgacatttttttttatttaatatagcctggactttacctgcgtatgcacatgctcagaattgtctactaggctgactatgtatcacctcttcagcttggatccaattgtggatttatttacaaacatcaaatgccttcaagccaatcctttttgctgtatgttttgcagcctactgtagtagatacgcaacagataatgtgggaaaaaaagagataagaggaggaagctaataagagactgtcaagattgtataccttcttggtttcttttaagaatttgttgcctttctactattacagcaaagcagcattttgttactgactgcctaaaatcacttaatctcaggtgaacgcatcacttgccaaactgttggaatgctatttgtgttttgttgcactgtttttttcgtttgtttgtttgtttatttggttggctttttggagagggaaatttggaaacgggacatacacaaaagttacacacccacattccctttttatcatgacatacaagaagaaactagcagagctaagaatggagtgaagaaaggcagtatggcaggcaccagcaaagagttgagggctgttgctcttaaaaattattttttttattattattttgaaagtatggaagttttccattcactggggaaaggagggaaaagtgcatttatttttatacagagttacttaattacctccaaaacacatatgttggaaatcgcttttgctggtgcaaagtatattaatgagcaggaatacatacattgaggttatgaatagagagctcaatttgtacctttgctgtcttgctcaagcttggtatggcatgaaaactcgactttattccaaaagtaacttcaaaatttaaaatactagaacgtttgctgcgataaatcttttggatttttgtgtttttctaatgagaatactgtttttcattacctaaagaacaatttgctaaacatgagaaatcactcactttgattatgtatagattacataggaagaacaatcacatcagtaagttatagtttatattaaaggtaattttctgttggctcataacaaatataccagcattcatgatagcatttcagcattttccaaggtaccaagtgtacttattttgttgttgttgttgttgttgtattttagaaggaattcagctctgatgtttttaaagaaaaccagcatctctgatgttgcaacatacgtgtaaaatgggtgttacatctatcctgccatttaaccccacagttaataaagtggctgaaaataatagtagctctggcttggtgcttgacctggttaaatactgtcttaaagctcatacaaaacaaataggcttttccataagtggcctttaagaaaacatggaagacaattcatgtttgacaaatgctgacagggtgaagaaagcccagtgtaaaaatgaatcgcgttttaagtgattcggttaaagagtttgggctcccgtagcaaactaatactagataataaggaaatgggggtgaaatatttttttattgttgaatcattttgtgaatgtccccctcaaaaaaagctaatggaatatttggcataaagggcatttggtggttttatttttgtttgagggggattgtcagaaaatcccttttctctcttacgtctaactgactagggaacaattgttgatatgcatagcattggaatacttgtcattatatactcttacaaataacacatgaagcaagaatgaccaatattctgataattggcactggatcacaaaatgtgataaaactttaaatgtataaaactttatcaaataaagttttattttcccctttaaaatgtatttctttagaggcattacttttttaaaaatattggtcaattcctgacataagatgtgaggttcacagttgtattccagtattcaagatagattcctgatttttcaattaggaaaagtaaaatccaaaatgttagcaaaacaaagtgcaatattaaatgtttgctttatagattatattctatggctgtttgtaatttctctttttttccttttttatttggtgctgaatatgtccttgtaggctctgttttaagaaaacaatatgtgggaaatgatttaatttttcctattgctcttccttgtggaaaataaagtgttttgttttttttatacaaaacagaaaaaaacaaagtcgacg

SEQ ID NO: 51132 - DNA, 1696 bp, Homo sapiens
gaatgagttactctccactggtgattaggtaatactgtagaatgaagagttgtataatatattcatttacagctgtggattgtggtaaggactatgtccacagtgatattccaaagaattgggtttatatttgtgcttcatctgttaatcccaggtgtcctcatgttgctgaaatatttagatagctaaaatatcccttaatttcacagatgaccaggaagaaattaaccaaggttttattgactgccatgtatgtcccatgatgcatttctgagcaaatgcttatcctagagaataactctgtatgaataaaattgcttaattgagtctcttactaaataagtaactagtgccatgcttttgtgagctcttggtatggcccatattactttgttttttgtttttgttattgttgttttgtgatagtcttgctctgtcgcccaggctgcagtgcagtggcacaatctcagctcactgcaacctctgcctcctgggttcaagcaattctcctgtctcagcctcctgggtagctgggactacaggtgcatgccaccatgcctggctaacttttgtatttttagtagagacagggtttcaccacgttggtcaggctggtctcgaattcctaacctcaggtgatccacctgccttggcctcccaaagtgctgagattacaggcgtgagccaccgcgcctggcctgtttgtttttttaacatgatttttctctaagcttaaataccacaaggccaaagagaaatggtcataatttaaaccattattatattgttgaggtatccctagctattattatagcaaagtgggaaaaaagtgtttattctattgaagttatgtaatgatccgacattaatgggaatatagaggagtcctaattaattggtataatttcacaaagcggaatggtattccttggagagttaaagacattctctttagtaagtgtaaaccaaagggcattttctttattcctgcttctaattccttctagcccagtgaattatttctcttttcactggtaatgtgatgaatgggaattgtttattacattgaagtgacttgaagtgaccttttgtgctttaggtgcaggttgacactgaaaaaaaaacaaaacactgaatttttcacacctatgtctgcattaaaggctgttttactaccggaagttacatagacttcctgcagtcagctgctgtgccccagtgccttactggtcctttgtagatttgccttaatgatttgtacaaatgactgggaggcggggatgctgcctgtgtcctggtgaaccttaatgaaggggccgtcttaggcacagtgcaaaacaagcatttgtcctgtactgttagagccaaaattgtgatgagcaatactgataattgtccagtttatgtcatctttcccagattttaaaatctgttctagatattcttagcttgaaccacttttgattgtgaaatgtattaggtgttgtcccattattactgtaaaatgaagttttgaatcttcttgttaataaactgtggatttcccctctcaatttcttaaacaacaacaaaaaaatgcttgaagattgtctttgagtgtaagatctgccttttcagaaagggagtgttagtttgtaatgttaaaaaataaagacctcattcaataaaagttgaagtcatcttttaaaaaaaaaaa

SEQ ID NO: 51133 - DNA, 1642 bp, Homo sapiens
gaatgagttactctccactggtgattaggtaatactgtagaatgaagagttgtataatatattcatttacagctgtggattgtggtaaggactatgtccacagtgatattccaaagaattgggtttatatttgtgcttcatctgttaatcccaggtgtcctcatgttgctgaaatatttagatagctaaaatatcccttaatttcacagatgaccaggaagaaattaaccaaggttttattgactgccatgtatgtcccatgatgcatttctgagcaaatgcttatcctagagaataactctgtatgaatgagctcttggtatggcccatattactttgttttttgtttttgttattgttgttttgtgatagtcttgctctgtcgcccaggctgcagtgcagtggcacaatctcagctcactgcaacctctgcctcctgggttcaagcaattctcctgtctcagcctcctgggtagctgggactacaggtgcatgccaccatgcctggctaacttttgtatttttagtagagacagggtttcaccacgttggtcaggctggtctcgaattcctaacctcaggtgatccacctgccttggcctcccaaagtgctgagattacaggcgtgagccaccgcgcctggcctgtttgtttttttaacatgatttttctctaagcttaaataccacaaggccaaagagaaatggtcataatttaaaccattattatattgttgaggtatccctagctattattatagcaaagtgggaaaaaagtgtttattctattgaagttatgtaatgatccgacattaatgggaatatagaggagtcctaattaattggtataatttcacaaagcggaatggtattccttggagagttaaagacattctctttagtaagtgtaaaccaaagggcattttctttattcctgcttctaattccttctagcccagtgaattatttctcttttcactggtaatgtgatgaatgggaattgtttattacattgaagtgacttgaagtgaccttttgtgctttaggtgcaggttgacactgaaaaaaaaacaaaacactgaatttttcacacctatgtctgcattaaaggctgttttactaccggaagttacatagacttcctgcagtcagctgctgtgccccagtgccttactggtcctttgtagatttgccttaatgatttgtacaaatgactgggaggcggggatgctgcctgtgtcctggtgaaccttaatgaaggggccgtcttaggcacagtgcaaaacaagcatttgtcctgtactgttagagccaaaattgtgatgagcaatactgataattgtccagtttatgtcatctttcccagattttaaaatctgttctagatattcttagcttgaaccacttttgattgtgaaatgtattaggtgttgtcccattattactgtaaaatgaagttttgaatcttcttgttaataaactgtggatttcccctctcaatttcttaaacaacaacaaaaaaatgcttgaagattgtctttgagtgtaagatctgccttttcagaaagggagtgttagtttgtaatgttaaaaaataaagacctcattcaataaaagttgaagtcatcttttaaaaaaaaaaa

SEQ ID NO: 51134 - DNA, 474 bp, Homo sapiens
gaatgagttactctccactggtgattaggtaatactgtagaatgaagagttgtataatatattcatttacagctgtggattgtggtaaggactatgtccacagtgatattccaaagaattgggtttatatttgtgcttcatctgttaatcccaggtgtcctcatgttgctgaaatatttagatagctaaaatatcccttaatttcacagatgaccaggaagaaattaaccaaggttttattgactgccatgtatgtcccatgatgcatttctgagcaaatgcttatcctagagaataactctgtatgaataaaattgcttaattgagtctcttactaaataagtaactagtgccatgcttttgtgagctcttggtatggcccatattactttgttttttgtttttgttattgcagtgagccaagatcgcgcaactgcactcaagcctgggtgataaagctagactcagtgtcca

SEQ ID NO: 51135 - DNA, 427 bp, Homo sapiens
acccaaaatagtttggaaatggagctgggcaaaatccagcaggagtttcttagttaggatccacagcctgggactgaccctctgtcctgtgggtctttgcctctgggctctctgctctgcatttcttgaaaccattattatttatcatttttctcacactcttttgcgtatggctcctattgcactcaaaatgtttttgagattcatccatgttgttttgtgtgtcaaaagtttgttcctttagccattccatggaatgaatgtatcacattcttgtattgatagatatttgaatgtatatttgaatgtatattgatagatatttgaatacaagaatgtatccattcttgtattgatagatatttgaatgtttccagtttttcctattacgaataaaactgctatggacattcttgtatatatcatt

SEQ ID NO: 51136 - DNA, 560 bp, Homo sapiens
cggcacgaggaaataaaataaaataagccttgacctcccaggctcaggtgatcctcccatgtcagcctctccggtagctggcactacaggtgcacaccaccacacccagctaatttttgtattttcttgtagagaagggctcccaccatgattcccaggctggtcccgaacccctgggaaggagggctaaagctatccaccctcctcttcctcccaaagtgttgtgattacagttgtaagctactgtgcctggccaagaaaacaatttttaaagaggctaggtaattcaaagtcacacagttaataatggtgcagtgagaaatgaaaatgctcactctgtggcttcagagcttacactctcctacttttatggagtacactaaattaggaaccagataaaacttgtcatcttacaaatcctcctcataaaccttatctgtaatatcaggagaagaatacctactttgtatagttattgtgatgaataagtgatttttaaaaatatttagcacagcctggtacacagtgtattttcaagatatgatagtttaaaaaaaaaa

SEQ ID NO: 51137 - DNA, 371 bp, Homo sapiens
gtaaacctcctttttgatgtcaaagcaccaatttataaaacactgcagatgcatatagagattatacgtaacagatctgtccagtttgtgcacgaaatggatttgataaagtttttgctatgttattttactacatttggagattaataagtgatttatatgtatgtttttctgtaaatctacttttttgtacaagatgttctacaagatatgaagctaagggaggaaaacgccaaagatatctctagttatgttgaacatagccaacatggtttcaatgggtcagtaagaaaaaagccatttcagtaaggaatgaaataagtacttatttatgaaaatgtttcttaacaataaaaaagtatatattttta

SEQ ID NO: 51138 - DNA, 403 bp, Homo sapiens
caagtagttgggattaccggcacctgccaccatgcccggctaatttttgtattttttagtagagacggggtttcaacatgttggcaggctggtctcaaagtcctgacctcaggtgatccacccgcctcggcctcccagagtgctgggattacaggcatgagccactgcgcctggcctagtatatgtatgttttaaggatattgattcattctgccaaaattctcttcagagaaccattgtgtaactggttcttttcatcaagaggctgcttggtttctgttgtttgttttatttttgttttgtgaagactgcagttaacagggatcaggaactctgaaaagggttggctagaagagtctttacctgagcaatgtggaaatgatactgggaaagaaaataaaca

SEQ ID NO: 51139 - DNA, 222 bp, Homo sapiens
tcccaaggtgctaggattacaggcgtgagccaccatgtccagccagtaaccaccattctttatcactgaccagcatttaatgcccaggtcccctcccttctgtccctgggctttcaggccatcactaatggctcctcctcctatgcttgtggctgcctctccttccgcagcttctctttctctacttattcctgttctgcctcctcattctgggtgatccca

SEQ ID NO: 51140 - DNA, 447 bp, Homo sapiens
ggttaattcataaatgtactcattgttctccctagctattgacttcaaaggtcctcattccttatctaaatacatacatgtgctgaaaggtaaacagacaaatttgttgtttctcctaattaataaaagttggcacaatattatctgaaccaaatgtttgcgcttcctttaaaaaacatactcaagacatagcagaataaatcgaataaaaaaaaaggttaaatttgggctgggcgtggtggctcatgcctgtaatcctattacgctttgggaggccaaggtgggcagatctcttgagcctaggagtttgagacctgcctggaaacccaatctctaaaaaaatgcaaaaattagccaggcatggtggtgcatgcctgtaatcccagctactcgctcgggaagttgaggtgggaggatcgcctgagcgaagtcgaagctgcggtgagc

SEQ ID NO: 51141 - DNA, 186 bp, Homo sapiens
cttttctattaataatgtgttgctgctggttctttagctacacgaggggactacaaaatgatagtttttgtcagccatgaaaaaaatcaaacctcaaacaaaatgttataagctgtttttatatatcttaagccctgccagctaatgtgatagggcacaagggtctttgattagtctgtaagctgc

SEQ ID NO: 51142 - DNA, 374 bp, Homo sapiens
aacaaataaaatactgagggagggagagttaggacactcagtagcttatggagaaggtttcatcttcggtgagttctgcaagacacatggttaaatgtggcagaggcttaaatgtgacctgaatgctcaaaaatatggctttctctctcttctgacatgggcgtgttcttggaccatcctgctttcgtctcccagtagagtcaaaggatctcattgccttcccttctttgtattgtaactcttaatactgcacctgtgatatagctgacgctaaataaatgttgaatttgaatgaaaatgcactacgttgtgtcggcagtattcaggtcaaatggtcatgatggaaattgccaataaaatatgcttcatgcata

SEQ ID NO: 51143 - DNA, 600 bp, Homo sapiens
tagtgtctttggtaaaagaaggaaggaaaaagggaagggaaaaaggaaggaaggaagggaagaaaaaagatttcagaaagtctttctctaatttttaaaaattcttttacttagcttgtgaaactcaaaagtctgtgatgagaagaatgctagctaaacttgctttgaagggctagaaccagtggtgtgtgctggagctgctggcagcagttaccgagagcagatggttaaatttccaggaagctacttggcatcacctggatggtttgaaatccaatgtggcgggagtatttgcatccatgggaaatctgcaaatgctataaatcaaaccacctccccttccccagctggtcgtttaccagcacaccactgtctccagcctgcctcttgcaagtagccagagggtaagcatgcaaggtacagctcacaccaactaaaactcacatgggattgaggtaaacttcatttactagtttatacatttacaatggaaaatattcttggcctggtcggtgcaatcccagcactttgggagggccaaggtgggagaatcgctttagcccaggagttcaagaccagcctaggcaacatagggagacc

SEQ ID NO: 51144 - DNA, 620 bp, Homo sapiens
  misc_feature (468)..(468): n is a, c, g, or t
tagtgtctttggtaaaagaaggaaggaaaaagggaagggaaaaaggaaggaaggaagggaagaaaaaagatttcagaaagtctttctctaatttttaaaaattcttttacttagcttgtgaaactcaaaagtctgtgatgagaagaatgctagctaaacttgctttgaagggctagaaccagtggtgtgtgctggagctgctggcagcagttaccgagagcagatggttaaatttccaggaagctacttggcatcacctggatggtttgaaatccaatgtggcgggagtatttgcatccatgggaaatctgcaaatgctataaatcaaaccacctccccttccccagctggtcgtttaccagcacaccactgtctccagcctgcctcttgcaagtagccagaggcttgagcccaagggttcaagaccagcccggacaacatagtgggacttcatctctacaaaaaatnaaaaaactagccagccatggtggcacatacttgagtacctgctactcaggaggctgaggtgggaggatcccttgagcccaggaggtcaaggctgcagtaagtcttgatcatgtcactgcactccagccttggtgacagagtgattccctgtc

SEQ ID NO: 51145 - DNA, 1148 bp, Homo sapiens
cttcactctcttgaaaacccacccagatcctccccgttctgacaccatggtcagctcctgttgtggctccgtgtgctctgaccagggctgcggccaagtcctctgtcaggagacctgctgccgccccagctgctgtcagaccacctgttgcaggaccacctgctaccgccccagctgttgtgtgtccagctgctgcaggccccagtgctgccagtctgtgtgctgccaacccacctgctgtcgccccagctgctgtgagacgacctgctgccaccctaggtgctgcatctccagctgctgccgccccagctgctgtatgtccagctgctgcaagccccagtgctgccagtctgtgtgctgccagcccacctgctgccaccccagctgctgcatctccagctgctgtcgccccagctgctgtgtgtccaggtgctgcaggccccagtgctgccagtctgtgtgctgccagccaacctgctgccgtcccagctgctgcatctccagctgctgccgcccctcttgctgtgaatccagctgctgccgcccatgctgctgccgcccctgctgctgcctgcgtccagtctgtggccgagtctcctgccacaccacttgctatcgcccaacctgtgtcatctccacctgtccccgccccttgtgctgtgcctcctcttgctgctgagcccactgccctggctcacgtcccccttcaccactggcccacagatgtagacccttctactgtgctgaccattaggatacatgaagtggggttgatgtcattcaataggatggaccttatgcttccaaagagcccaccaccatttcactgactctgtgagaacattctggttcattttaaactccctcccttgctttctttttcttctggtggtggcaccaaatgtgaattaatttgtaatacactagctaagaaattattccaatcttctgatttccttattttctttatcactttaaggtacagattctccttctcagtgaggtagatattatctgcaggaccagttttgtcactgatgttgcaccctcagatccagccacccaattgtattctgtgtttctcctagggtgaatttcttatgctttgtttgcatctctgctttctaataaacttttctgcacttaag

SEQ ID NO: 51146 - DNA, 340 bp, Homo sapiens
tatgtctgcaaagcgcttgccataaactacaagtgaaatggaccatctacctctactgccttcagatggatgaagatatttgcttatgtagatattagaacactcattttaatatgtggattttgaatagagacattttcttgatgagttctaatcatctaattttaaacatttagaaatcagacacctttattgatgaaaacattatgtacctgtaatatatatatatgtacatgtaatatatatatatctatatatatgcttataagtcacaggatgtactattgctgtaatatattttgtcaactttaaagcaaaagcttagagatggttgagataa

SEQ ID NO: 51147 - DNA, 386 bp, Homo sapiens
agtctggatctgaagattacaacagggtgatctatacacccttgattcggccctccagccagatcagtgactaacacaagtctttaaaatgaatttaataggtcatcacctgtgaaaagaagggaaagtaaaaaaaataatagatatttactgcacatctcctattgttttcagtgctggtgacattgccatgaacaggatagcaccaccttctttgagagattacattctattgggacagatcataaacgcaggagcataacaataagatcatttcagagagtgttagttcttcctaggaagtaagagagggtaatgaatggacagtgactgggagttggaccatcagaatgtccttgtgagatggcatttgacctgaatggcag

SEQ ID NO: 51148 - DNA, 495 bp, Homo sapiens
tgatgatatagtgtattcttgaaaaacataaagagagtgcatcttatgtgctcttaccacaaaaatgataactatatgaggtaatgcatttgttaattagctagatttaaccactccacaatttatatgtatgtcaaaacatcatgttgtatatgataaaaacatacaatgttatctgtcaaattaaataaattcaaatacacttatccattgactcagcagtcttaccctatagatgtatttgcacatatatacatgggtgcacacacacagacagatgtttattatagaattctttgtaattttttaaaaactcaaaacaatcttcaacaggattttataaaacaagctatgacatatttgtacactgaaatatcatatagccatttaaaaaatacaagtactgacataggaagatagccacaatattagacaattacatcttcagagcttttttgctacatgatagaatgcaactcaaactttagcaaaaaa

SEQ ID NO: 51149 - DNA, 1638 bp, Homo sapiens
cagcaatgaatggctttgcatccttgcttcgaagaaaccaatttatcctcctggtactatttcttttgcaaattcagagtctgggtctggatattgatagccgtcctaccgctgaagtctgtgccacacacacaatttcaccaggacccaaaggagatgatggtgaaaaaggagatccaggagaagagggaaagcatggcaaagtgggacgcatggggccgaaaggaattaaaggagaactgggtgatatgggagatcggggcaatattggcaagactgggcccattgggaagaagggtgacaaaggggaaaaaggtttgcttggaatacctggagaaaaaggcaaagcaggtactgtctgtgattgtggaagataccggaaatttgttggacaactggatattagtattgcccggctcaagacatctatgaagtttgtcaagaatgtgatagcagggattagggaaactgaagagaaattctactacatcgtgcaggaagagaagaactacagggaatccctaacccactgcaggattcggggtggaatgctagccatgcccaaggatgaagctgccaacacactcatcgctgactatgttgccaagagtggcttctttcgggtgttcattggcgtgaatgaccttgaaagggagggacagtacatgttcacagacaacactccactgcagaactatagcaactggaatgagggggaacccagcgacccctatggtcatgaggactgtgtggagatgctgagctctggcagatggaatgacacagagtgccatcttaccatgtactttgtctgtgagttcatcaagaagaaaaagtaacttccctcatcctacgtatttgctattttcctgtgaccgtcattacagttattgttatccatcctttttttcctgattgtactacatttgatctgagtcaacatagctagaaaatgctaaactgaggtatggagcctccatcatcatgctcttttgtgatgattttcatattttcacacatggtatgttattgacccaataactcgccaggttacatgggtcttgagagagaattttaattactaattgtgcacgagatagttggttgtctatatgtcaaatgagttgttctcttggtatttgctctaccatctctccctagagcactctgtgtctatcccagtggataatttcccagtttactggtgatgattaggaaggttgttgatggttaggctaacctgccctggcccaaagccagacatgtacaagggctttctgtgagcaatgataagatctttgaatccaagatgcccagatgttttaccagtcacaccctatggccatggctatacttggaagttctccttgttggcacagacatagaaatgctttaaccccaaacctttatatgggggacttctagctttgtgtcttgtttcagaccatgtggaatgataaatactctttttgtgcttctgatctatcgatttcactaacatataccaagtaggtgctttgaacccctttctgtaggctcacaccttaatctcaggcccctatatagtcacactttgatttaagaaaaatggagctcttgaaatcaaaagaaaaaaatggggaattgttcacaaacaat

SEQ ID NO: 51150 - DNA, 1584 bp, Homo sapiens
cagcaatgaatggctttgcatccttgcttcgaagaaaccaatttatcctcctggtactatttcttttgcaaattcagagtctgggtctggatattgatagccgtcctaccgctgaagtctgtgccacacacacaatttcaccaggacccaaaggagatgatggtgaaaaaggagatccaggagaagagggaaagcatggcaaagtgggacgcatggggccgaaaggaattaaaggagaactgggtgatatgggagatcggggcaatattggcaagactgggcccattgggaagaagggtgacaaaggggaaaaaggtttgcttggaatacctggagaaaaaggcaaagcaggtactgtctgtgattgtggaagataccggaaatttgttggacaactggatattagtattgcccggctcaagacatctatgaagtttgtcaagaatgtgatagcagggattagggaaactgaagagaaattctactacatcgtgcaggaagagaagaactacagggaatccctaacccactgcaggattcggggtggaatgctagccatgcccaaggatgaagctgccaacacactcatcgctgactatgttgccaagagtggcttctttcgggtgttcattggcgtgaatgaccttgaaagggagggacagtacatgttcacagacaacactccactgcagaactatagcaactggaatgagggggaacccagcgacccctatggtcatgaggactgtgtggagatgctgagctctggcagatggaatgacacagagtgccatcttaccatgtactttgtctgtgagttcatcaagaagaaaaagtaacttccctcatcctacgtatttgctattttcctgtgaccgtcattacagttattgttatccatcctttttttcctgattgtactacatttgatctgagtcaacatagctagttcatattttcacacatggtatgttattgacccaataactcgccaggttacatgggtcttgagagagaattttaattactaattgtgcacgagatagttggttgtctatatgtcaaatgagttgttctcttggtatttgctctaccatctctccctagagcactctgtgtctatcccagtggataatttcccagtttactggtgatgattaggaaggttgttgatggttaggctaacctgccctggcccaaagccagacatgtacaagggctttctgtgagcaatgataagatctttgaatccaagatgcccagatgttttaccagtcacaccctatggccatggctatacttggaagttctccttgttggcacagacatagaaatgctttaaccccaaacctttatatgggggacttctagctttgtgtcttgtttcagaccatgtggaatgataaatactctttttgtgcttctgatctatcgatttcactaacatataccaagtaggtgctttgaacccctttctgtaggctcacaccttaatctcaggcccctatatagtcacactttgatttaagaaaaatggagctcttgaaatcaaaagaaaaaaatggggaattgttcacaaacaat

SEQ ID NO: 51151 - DNA, 295 bp, Homo sapiens
tgacgacctgagtgtttgctcagaatgtcttggaggtcaggagaacacagactggagaacatgcaggagggtgttgaagtcaagctaaagagagggagggggctgtctctcaaagctgcatcagattcatcacgttgtaaaagagacaaaagacagcggttctgggggtgagggcaggagagagggattactacaagagagctggatgtgtcattacctccatcatggcagtagtgtgaccaggtgtatgcacatgtcagaactcatcagattatacattttaaatgtgtacagc

SEQ ID NO: 51152 - DNA, 467 bp, Homo sapiens
gccaaaaggagcaggcagtatcttggccatccagagagacagaaaataaatgcagaccagaggagagtcttgggtttctaaagcttccgcagcaggtcaaggccaaatccatccactgtaaaatctgctgggcaacagaggcctggagtgctagtgacctgctcgcctctaattagctggggcggaggggcatcgaagtctgcaaacagcaggttgttcctgcccacactgagaatggagcgagagcaggcgcaagagctgataagtttgggtttgtgtgactcactgtacaggtcagccaattaatccttggtcatctgcctgaaaactggatggcgtccacctatgggcagtggttctgttaattggcacgttgtctcagtgatgctcccccagggcgcagcgccccgagaaagtagaacatgcacttatccataccagccagccatttcctctccataaacata

SEQ ID NO: 51153 - DNA, 464 bp, Homo sapiens
gttccttcatccactgtgtcctattcattcttcagctaactccagcaatgagctgaaactcattcatcacccttgctgagttttcttctcaatccttattcctaattctggttctagatgagccctacctacccagtggttgtatttttgtagccagtgtgggacacaggagattggcagaccaacacagctagcctctctctagccctccctccacctctaagtcactaacaatccatgtttgttcagtttgttgacatgtggcatgttcatttgttcacaacttaatcacgggggacatttcagaaaaatgtgtactaagttaaaaccatgtttagtctcctacaacttgtacattttcattttctcttatcagtagattgtccttgttgacatagctcatgcatgaggacacatagcagtacacacacattgaatgaattgttagtcatgcaaaaaaaaaa

SEQ ID NO: 51154 - DNA, 463 bp, Homo sapiens
aatcaagaaaggacacagtgatagaggaaaaaatgataaagacaaccacataggtcaagaaagggctgtttgaggaagtgatagtgtttaaactgggattagaagaataagcgctcacaagaaaagtgggttgaagagtattctaggcaaagtgaatggctgtacaatatttttttctgtaaaggaccagatagtcagtatttttgtttttctgagccatacattctcaggcacagctcctcagagtctgtttttgtagcacaaaagcagcaacagaccaaatgtaaatgaatgaacatggcagtattccagtaaaactttactttaaaaaggcagcaggctgagtgcagtggctcacgcctataatcctagcactttgggagactgaggtggcaggaacacctgaggccagcagttttgagaccagcctgagcaacatagtgagaccttgtctctacaaaaa

SEQ ID NO: 51155 - DNA, 456 bp, Homo sapiens
ggggctcaggaagtagtcttcttctgtgacggttgcgcacaggtcagggacctttatgagcagacatttcagaagtgttcctgggaacccagacaactggactgattgctgggtgggcctagaatagcatagtgcagcggatagctactctttgttaaagggaaaagctaccaattaacagccgattaaaatggtctgtattctaactcatgtttaaattccttattctgaagctacactgaactgcttactgtaggtgtttacaaatgtggagacccagctagtatttctctacttttagtttattttttgaagttttttttttttcccctctgactgttcaaaattctctgatcctggaaacaccagggtggggttcacatatctatagtgtctgtagagtgggaagatttgtgacatttgattgtatgtctctctctgtaaactactcatctg

SEQ ID NO: 51156 - DNA, 548 bp, Homo sapiens
ctaactaataacttacagatcacctcctcatattcaaacttgaaactctgaatagtcctataggctacgggaaggctgaccagtctctcggccaagagtgatttattcagcccattgacttcatgagattctgttttgatgatgagtgtacttataataacaatagctataattaattctgtgtgccaggcactttgcatatattacctcattatttttctcaacaaagttatgagatcaatattttctccatcattgtaactaagaagcttagagaagttaaatgatctgcaattatttaacttctctgagctaagcttacttagctagtaaatagctgcactgagacttgaaccccagtctttctgactccagagctcatactctttcactatgccatactgccctttattgaattaatgaggaccagctttttgtgcatgacaagaaagaagacagtaggaagggcatgagtatcagagccatggagtctagacagatggagttcctgcttctcttccatcttgttcagaacttactttctatgg

SEQ ID NO: 51157 - DNA, 561 bp, Homo sapiens
atgtaaattcatctggcatctcttgtgattttaaaacttcctaccttgtgaaaaatcctctattttgtgagaaacgggaagtccaagttaaaaatctctgatactggaaatagtagcagcttccctaagttcactacatgtgcagtgtggaaaaccaagagagagaatacaggaagttgtaagcccactgcttgtcaattcgcttggtacctctgtgtaccagacactgtgaagacaggcattggcaaatcactgaaactagctgtttaagggattctaagtgggactgggatgcagaacagcaagacaggtgcattgggtgcaagtgcctgtggatggtaacagttgagttttattcatgcaggaagtggggttgaagctgaggcctgtgggatgggcagtgaaaacaatgaaacaatgaaaggacatttcctaagatccaaggaaggaagagcaagcaagaagtcattgaaacttcaggctaacatttttgcaggacagggagctgtagtatcatttattccaatctgttgaaattagagtgggattgaaagccttaag

SEQ ID NO: 51158 - DNA, 269 bp, Homo sapiens
aaacaacaaagaatggcactggttcaaagggagctgcctcacccacattaggcatctttcccagaggcagcccatgctggtttctgttggagtacaaaagcgcagctgcattgcctccatctgggacaattctgaagggtcattgcagctccatagctccctatagggtcagctgatggcctttgttccaaccacatcacaatgtaatttttccctctgtggaatcttacttcattactcccttgtaggtggtgtttcaggggcactcc

SEQ ID NO: 51159 - DNA, 749 bp, Homo sapiens
taaatgccagcacctagaccaaagttttgttttgttttgtttttttaagatagggtctctgttgcctaggctggatcttactgcagccttgacctcccagcctcaagcagtccacccacctcagcctcccaagtagctgggactgaaggctcacgccaccatgcccagctaagtttgtttattttttgtagaggcgaggtctcactatattgcccagggtggtctctaactcctaaactcaagcagtcctcccacctcagcctcccaaagtgtaaaccaaactttttattgcatggcttaattgtacccattgaccatgaggaagaagagtccagcaccaggaatggttgtaacacctcctacaggaaaggtactctagttaggagctgcagactttcgtggttttggtcatgctccacgccgaagtcccgaagggaaaggcatggatcctgcctggtctggcagaggcaggagctagggatagaatgcatctttctttgcagcatacctgtgaaaccaggttttttctgacacctggttagtgaaatactgaaggggaggagagactctagggtttacctccaatattgctgagcaggaaaaaggccttttgcttgtggtaggtaagtaagaggaatggagctgagtaacttgataacgaggcaggaatctgctttatgatgtgaaaacattaccttttaaatgtttgtttggagcaatatcgaagtttaattttaaataatttacaa

SEQ ID NO: 51160 - DNA, 475 bp, Homo sapiens
cctttctgcctttctacagtaaagagatgctgggatatgaaagagatttgaaacaactaattccccaacttagactagaatgcactgaaatagagagagcgggggagagagggagagagagagagagagacagaaggagacagaagaaagggggaagaggagaggagagggaagaagagaacagggctagaatggaatgagttagtcaggagctaattaatgaccaaagatgaagaaaagaaagcaatgcaaaaaaatgaaaatgcagccaaggcagagcacattggataggactatacttaacagagaaatgtcttgctgttgtgcaggcttcctcaatctaaaatagcacgggtggccttcattcatggccacgatcactgaagtggctctgaagtgtctttgtacctgtaaaaatgggcttgttttgattttttgaacatacaattaaaattgttgtctttattgtaaaagc

SEQ ID NO: 51161 - DNA, 443 bp, Homo sapiens
tgtatgtataccatgcaataccactcagctaaaaaaaaaaaaaatagtcatttgcattctagatagaattggagaccattattctaagtgaagtaactcaggaataacaaacatcgttatgttctcacttataagtgggagctaagctatgaggacacaaaggcataagaatgatacagtggactttggggactcaggggaaggcgggggcaagatgaaagactacacactgggtacagtgtacattagttgggtgatgggtgcaccaaaatctcagaaaccaccactaaagagcttatccatgtaaccaaacaccaactgttccccccaaactattgaaataataataataataataataataataataataataaaagacatggttgtgttatggtgtctaggctgaattgcaatagttattcacaggtgtaatcatagtg

SEQ ID NO: 51162 - DNA, 297 bp, Homo sapiens
gcagatttggccaggaaggagccccttcaaattttcctctttggtctattgacatgtctccattgttttttttaagtccttcttagtttttgcccaagatatgttgggctcaactgtactttcctttcccaagccttggaatcagccatctttctaaagagtcctagttccttttcatagagtaaggaatatagaaaccaagattttcatgctaggtgtactcattgatactggagtgttgttatttttaggttctttcagagaataggaggaaataagagaaaagaggtagttagt

SEQ ID NO: 51163 - DNA, 565 bp, Homo sapiens
ggaaacaaggatttgaaatcttgggactagagttatagagatttattaatgtagtgtagcatgtttgggaaaaaaatggagttggaggtcagaggtctgtttgcattgaatcctggcttaactaaaaatacattaggtgtgtccagtttacaaaatagcttagaaatgagatcttttaagaaactctatacaccatggaataatatacagccatagaaaagaatgagatcatgtcctttgcagggacatggctggagctggaggccgttatccttagcaacctagtgtaggagcagaaaaccaaatgctgcctgttctcccttatgggtgggagctgaatgatgagaacacatggacacatagaagggaacagcacacactgccgcttgtggaagggtggaggatgggaagagggagaagatcaggaagaataatggatacttattcttcctgaatcacccagggtgatgaaataatatatacaacaaacccgcatgacacatgtttacctatgtaataaacctgcacaccctgcagttgtactcctgaacttacaagttaaaaa

SEQ ID NO: 51164 - DNA, 1375 bp, Homo sapiens
tccacaagtttgaagaccagttacttctagtacgagcccttgggtgttttcatctaaagtagaacagaaagaacaggaatggcacttgtggcgatcctaaagccttgcaatgaaataattagtagattggttctgtttcaccttttactgacacttgctggttttgtggcttacttaaaaatagtttattttattataatccaaagataaatgaagaaaggtttgaattcaccaatcctacttttcccactgggatgctaggctagaaaaatagtttcttatgctaataactgtgattaaagccaaagcatttacttaaataattaactttacaaataaaaaagttcaaagagaaaaaaattcatattttatatccctgttgggtaaacaaaaccaaatgtgaacgtgggcaattgggcatctttgcctgacccagcccagtgggcacatggtggcctggccagcggtccaggacgttgccagaaccatagctaaggaggtgccacttgtacacagctgtcatggatctatatattgattacaacagctgcccaacatatgacaataaagtgtcctgaggaaagggtgtcttactcttattcactcaagaggcactctacaggccagcagggagggtccctgagtgtgtccctgagacttctctgccttttaggtgttggacccttggcagatgaggacctctggcctcactgggccccttgctatgagccagctccttcaaattctctcattaaagctcagtgaagcagcctttgcagagagcttcctaatccatgcacacttcacccttttggctaaagttctgcagaaatagtcaggggctccattttcaatcaagagtttgatagtcactggaacaccgtgccttaaatgaaacccaaggacttacctgcatgcctgccgtgctactctgcctctctggctagatctgaggcagccgcagctgtgatggaaggaggactccatgccctgcagcagtcacagcctttttgaggagacaaagcatttgaagagaatgtgcagcaataaacatctatcttatctggggtcagtgagggtttctggtcccttctgacaaagaaattggcagcagagattccataaaaatttcaataagttttagcattctgaaacacttcaattagtttgatgttaacgtttaagcaccttgatgaaataaatttatctcttccaaatcctagaaagaatctccctttcggcaaagattctgcagatgggttttgatgccatttttccattttgtagttagatctctatcatttatcacactgtagaccaaatggtcgttttagtgccattaaaaactgatttgcaatttgctgttaaattaaga

SEQ ID NO: 51165 - DNA, 407 bp, Homo sapiens
ttctgggaatcatcagctggaggtgacttgtgaagagagaatcattaggatgctgatacatagctatatgcaaagaaggatttcccaaataatttaaattcattgtatttgtgagtttagattcaactcaattggtctttctatataaaaatttttccaggctggtctcaaactcctgacctcaggtgacccgcccacttcagcctcccaaagtgctggtattacaggcttacaggattacaggattacaggtgagccaccatgcccaaccactcttatttttttttgaggcagagtcttgctctgttgctcaggctggagtgcagtggtgcaatctccacttcccgggttcaagcaattctcatgcttcagtggcctgagtagctgggattacaggcatgtgtcac

SEQ ID NO: 51166 - DNA, 221 bp, Homo sapiens
gaaaaactcaggatttgagttatagaagatctgggttcaaccagaggcttaatgtataacattaacttttctaatccttgttccccccatataaaaaaaaaaggcgtcataatattgcaggcccaccctaaaaactgtaacatacatgaggtgattagcatagtttctgggaaaattgtatacactcaatattttgtagctattattacttccgagcctag

SEQ ID NO: 51167 - DNA, 1154 bp, Homo sapiens
ttctaggtccacctatgtctgaagctaaattcagtatctaactgctaatgaacaagtttccaaaatactgtaaaaatacaattagtcaatttgagtaaatgcaaatatgatgagaaatcaatttgctatttggcctggcaaatgggaacagtaaaattctgctttactcttctctagtctccttgccccagctgcacccactaccccaaagttggcagttttgaggtatgattttcaaggaatttttttagtattaacatctccctctgagaactatgtacctaaggtcacgcatacaactagtcaattctgtttttattactctaactatgtagaaacagtaagtcacttaaaacaatcacttggctgggttttttcccctttgtgccacattgattcaccctgacccaagaactccagggaaaattctttcatgtcaactgggcaactcattaacctctctttaacatcaagggcttgggaaaaaaaaaaaaaaaaggtcagccacaggaataacaaaaacctggaatttatctttcaggttttgctttctctttctcactttgtttaaagtatctcgtactcacagttcacaaattaaccttcactgtctctttcacattaagagcttatgcttaaagcatgccccccttttctaacttgctggtttaccataaactcccctaagtaataaaattcctaacccagtactgagagtcctccttctctgccacttgggcattattttactagtttctaagccatcatcgcacaagaatccaaaaacccttaaattttttaaccactggcaaatatgtacagcaaattaggttaagcatttaatctggctcatgctctatcatactaaatattcaggtttatcataaactccttaaaaaccatcaaaggtcaaccagaaactgataactcttgaaaggagcaaacacgtaagatctttggagtttaagcttttctgagatgtgttgtgaaaaatctaacgtgtttatcgtatattcaatgtaacaacctggagaatcacaactatatttaaagagcctctggaaaatgaggccagtacagtgtgactacatgtttaattttcaatgtaatttattccaaataaactggttcatgctgaccacttgtattcaact

SEQ ID NO: 51168 - DNA, 786 bp, Homo sapiens
tctgtaagattataataccatatttttattgtaccttttttgtgtttagatatgtttagatacacaaatacttattactgtgttatagctgcctacagtattcagtacactaacgtgatgtacggcttcgtagccggccatgccctatagcctaggtgtgtagcaggctgtgccatctaggtttgtggaagtacactgtgatgttcgcacaatgacaaaatcgcctaaggacacattactcagaacgtctcctagtcgtcaagcaacacatactgtagtcgtaaattagataagtccaagccaggagttttattattctcccaaatgagaattggcatatttatgctgcaaacataaggcacagctgacttacataccccttttgggtatacaccaccatttgggtgatgtggattgttggatgctacagtatggtgcctggcaatcagggtggaatatttgaaattgggaaccgacctagcttattggagagctattgtcaaatatagtcaaaagaaaatatgtgaaggaaggtacataacccaaactgaagagatttgtgttttctaaagtgttctgattgagaaattttaaaaactagaattagcctcagccatcagtgaagtctagaaagccttcgttggaattagattgtctaagtacgctgtggtaggactgagatctttcaaatcagatgcccctgatgcttgggctgacccatcagagctttagcttttttctgtctgcatcttacaggctccagttaaactagccatttgcaggtac

SEQ ID NO: 51169 - DNA, 214 bp, Homo sapiens
accacaagagatagtcttttctttaaaaaatctacataagacaataaggtcatgaaaaatattgagttcttagagtcatgtttaaaacaaacttcaggatgggtatagtagcccacacctgtaatcccagcactgtgggagaccaaggcgggaggattacttgaggccaggggtttgaaaccaggctaggcaacatagagacccccatctctat

SEQ ID NO: 51170 - DNA, 2065 bp, Homo sapiens
gctaaagagcgcgggtcctcggccgtggagggtcaagtggcttcttctgagcgctgagggaggggagcgtgcgtaggggatggtgccagcgctgcgttatttggttggtgcctgcggacgggcccgcgggcttttcgccggtggctcccctggggcgtgcgggttcgcgtctgggaggccaagaccgctgtgtggaggtagccgcagcgccagcaccagctcatttgatatagtcatcgttggtggcggaattgtggggcttgcctctgccagagcactcatcctgcgacatccatcactttctattggtgttctggaaaaggagaaagatttagctgttcaccagactggacataacagtggtgtcatacatagtggaatttattataaacctgagtctctgaaagccaaattatgtgtacaaggtgcagccctcctctatgagtactgtcagcaaaagggaatttcctacaagcagtgtggcaagcttatagtagctgttgaacaagaagaaattcccagacttcaggccctatatgagaaaggcctccagaatggtgtcccgggcctgaggctgatccagcaggaggatataaaaaagaaggagccatattgtaggggtctaatggctattgattgtccacatactggcattgtggactatcggcaggtggctttgtcatttgcccaggatttccaagaagcaggtggctctgtcttgaccaattttgaagtaaaaggtattgaaatggctaaagaaagtccttcaagaagtatagatggaatgcaatatccaattgttataaagaatacaaagggagaggaaattcgatgtcagtatgttgtgacatgtgcaggactttactcagaccgtatttcagagttgagtggctgcactcctgatcctcgaattgtaccattccggggagattacctgcttttgaagccagaaaaatgttatcttgtaaaaggaaatatttatccggtcccagatagccggtttcctttcctaggagttcacttcacaccaaggatggatggcagtatttggctagggcctaatgcagttcttgcctttaaacgagagggttacagaccctttgacttcagtgccacagatgttatggatataattatcaatagtggcttgattaaactggcatcccagaatttttcctatggagttactgaaatgtataaagcatgttttcttggtgcaacagtgaagtatcttcaaaaattcatccctgaaattactatcagtgatatacttaggggcccagctggagtaagagcccaggccctggatagagatggaaatctggtagaagattttgtatttgatgcaggagttggggatattggaaatcgcattcttcatgtgagaaatgcaccttctcctgctgctacttcttccattgcaatttctggaatgattgcagatgaagtacaacaaagatttgaattataaataatgaaaggagctaggtatgcactgtaatcttcatgtcagcaacaagaatgtactaattgcattctttaatttaaaaaatggtttttaaactttcgtttttaggtcaaagataaccactgcattgttaaaatgatgtaacatagaaataataattttctacaaaaattagccaggcatggtggcgcatgcctgtaatctcagctactcaggaggctgaggcaggagaatcaattgaaccgagcagacggaggtgagctgagagctgagattgcaccactgcactccagcctgggtgacagagcaagaaaataataataataataattttcaaaatgttaggctgggggccgtggccagcactttgggaagccaaggcaggtagattgtagcccaggagtttgagaacagcctgggcaacatggcaaaaccctgtttctacacaaagttagctgggtctggtgcctctgtggttccagctcctcagtaggctgaggtgagaggatcacttgagcccaggaggtctaggctgcagtgagcttatgttcatgactctgtattccaggctggatgatagagcaagatcttgtctca

SEQ ID NO: 51171 - DNA, 2210 bp, Homo sapiens
gctaaagagcgcgggtcctcggccgtggagggtcaagtggcttcttctgagcgctgagggaggggagcgtgcgtaggggatggtgccagcgctgcgttatttggttggtgcctgcggacgggcccgcgggcttttcgccggtggctcccctggggcgtgcgggttcgcgtctgggaggccaagaccgctgtgtggaggtagccgcagcgccagcaccagctcatttgatatagtcatcgttggtggcggaattgtggggcttgcctctgccagagcactcatcctgcgacatccatcactttctattggtgttctggaaaaggagaaagatttagctgttcaccagactggacataacagtggtgtcatacatagtggaatttattataaacctgagtctctgaaagccaaattatgtgtacaaggtgcagccctcctctatgagtactgtcagcaaaagggaatttcctacaagcagtgtggcaagcttatagtagctgttgaacaagaagaaattcccagacttcaggccctatatgagaaaggcctccagaatggtgtcccgggcctgaggctgatccagcaggaggatataaaaaagaaggagccatattgtaggggtctaatggctattgattgtccacatactggcattgtggactatcggcaggtggctttgtcatttgcccaggatttccaagaagcaggtggctctgtcttgaccaattttgaagtaaaaggtattgaaatggctaaagaaagtccttcaagaagtatagatggaatgcaatatccaattgttataaagaatacaaagggagaggaaattcgatgtcagtatgttgtgacatgtgcaggactttactcagaccgtatttcagagttgagtggctgcactcctgatcctcgaattgtaccattccggggagattacctgcttttgaagccagaaaaatgttatcttgtaaaaggaaatatttatccggtcccagatagccggtttcctttcctaggagttcacttcacaccaaggatggatggcagtatttggctagggcctaatgcagttcttgcctttaaacgagagggttacagaccctttgacttcagtgccacagatgttatggatataattatcaatagtggcttgattaaactggcatcccagaatttttcctatggagttactgaaatgtataaagcatgttttcttggtgcaacagtgaagtatcttcaaaaattcatccctgaaattactatcagtgatatacttaggggcccagctggagtaagagcccaggccctggatagagatggaaatctggtagaagattttgtatttgatgcaggagttggggatattggaaatcgcattcttcatgtgagaaatgcaccttctcctgctgctacttcttccattgcaatttctggaatgattgcagatgaagtacaacaaagatttgaattataaataatgaaaggagctagacggagtttcactcttgttgcccaggcttgagtgcaatggtacgatcttggctcactgcaacctctgcctcccgggttccagcgattctcttgcctcaacctcctgagtagctgggattacaggcgcccaccaccatgcctggctaattttttgtatttttagtagagacggggttttgccatgttggccaggctggtctcgaattcctgacctcaggtgatccacctgcctcagcctcccaaaatgctgggattacaggtgcgagccaccatgctcagccctgaatccctgactttgttaatgacctgtccttaccaaccatgacctagagaagatttggctttttaagagttttggagaaagatggcataaaaatagattatttccttaaatcaattttttagcattacgctacctaagctcgtttggtctctcatagacaagaaaatacattatattgtaggttacattcttttaattttgaagagtcacaaaactcacattatttagagcaacaatatttgtatttggaaattaaaaattcatgatttcaagaaaatacataaaatttacatttttgagtagtttgaataagtttctatcttaattataatatttgtaggaaataacaaaacaaactcaaagcctttattatttccagtctctttgtaactgatgtggtatggtatcatcatgaaatctaaacagtggtacactgagt

SEQ ID NO: 51172 - DNA, 2144 bp, Homo sapiens
gctaaagagcgcgggtcctcggccgtggagggtcaagtggcttcttctgagcgctgagggaggggagcgtgcgtaggggatggtgccagcgctgcgttatttggttggtgcctgcggacgggcccgcgggcttttcgccggtggctcccctggggcgtgcgggttcgcgtctgggaggccaagaccgctgtgtggaggtagccgcagcgccagcaccagctcatttgatatagtcatcgttggtggcggaattgtggggcttgcctctgccagagcactcatcctgcgacatccatcactttctattggtgttctggaaaaggagaaagatttagctgttcaccagactggacataacagtggtgtcatacatagtggaatttattataaacctgagtctctgaaagccaaattatgtgtacaaggtgcagccctcctctatgagtactgtcagcaaaagggaatttcctacaagcagtgtggcaagcttatagtagctgttgaacaagaagaaattcccagacttcaggccctatatgagaaaggcctccagaatggtgtcccgggcctgaggctgatccagcaggaggatataaaaaagaaggagccatattgtaggatatccagttgtgtcagcatcacttatcaaaaaaccattattttcccactgtgctgcagtattgcctttatgatatcagggtctaatggctattgattgtccacatactggcattgtggactatcggcaggtggctttgtcatttgcccaggatttccaagaagcaggtggctctgtcttgaccaattttgaagtaaaaggtattgaaatggctaaagaaagtccttcaagaagtatagatggaatgcaatatccaattgttataaagaatacaaagggagaggaaattcgatgtcagtatgttgtgacatgtgcaggactttactcagaccgtatttcagagttgagtggctgcactcctgatcctcgaattgtaccattccggggagattacctgcttttgaagccagaaaaatgttatcttgtaaaaggaaatatttatccggtcccagatagccggtttcctttcctaggagttcacttcacaccaaggatggatggcagtatttggctagggcctaatgcagttcttgcctttaaacgagagggttacagaccctttgacttcagtgccacagatgttatggatataattatcaatagtggcttgattaaactggcatcccagaatttttcctatggagttactgaaatgtataaagcatgttttcttggtgcaacagtgaagtatcttcaaaaattcatccctgaaattactatcagtgatatacttaggggcccagctggagtaagagcccaggccctggatagagatggaaatctggtagaagattttgtatttgatgcaggagttggggatattggaaatcgcattcttcatgtgagaaatgcaccttctcctgctgctacttcttccattgcaatttctggaatgattgcagatgaagtacaacaaagatttgaattataaataatgaaaggagctaggtatgcactgtaatcttcatgtcagcaacaagaatgtactaattgcattctttaatttaaaaaatggtttttaaactttcgtttttaggtcaaagataaccactgcattgttaaaatgatgtaacatagaaataataattttctacaaaaattagccaggcatggtggcgcatgcctgtaatctcagctactcaggaggctgaggcaggagaatcaattgaaccgagcagacggaggtgagctgagagctgagattgcaccactgcactccagcctgggtgacagagcaagaaaataataataataataattttcaaaatgttaggctgggggccgtggccagcactttgggaagccaaggcaggtagattgtagcccaggagtttgagaacagcctgggcaacatggcaaaaccctgtttctacacaaagttagctgggtctggtgcctctgtggttccagctcctcagtaggctgaggtgagaggatcacttgagcccaggaggtctaggctgcagtgagcttatgttcatgactctgtattccaggctggatgatagagcaagatcttgtctca

SEQ ID NO: 51173 - DNA, 694 bp, Homo sapiens
gctaaagagcgcgggtcctcggccgtggagggtcaagtggcttcttctgagcgctgagggaggggagcgtgcgtaggggatggtgccagcgctgcgttatttggttggtgcctgcggacgggcccgcgggcttttcgccggtggctcccctggggcgtgcgggttcgcgtctgggaggccaagaccgctgtgtggaggtagccgcagcgccagcaccagaagaaacagtttgtgtgaaggctgtaaggcttggagaggttttggctattttgacgactagaaggtgggccatatgagtgtgactgaagtttagtggaagacatatggtgtggaatgacccagaaggactacatcacagcaaggtttttagtttattttaaccacacgttgacttttattctaagagccacgggaagctatttaaaagggttttaagaagaggctacgctttaggaggccgaggcgggcggatcgcctgaggtcagaagttggagaccagcctaaccaacatggtgaaaccccgtctctactaaaaatacaaaaaaattagcctggcgtggtggtgggcgcctgtaatcccaactactccggagccttaggagaatcgcttgaacctgggaggcggagattgcagtgagctgagatcgcaccattgcactccagcctgggcgacagagcaagactctgtctcgca

SEQ ID NO: 51174 - DNA, 436 bp, Homo sapiens
gacaacatagtatatactactgggaaaaatctcactagagcttatttaaaacataattgtttgatgatacgtaattcaactcagaatcagatatgaatcaaatcagaatcaggtatggtgagggataataaatggaaaagaaaaactcattgtagcagcaagaaaagcttggcaaaatcaactcctctaaaggacaaaattgtttcttgattatagagattttgttatttagcaagtattatttctcttatctgttatcttttcataattctgtttcagggtctaatggctattgattgtccacatactggcattgtggactatcggcaggtggctttgtcatttgcccaggatttccaagaagcaggtggctctgtcttgaccaattttgaagtaaaaggtattgaaatggctaaagaaagtccttcaagaagta

SEQ ID NO: 51175 - DNA, 721 bp, Homo sapiens
ttactcagatgaggcttattgttgccattgattgatttttataataaattcattctataaatttaaataaaaatatacctgttctaattaagtgtggatttacctactacctttggaaagagcagacattgataaataacttacttgtttttatgtatttctttgataagcgtttgttacactattgttacgtaataggttttaggctctaagctaacaatataggtttgacaggctacaactgacagcctttggttaaacataaactcattgggtttccatataattgtgcatttagaagaatactttattgctttaagactttttggaaacgctgacttgtaaagtatcctatgtctttgagtcagctgactcccatcttttacttttgcaggggcccagctggagtaagagcccaggccctggatagagatggaaatctggtagaagattttgtatttgatgcaggagttggggatattggaaatcgcattcttcatgtgagaaatgcaccttctcctgctgctacttcttccattgcaatttctggaatgattgcagatgaagtacaacaaagatttgaattataaataatgaaaggagctaggtatgcactgtaatcttcatgtcagcaacaagaatgtactaattgcattctttaatttaaaaaatggtttttaaactttcgtttttaggtcaaagataaccactgcattgttaa

SEQ ID NO: 51176 - DNA, 1432 bp, Homo sapiens
  misc_feature (1388)..(1388): n is a, c, g, or t
gctaaagagcgcgggtcctcggccgtggagggtcaagtggcttcttctgagcgctgagggaggggagcgtgcgtaggggatggtgccagcgctgcgttatttggttggtgcctgcggacgggcccgcgggcttttcgccggtggctcccctggggcgtgcgggttcgcgtctgggaggccaagaccgctgtgtggaggtagccgcagcgccagcaccagctcatttgatatagtcatcgttggtggcggaattgtggggcttgcctctgccagagcactcatcctgcgacatccatcactttctattggtgttctggaaaaggagaaagatttagctgttcaccagactggacataacagtggtgtcatacatagtggaatttattataaacctgagtctctgaaagccaaattatgtgtacaaggtgcagccctcctctatgagtactgtcagcaaaagggaatttcctacaagcagtgtggcaagcttatagtagctgttgaacaagaagaaattcccagacttcaggccctatatgagaaaggcctccagaatggtgtcccgggcctgaggctgatccagcaggaggatataaaaaagaaggagccatattgtaggggtctaatggctattgattgtccacatactggcattgtggactatcggcaggtggctttgtcatttgcccaggatttccaagaagcaggtggctctgtcttgaccaattttgaagtaaaaggtattgaaatggctaaagaaagtccttcaagaagtatagatggaatgcaatatccaattgttataaagaatacaaagggagaggaaattcgatgtcagtatgttgtgacatgtgcaggactttactcagaccgtatttcagagttgagtggctgcactcctgatcctcgaattgtaccattccggggagattacctgcttttgaagccagaaaaatgttatcttgtaaaaggaaatatttatccggtcccagatagccggtttcctttcctaggagttcacttcacaccaaggatggatggcagtatttggctagggcctaatgcagttcttgcctttaaacgagagggttacagaccctttgacttcagtgccacagatgttatggatataattatcaatagtggcttgattaaactggcatcccagaatttttcctatggagttactgaaatgtataaagcatgttttcttggtgcaacagtgaagtatcttcaaaaattcatccctgaaattactatcagtgatatacttaggcaggtggctgtgagaggaccgagctggctatggcagcaacccatgaaagtgagtgataacaacatttattgtttcctgtggcgttgctttgctttgctattgactggtagcncttgtagctttaaataaattgaggaagtatgagagagtaaatgg

SEQ ID NO: 51177 - DNA, 2208 bp, Homo sapiens
gctaaagagcgcgggtcctcggccgtggagggtcaagtggcttcttctgagcgctgagggaggggagcgtgcgtaggggatggtgccagcgctgcgttatttggttggtgcctgcggacgggcccgcgggcttttcgccggtggctcccctggggcgtgcgggttcgcgtctgggaggccaagaccgctgtgtggaggtagccgcagcgccagcaccagaagaaacagtttgtgtgaaggctgtaaggcttggagaggttttggctattttgacgactagaaggtgggccatatgagtgtgactgaagtttagtggaagacatatggtgtggaatgacccagaaggactacatcacagcaagctcatttgatatagtcatcgttggtggcggaattgtggggcttgcctctgccagagcactcatcctgcgacatccatcactttctattggtgttctggaaaaggagaaagatttagctgttcaccagactggacataacagtggtgtcatacatagtggaatttattataaacctgagtctctgaaagccaaattatgtgtacaaggtgcagccctcctctatgagtactgtcagcaaaagggaatttcctacaagcagtgtggcaagcttatagtagctgttgaacaagaagaaattcccagacttcaggccctatatgagaaaggcctccagaatggtgtcccgggcctgaggctgatccagcaggaggatataaaaaagaaggagccatattgtaggggtctaatggctattgattgtccacatactggcattgtggactatcggcaggtggctttgtcatttgcccaggatttccaagaagcaggtggctctgtcttgaccaattttgaagtaaaaggtattgaaatggctaaagaaagtccttcaagaagtatagatggaatgcaatatccaattgttataaagaatacaaagggagaggaaattcgatgtcagtatgttgtgacatgtgcaggactttactcagaccgtatttcagagttgagtggctgcactcctgatcctcgaattgtaccattccggggagattacctgcttttgaagccagaaaaatgttatcttgtaaaaggaaatatttatccggtcccagatagccggtttcctttcctaggagttcacttcacaccaaggatggatggcagtatttggctagggcctaatgcagttcttgcctttaaacgagagggttacagaccctttgacttcagtgccacagatgttatggatataattatcaatagtggcttgattaaactggcatcccagaatttttcctatggagttactgaaatgtataaagcatgttttcttggtgcaacagtgaagtatcttcaaaaattcatccctgaaattactatcagtgatatacttaggggcccagctggagtaagagcccaggccctggatagagatggaaatctggtagaagattttgtatttgatgcaggagttggggatattggaaatcgcattcttcatgtgagaaatgcaccttctcctgctgctacttcttccattgcaatttctggaatgattgcagatgaagtacaacaaagatttgaattataaataatgaaaggagctaggtatgcactgtaatcttcatgtcagcaacaagaatgtactaattgcattctttaatttaaaaaatggtttttaaactttcgtttttaggtcaaagataaccactgcattgttaaaatgatgtaacatagaaataataattttctacaaaaattagccaggcatggtggcgcatgcctgtaatctcagctactcaggaggctgaggcaggagaatcaattgaaccgagcagacggaggtgagctgagagctgagattgcaccactgcactccagcctgggtgacagagcaagaaaataataataataataattttcaaaatgttaggctgggggccgtggccagcactttgggaagccaaggcaggtagattgtagcccaggagtttgagaacagcctgggcaacatggcaaaaccctgtttctacacaaagttagctgggtctggtgcctctgtggttccagctcctcagtaggctgaggtgagaggatcacttgagcccaggaggtctaggctgcagtgagcttatgttcatgactctgtattccaggctggatgatagagcaagatcttgtctca

SEQ ID NO: 51178 - DNA, 107 bp, Homo sapiens
ccatttttacctgaacagaaatacatattttgctctctccaattattcaaggtcattacagtatgaactatcaagatcatttttttaatttaaaatactgatttggg

SEQ ID NO: 51179 - DNA, 316 bp, Homo sapiens
gataaccagagaactgctaattgcttgatttaattctagtctaaagcccagatgaaaaatattttaagatactgaaggaacagtcagacatagccccaaacatcagttggtcatccccaaagcccctagaaatctacttcctgtctctatggattttcctattctgcacattttgtagaaatggaataatagatgatgaagccttttgtgtctgacttctctcggctaggatgatgttttcaaagttcatccatgttgtagcatgtttcagtacgtcattcctttttatggaatgatatgtgaaataatattccat

SEQ ID NO: 51180 - DNA, 122 bp, Homo sapiens
gataagatagaatagaatttctttttttacctttagtctcctagaatatgctgcttataatgaaaataatacttgatattttagaacctctccctacttaccttatttgaattaagtgcctt

SEQ ID NO: 51181 - DNA, 263 bp, Homo sapiens
gccttgggaggatagatgaaagaagaatgacagatggaggtcactgaccccagcatctcagctggagacagtctttgggttagctttggtggggatgccctgagaccactggggacagcccttatcaacacattttcactgaagccattttgcctcagcgagttatccagtggccagagctgaagtcacaagggaagcgtgtgtgtgtgtgtgtgcacgtgaacgtgcacacgcatatgtgtggtatggggtcatttcatgcc

SEQ ID NO: 51182 - DNA, 209 bp, Homo sapiens
gcctcttctagatggcactaactaaggggaatttagaatggggtggaaggaggaaaaggaaaggttattaccagacccattctctccttttgctttgaaattcatggtactcgataattggttcacatccaaagagttaactgaactagatgaggtgctgtgtaacttctgcaggccagagggaagagaagagagtaagagctaacaag

SEQ ID NO: 51183 - DNA, 460 bp, Homo sapiens
cactggaatttacttgaagtttgtggaaaggttgtggattggtggcaaatcaccttctctagaaattggtactgataaagcacaatgttgtgctccctagaagctgagaggtggtcctgactgaagccaggtggaggaggagccattgcttagatgaacctctaaggtcccttctgggcttatgatgctaggttattagagccagtgtagtgagaggggtatttgtctttcttctaccattcctttcctgggcactttgtatgtccacagacacccaaaagggctccattttcccaggtcttcctgcccattgacccaccctttcctccttgtctatatctgacaacctctcattgccttctcgttacttgattccttcttggatccaggatcctaattgtagagagaaagaagaacagtgagagggcttagaaaatagaatcccaacctttattcatca

SEQ ID NO: 51184 - DNA, 1630 bp, Homo sapiens
agagcctaaaggctagagccggagctgccgcgccagtcgcctagcaggtcctctaccggcttattcctgtgccggatcttcatcggcacaggggccactgagacgtttctgcctccctctttcttcctccgctctttctcttccctctcgtttagtttgcctgggagcttgaaaggagaaagcacggggtcgccccaaaccccttctgcttctgcccatcacaagtgccactaccgccatgggcctcactatctcctccctcttctcccgactatttggcaagaagcagatgcgcattttgatggttggattggatgctgctggcaagacaaccattctgtataaactgaagttaggggagatagtcaccaccattcctaccattggttttaatgtggaaacagtagaatataagaacatttgtttcacagtatgggatgttggtggtcaagatagaattaggcctctctggaagcattacttccagaatacccagggtcttatttttgtggtagatagcaacgatcgtgaaagaattcaggaagtagcagatgagctgcagaaaatgcttctggtagatgaattgagagatgcagtgctgctactttttgcaaacaaacaggatttgccaaatgctatggccatcagtgaaatgacagataaactagggcttcagtctcttcgtaacagaacatggtatgttcaagccacttgtgcaacacaaggaactggtctgtatgaaggacttgactggctgtcaaatgagctttcaaaacgttaaatgaaattggatatctaaccaaggacatgtttgataaaattggtctaggcttgttacaacaaaattagtttgtatcttggttattaaacagtatctgggactggtttgggcagaatattaaacttattttgttgccaattattgtttaccgagtataatgttgctatttagcaatgtgcttggttttaaagaaattctccttgggaaaaaagtatcctcttttaattttacttcccataagcgtaaatgcctggacatagctcttgtgcaacctttaaataaattgttttgagtgttttttgagccccagacaaataatgttttaaagttatccccttgctactttactgatacctttatcattcctgagacagtttgctaatttaaaaatgtagcattccatttgtatttatttctctcccttgccaaaaagattttctaatactgcttgtaccagccagagaaagatccaaaacactactcagctctcttgcactgaggaaatttttccccctacattgactcctggcctacatcagccaaacttaaccttggtggggtttggatttgatagccaattagttctgtgctggttgcaaagaattgatatttagatggtttttaatactcagcagattgtcttcctttatattgtgtcttttttatgttgcatgttgcttttgttatcagcctgattttttgctcagtatatgatagttctgctgatgttttgtttattgggcagacatatcttcattaagagtttttggaaaactcatcaaattcgatgaatacattttcttcataacccatttggaattattcctaataaaatgataaaatacgtaa

SEQ ID NO: 51185 - DNA, 1814 bp, Homo sapiens
agagcctaaaggctagagccggagctgccgcgccagtcgcctagcaggtcctctaccggcttattcctgtgccggatcttcatcggcacaggggccactgagacgtttctgcctccctctttcttcctccgctctttctcttccctctcgtttagtttgcctgggagcttgaaaggagaaagcacggggtcgccccaaaccccttctgcttctgcccatcacaagtgccactaccgccatgggcctcactatctcctccctcttctcccgactatttggcaagaagcagatgcgcattttgatggttggattggatgctgctggcaagacaaccattctgtataaactgaagttaggggagatagtcaccaccattcctaccattggttttaatgtggaaacagtagaatataagaacatttgtttcacagtatgggatgttggtggtcaagatagaattaggcctctctggaagcattacttccagaatacccagggtcttatttttgtggtagatagcaacgatcgtgaaagaattcaggaagtagcagatgagctgcagaaaatgcttctggtagatgaattgagagatgcagtgctgctactttttgcaaacaaacaggatttgccaaatgctatggccatcagtgaaatgacagataaactagggcttcagtctcttcgtaacagaacatggtatgttcaagccacttgtgcaacacaaggaactggtctgtatgaaggacttgactggctgtcaaatgagctttcaaaacgttaaatgaaattggatatctaaccaaggacatgtttgataaaattggtctaggcttgttacaacaaaattagtttgtatcttggttattaaacagtatctgggactggtttgggcagaatattaaacttattttgttgccaattattgtttaccgagtataatgttgctatttagcaatgtgcttggttttaaagaaattctccttgggaaaaaagtatcctcttttaattttacttcccataagcgtaaatgcctggacatagctcttgtgcaacctttaaataaattgttttgagtgttttttgagccccagacaaataatgttttaaagttatccccttgctactttactgatacctttatcattcctgagacagtttgctaatttaaaaatgtagcattccatttgtatttatttctctcccttgccaaaaagattttctaatactgcttgtaccagccagagaaagatccaaaacactactcagctctcttgcactgaggaaatttttccccctacattgactcctggcctacatcagccaaacttaaccttggtggggtttggatttgatagccaattagttctgtgctggttgcaaagaattgatatttagatggtttttaatactcagcagattgtcttcctttatattgtgtcttttttatgttgcatgttgcttttgttatcagcctgattttttgctcagtatatgatagttctgctgatgttttgtttattgggcagacatatcttcattaagagtttttggaaaactcatcaaattcgatgaatacattttcttcataacccatttggaattattcctaataaaatgataaaatacgtaaaaaaaaacaccacaaaaagggggggggccaaaatcccgggggccaattcgcgcccccgttttgtaaagggcccaagggggggaaaagagggggcgcgtaaaggcgggaagcgtgggttctggggaccctgggggttgcaaccccgaagcgggaaatgggggccctggggtgtttgttcacacaa

SEQ ID NO: 51186 - DNA, 470 bp, Homo sapiens
agcggccgctactactactactactaccacccccgcggccgctccaccaaaaagattttctaatactgcttgtaccagccagagaaagatccaaaacactactcagctctcttgcactgaggaaatttttccccctacattgactcctggcctacatcagccaaacttaaccttggtggggtttggatttgatagccaattagttctgtgctggttgcaaagaattgatatttagatggtttttaatactcagcagattgtcttcctttatattgtgtcttttttatgttgcatgttgcttttgttatcagcctgattttttgctcagtatatgatagttctgctgatgttttgtttattgggcagacatatcttcattaagagtttttggaaaactcatcaaattcgatgaatacattttcttcataacccatttggaattattcctaataaaatgataaaatacgtaa

SEQ ID NO: 51187 - DNA, 1111 bp, Homo sapiens
ttcccatctctctctcgttcttctcttctttctttctcttttggtctttcttgtctctccttgtcttttcattcttcttttgtttttgtttgtttcctctttctctctttttttttctgcttgttttttttttcatctctctttcttttcgttgtttttcttttcttcgtttgtcctgcgattgctttcttgtttgctgttttctttctctctctcgttgtttctttctccgtcttttcttttctctgtctgtttgttcttttgcgtcttcttctcttcttttttcgtttgtcttctttcttctgtctttctgtttctctcttcttcgcttccgcgcttctgtttgcctgcgtcctgctcgtccttgctctcctcctcctcttcttgtttaatcagtgtagtgcggctgtggtggtaatttttgttcctcttatctgtcttgtgtgagtgttttctccctgctggtagtgttgtctgtgggtgtttgctccattcatagtctcgtctatgttgtttcgtcctctcggtggtgttatctcgttctcgtgtgtgtttgtcttccctgctgttgtgttgcgctgctgcctcagttttgttggttgcttttcatagatcgtctctggttgcgctgtttgttttctcttccctatcgctggttttttttttcgcgtcgctcgtctttcagttatattagtatctacgcctcttctagtgtggcgcgctctttttttaaatacgtctgggtcggtgtgttctgtgtgtctcgccccgctggggagatagttattgcatggcgcgcgcgcccgccctcttttttttttttttttttttttttttttttttttttttttttttttttttttttttttttttttttttttttttttttttttttcttttttttttttttttttttttcgtttttttttttgcatgttgcttttgttatcagcctgattttttgctcagtatatgatagttctgctgatgttttgtttattgggcagacatatcttcattaagagtttttggaaaactcatcaaattcgatgaatacattttcttcataacccatttggaattattcctaataaaatgataaaatacgtaa

SEQ ID NO: 51188 - DNA, 237 bp, Homo sapiens
gcggccgcctactactactactactgctcgaattcaagcttctaacgatgtacgggtgcatgttgcttttgttatcagcctgattttttgctcagtatatgatagttctgctgatgttttgtttattgggcagacatatcttcattaagagtttttggaaaactcatcaaattcgatgaatacattttcttcataacccatttggaattattcctaataaaatgataaaatacgtaa

SEQ ID NO: 51189 - DNA, 262 bp, Homo sapiens
  misc_feature (25)..(25): n is a, c, g, or t
  misc_feature (29)..(30): n is a, c, g, or t
attaaagcaaacctttaaaaaaaanaaannacctgtggttactcaaccattgtcacaggaaacacaaggaactggtctgtatgaaggacttgactggctgtcaaatgagctttcaaaacgttaaatgaaattggatatctaaccaaggacatgtttgataaaattggtctaggcttgttacaacaaaattagtttgtatcttggttattaaacagtatctgggactggtttgggcagaatattaaacttattttgttgccaa

SEQ ID NO: 51190 - DNA, 130 bp, Homo sapiens
tgcccaataaacaaaacatcagcagaacatatcttcattaagagtttttggaaaactcatcaaattcgatgaatacattttcttcataacccatttggaattattcctaataaaatgataaaatacgtaa

SEQ ID NO: 51191 - DNA, 171 bp, Homo sapiens
gcggccgcctactactactactactgctcgaattcaagcttctaacgatgtacggggacatgtttgataaaattggtctaggcttgttacaacaaaattagtttgtatcttggttattaaacagtatctgggactggtttgggcagaatattaaacttattttgttgccaa

SEQ ID NO: 51192 - DNA, 1655 bp, Homo sapiens
agagcctaaaggctagagccggagctgccgcgccagtcgcctagcaggtcctctaccggcttattcctgtgccggatcttcatcggcacaggggccactgagacgtttctgcctccctctttcttcctccgctctttctcttccctctcgtttagtttgcctgggagcttgaaaggagaaagcacggggtcgccccaaaccccttctgcttctgcccatcacaagtgccactaccgccatgggcctcactatctcctccctcttctcccgactatttggcaagaagcagatgcgcattttgatggttggattggatgctgctggcaagacaaccattctgtataaactgaagttaggggagatagtcaccaccattcctaccattgcggtcatttttgtttttctttgtaggttttaatgtggaaacagtagaatataagaacatttgtttcacagtatgggatgttggtggtcaagatagaattaggcctctctggaagcattacttccagaatacccagggtcttatttttgtggtagatagcaacgatcgtgaaagaattcaggaagtagcagatgagctgcagaaaatgcttctggtagatgaattgagagatgcagtgctgctactttttgcaaacaaacaggatttgccaaatgctatggccatcagtgaaatgacagataaactagggcttcagtctcttcgtaacagaacatggtatgttcaagccacttgtgcaacacaaggaactggtctgtatgaaggacttgactggctgtcaaatgagctttcaaaacgttaaatgaaattggatatctaaccaaggacatgtttgataaaattggtctaggcttgttacaacaaaattagtttgtatcttggttattaaacagtatctgggactggtttgggcagaatattaaacttattttgttgccaattattgtttaccgagtataatgttgctatttagcaatgtgcttggttttaaagaaattctccttgggaaaaaagtatcctcttttaattttacttcccataagcgtaaatgcctggacatagctcttgtgcaacctttaaataaattgttttgagtgttttttgagccccagacaaataatgttttaaagttatccccttgctactttactgatacctttatcattcctgagacagtttgctaatttaaaaatgtagcattccatttgtatttatttctctcccttgccaaaaagattttctaatactgcttgtaccagccagagaaagatccaaaacactactcagctctcttgcactgaggaaatttttccccctacattgactcctggcctacatcagccaaacttaaccttggtggggtttggatttgatagccaattagttctgtgctggttgcaaagaattgatatttagatggtttttaatactcagcagattgtcttcctttatattgtgtcttttttatgttgcatgttgcttttgttatcagcctgattttttgctcagtatatgatagttctgctgatgttttgtttattgggcagacatatcttcattaagagtttttggaaaactcatcaaattcgatgaatacattttcttcataacccatttggaattattcctaataaaatgataaaatacgtaa

SEQ ID NO: 51193 - DNA, 1412 bp, Homo sapiens
agagcctaaaggctagagccggagctgccgcgccagtcgcctagcaggtcctctaccggcttattcctgtgccggatcttcatcggcacaggggccactgagacgtttctgcctccctctttcttcctccgctctttctcttccctctcgtttagtttgcctgggagcttgaaaggagaaagcacggggtcgccccaaaccccttctgcttctgcccatcacaagtgccactaccgccatgggcgcctctctggaagcattacttccagaatacccagggtcttatttttgtggtagatagcaacgatcgtgaaagaattcaggaagtagcagatgagctgcagaaaatgcttctggtagatgaattgagagatgcagtgctgctactttttgcaaacaaacaggatttgccaaatgctatggccatcagtgaaatgacagataaactagggcttcagtctcttcgtaacagaacatggtatgttcaagccacttgtgcaacacaaggaactggtctgtatgaaggacttgactggctgtcaaatgagctttcaaaacgttaaatgaaattggatatctaaccaaggacatgtttgataaaattggtctaggcttgttacaacaaaattagtttgtatcttggttattaaacagtatctgggactggtttgggcagaatattaaacttattttgttgccaattattgtttaccgagtataatgttgctatttagcaatgtgcttggttttaaagaaattctccttgggaaaaaagtatcctcttttaattttacttcccataagcgtaaatgcctggacatagctcttgtgcaacctttaaataaattgttttgagtgttttttgagccccagacaaataatgttttaaagttatccccttgctactttactgatacctttatcattcctgagacagtttgctaatttaaaaatgtagcattccatttgtatttatttctctcccttgccaaaaagattttctaatactgcttgtaccagccagagaaagatccaaaacactactcagctctcttgcactgaggaaatttttccccctacattgactcctggcctacatcagccaaacttaaccttggtggggtttggatttgatagccaattagttctgtgctggttgcaaagaattgatatttagatggtttttaatactcagcagattgtcttcctttatattgtgtcttttttatgttgcatgttgcttttgttatcagcctgattttttgctcagtatatgatagttctgctgatgttttgtttattgggcagacatatcttcattaagagtttttggaaaactcatcaaattcgatgaatacattttcttcataacccatttggaattattcctaataaaatgataaaatacgtaa

SEQ ID NO: 51194 - DNA, 1520 bp, Homo sapiens
agagcctaaaggctagagccggagctgccgcgccagtcgcctagcaggtcctctaccggcttattcctgtgccggatcttcatcggcacaggggccactgagacgtttctgcctccctctttcttcctccgctctttctcttccctctcgtttagtttgcctgggagcttgaaaggagaaagcacggggtcgccccaaaccccttctgcttctgcccatcacaagtgccactaccgccatgggcctcactatctcctccctcttctcccgactatttggcaagaagcagatgcgcattttgatggttggattggatgctgctggcaagacaaccattctgtataaactgaagttaggggagatagtcaccaccattcctaccattgggtcttatttttgtggtagatagcaacgatcgtgaaagaattcaggaagtagcagatgagctgcagaaaatgcttctggtagatgaattgagagatgcagtgctgctactttttgcaaacaaacaggatttgccaaatgctatggccatcagtgaaatgacagataaactagggcttcagtctcttcgtaacagaacatggtatgttcaagccacttgtgcaacacaaggaactggtctgtatgaaggacttgactggctgtcaaatgagctttcaaaacgttaaatgaaattggatatctaaccaaggacatgtttgataaaattggtctaggcttgttacaacaaaattagtttgtatcttggttattaaacagtatctgggactggtttgggcagaatattaaacttattttgttgccaattattgtttaccgagtataatgttgctatttagcaatgtgcttggttttaaagaaattctccttgggaaaaaagtatcctcttttaattttacttcccataagcgtaaatgcctggacatagctcttgtgcaacctttaaataaattgttttgagtgttttttgagccccagacaaataatgttttaaagttatccccttgctactttactgatacctttatcattcctgagacagtttgctaatttaaaaatgtagcattccatttgtatttatttctctcccttgccaaaaagattttctaatactgcttgtaccagccagagaaagatccaaaacactactcagctctcttgcactgaggaaatttttccccctacattgactcctggcctacatcagccaaacttaaccttggtggggtttggatttgatagccaattagttctgtgctggttgcaaagaattgatatttagatggtttttaatactcagcagattgtcttcctttatattgtgtcttttttatgttgcatgttgcttttgttatcagcctgattttttgctcagtatatgatagttctgctgatgttttgtttattgggcagacatatcttcattaagagtttttggaaaactcatcaaattcgatgaatacattttcttcataacccatttggaattattcctaataaaatgataaaatacgtaa

SEQ ID NO: 51195 - DNA, 1163 bp, Homo sapiens
gtgttccttgtgtcgaaatatgtcatacgggtcttatttttgtggtagatagcaacgatcgtgaaagaattcaggaagtagcagatgagctgcagaaaatgcttctggtagatgaattgagagatgcagtgctgctactttttgcaaacaaacaggatttgccaaatgctatggccatcagtgaaatgacagataaactagggcttcagtctcttcgtaacagaacatggtatgttcaagccacttgtgcaacacaaggaactggtctgtatgaaggacttgactggctgtcaaatgagctttcaaaacgttaaatgaaattggatatctaaccaaggacatgtttgataaaattggtctaggcttgttacaacaaaattagtttgtatcttggttattaaacagtatctgggactggtttgggcagaatattaaacttattttgttgccaattattgtttaccgagtataatgttgctatttagcaatgtgcttggttttaaagaaattctccttgggaaaaaagtatcctcttttaattttacttcccataagcgtaaatgcctggacatagctcttgtgcaacctttaaataaattgttttgagtgttttttgagccccagacaaataatgttttaaagttatccccttgctactttactgatacctttatcattcctgagacagtttgctaatttaaaaatgtagcattccatttgtatttatttctctcccttgccaaaaagattttctaatactgcttgtaccagccagagaaagatccaaaacactactcagctctcttgcactgaggaaatttttccccctacattgactcctggcctacatcagccaaacttaaccttggtggggtttggatttgatagccaattagttctgtgctggttgcaaagaattgatatttagatggtttttaatactcagcagattgtcttcctttatattgtgtcttttttatgttgcatgttgcttttgttatcagcctgattttttgctcagtatatgatagttctgctgatgttttgtttattgggcagacatatcttcattaagagtttttggaaaactcatcaaattcgatgaatacattttcttcataacccatttggaattattcctaataaaatgataaaatacgtaa

SEQ ID NO: 51196 - DNA, 1131 bp, Homo sapiens
aggtataagttttagtgccatgcgcagacactccattatcttataggagggtgtgagggaagatacaactaactggtagatgaattgagagatgcagtgctgctactttttgcaaacaaacaggatttgccaaatgctatggccatcagtgaaatgacagataaactagggcttcagtctcttcgtaacagaacatggtatgttcaagccacttgtgcaacacaaggaactggtctgtatgaaggacttgactggctgtcaaatgagctttcaaaacgttaaatgaaattggatatctaaccaaggacatgtttgataaaattggtctaggcttgttacaacaaaattagtttgtatcttggttattaaacagtatctgggactggtttgggcagaatattaaacttattttgttgccaattattgtttaccgagtataatgttgctatttagcaatgtgcttggttttaaagaaattctccttgggaaaaaagtatcctcttttaattttacttcccataagcgtaaatgcctggacatagctcttgtgcaacctttaaataaattgttttgagtgttttttgagccccagacaaataatgttttaaagttatccccttgctactttactgatacctttatcattcctgagacagtttgctaatttaaaaatgtagcattccatttgtatttatttctctcccttgccaaaaagattttctaatactgcttgtaccagccagagaaagatccaaaacactactcagctctcttgcactgaggaaatttttccccctacattgactcctggcctacatcagccaaacttaaccttggtggggtttggatttgatagccaattagttctgtgctggttgcaaagaattgatatttagatggtttttaatactcagcagattgtcttcctttatattgtgtcttttttatgttgcatgttgcttttgttatcagcctgattttttgctcagtatatgatagttctgctgatgttttgtttattgggcagacatatcttcattaagagtttttggaaaactcatcaaattcgatgaatacattttcttcataacccatttggaattattcctaataaaatgataaaatacgtaa

SEQ ID NO: 51197 - DNA, 957 bp, Homo sapiens
cgtgtcacttatagctgtctctagaggatccaccgacagcacacaacacaaggaactggtctgtatgaaggacttgactggctgtcaaatgagctttcaaaacgttaaatgaaattggatatctaaccaaggacatgtttgataaaattggtctaggcttgttacaacaaaattagtttgtatcttggttattaaacagtatctgggactggtttgggcagaatattaaacttattttgttgccaattattgtttaccgagtataatgttgctatttagcaatgtgcttggttttaaagaaattctccttgggaaaaaagtatcctcttttaattttacttcccataagcgtaaatgcctggacatagctcttgtgcaacctttaaataaattgttttgagtgttttttgagccccagacaaataatgttttaaagttatccccttgctactttactgatacctttatcattcctgagacagtttgctaatttaaaaatgtagcattccatttgtatttatttctctcccttgccaaaaagattttctaatactgcttgtaccagccagagaaagatccaaaacactactcagctctcttgcactgaggaaatttttccccctacattgactcctggcctacatcagccaaacttaaccttggtggggtttggatttgatagccaattagttctgtgctggttgcaaagaattgatatttagatggtttttaatactcagcagattgtcttcctttatattgtgtcttttttatgttgcatgttgcttttgttatcagcctgattttttgctcagtatatgatagttctgctgatgttttgtttattgggcagacatatcttcattaagagtttttggaaaactcatcaaattcgatgaatacattttcttcataacccatttggaattattcctaataaaatgataaaatacgtaa

SEQ ID NO: 51198 - DNA, 1403 bp, Homo sapiens
tgtagagacagggtttcactctgttgcctggactggcctcaagtgatcctcgtatcatggcctcccaaagtgttggtgtttcaggcacaagccatagcacccggtcctgaaacctaccctttacaagaggtaatgcccctaaaaagggacctaattttattttgactgctaacttcccatttttattcttttttttttttttttaaatgtaaagacaaagtctcaccatgttacccaggctggtctcgaactactaagctcaagtgatcctcccatctccgcctcccaaagtgctgggatttataggtgtgagccaccacgcccagccagaagtagctttaaatatgggagagttttgtgagatgcaagaggtgtgaaaagactcttaagtttgattaagaaagtttaaacactggtgttatatattaactttgttaatcaagtattttcttgtcttctctttacagtggtatgttcaagccacttgtgcaacacaaggaactggtctgtatgaaggacttgactggctgtcaaatgagctttcaaaacgttaaatgaaattggatatctaaccaaggacatgtttgataaaattggtctaggcttgttacaacaaaattagtttgtatcttggttattaaacagtatctgggactggtttgggcagaatattaaacttattttgttgccaattattgtttaccgagtataatgttgctatttagcaatgtgcttggttttaaagaaattctccttgggaaaaaagtatcctcttttaattttacttcccataagcgtaaatgcctggacatagctcttgtgcaacctttaaataaattgttttgagtgttttttgagccccagacaaataatgttttaaagttatccccttgctactttactgatacctttatcattcctgagacagtttgctaatttaaaaatgtagcattccatttgtatttatttctctcccttgccaaaaagattttctaatactgcttgtaccagccagagaaagatccaaaacactactcagctctcttgcactgaggaaatttttccccctacattgactcctggcctacatcagccaaacttaaccttggtggggtttggatttgatagccaattagttctgtgctggttgcaaagaattgatatttagatggtttttaatactcagcagattgtcttcctttatattgtgtcttttttatgttgcatgttgcttttgttatcagcctgattttttgctcagtatatgatagttctgctgatgttttgtttattgggcagacatatcttcattaagagtttttggaaaactcatcaaattcgatgaatacattttcttcataacccatttggaattattcctaataaaatgataaaatacgtaa

SEQ ID NO: 51199 - DNA, 943 bp, Homo sapiens
ccgtttctagaggaccccccggaagcacacaacacaaggaactggtctgtatgaaggacttgactggctgtcaaatgagctttcaaaacgttaaatgaaattggatatctaaccaaggacatgtttgataaaattggtctaggcttgttacaacaaaattagtttgtatcttggttattaaacagtatctgggactggtttgggcagaatattaaacttattttgttgccaattattgtttaccgagtataatgttgctatttagcaatgtgcttggttttaaagaaattctccttgggaaaaaagtatcctcttttaattttacttcccataagcgtaaatgcctggacatagctcttgtgcaacctttaaataaattgttttgagtgttttttgagccccagacaaataatgttttaaagttatccccttgctactttactgatacctttatcattcctgagacagtttgctaatttaaaaatgtagcattccatttgtatttatttctctcccttgccaaaaagattttctaatactgcttgtaccagccagagaaagatccaaaacactactcagctctcttgcactgaggaaatttttccccctacattgactcctggcctacatcagccaaacttaaccttggtggggtttggatttgatagccaattagttctgtgctggttgcaaagaattgatatttagatggtttttaatactcagcagattgtcttcctttatattgtgtcttttttatgttgcatgttgcttttgttatcagcctgattttttgctcagtatatgatagttctgctgatgttttgtttattgggcagacatatcttcattaagagtttttggaaaactcatcaaattcgatgaatacattttcttcataacccatttggaattattcctaataaaatgataaaatacgtaa

SEQ ID NO: 51200 - DNA, 1734 bp, Homo sapiens
agagcctaaaggctagagccggagctgccgcgccagtcgcctagcaggtcctctaccggcttattcctgtgccggatcttcatcggcacaggggccactgagacgtttctgcctccctctttcttcctccgctctttctcttccctctcgtttagtttgcctgggagcttgaaaggagaaagcacggggtcgccccaaaccccttctgcttctgcccatcacaagtgccactaccgccatgggcctcactatctcctccctcttctcccgactatttggcaagaagcagatgcgcattttgatggttggattggatgctgctggcaagacaaccattctgtataaactgaagttaggggagatagtcaccaccattcctaccattggttttaatgtggaaacagtagaatataagaacatttgtttcacagtatgggatgttggtggtcaagatagaattaggcctctctggaagcattacttccagaatacccagggtcttatttttgtggtagatagcaacgatcgtgaaagaattcaggaagtagcagatgagctgcagaaaatgcttctggtagatgaattgagagatgcagtgctgctactttttgcaaacaaacaggatttgccaaatgctatggccatcagtgaaatgacagataaactagggcttcagtctcttcgtaacagaacatggtatgttcaagccacttgtgcaacacaaggaactggtctgtatgaaggacttgactggctgtcaaatgagctttcaaaacgttaaatgaaattggatatctaaccaaggacatgtttgataaaattggtctaggcttgttacaacaaaattagtttgtatcttggttattaaacagtatctgggactggtttgggcagaatattaaacttattttgttgccaattattgtttaccgagtataatgttgctatttagcaatgtgcttggttttaaagaaattctccttgggaaaaaagtatcctcttttaattttacttcccataagcgtaaatgcctggacatagctcttgtgcaacctttaaataaattgttttgagtgttttttgagccccagacaaataatgttttaaagttatccccttgctactttactgatacctttatcattcctgagacagtttgctaatttaaaaatgtagcattccatttgtatttatttctctcccttgccaaaaagattttctaatactgcttgtaccagccagagaaagatccaaaacactactcagctctcttgcactgaggaaatttttccccctacattgactcctggcctacatcagccaaacttaaccttggtggggtttggatttgatagccaattagttctgtgctggttgcaaagaattgatatttagatggtttttaatactcagcagattgtcttcctttatattgtgtcttttttatgttgcatgttgcttttgttatcagcctgattttttgctcagtatatgatagttctgctgatgttttgtttattgggcagacatatcttcattaagagtttttggaaaactcatcaaattcgatgaatacattttcttcataacccatttggaattattcctaataaaatgataaaatacgtaagtaggagaatatggcttaaagacaagacgggggagagcctcgttaattgttcatactattttacttcaccctccatccagtctgacacaatgccaaacttaatc

SEQ ID NO: 51201 - DNA, 1623 bp, Homo sapiens
agagcctaaaggctagagccggagctgccgcgccagtcgcctagcaggtcctctaccggcttattcctgtgccggatcttcatcggcacaggggccactgagacgtttctgcctccctctttcttcctccgctctttctcttccctctcgtttagtttgcctgggagcttgaaaggagaaagcacggggtcgccccaaaccccttctgcttctgcccatcacaagtgccactaccgccatgggcctcactatctcctccctcttctcccgactatttggcaagaagcagatgcgcattttgatggttggattggatgctgctggcaagacaaccattctgtataaactgaagttaggggagatagtcaccaccattcctaccattggttttaatgtggaaacagtagaatataagaacatttgtttcacagtatgggatgttggtggtcaagatagaattaggcctctctggaagcattacttccagaatacccagggtcttatttttgtggtagatagcaacgatcgtgaaagaattcaggaagtagcagatgagctgcagaaaatgcttctggtagatgaattgagagatgcagtgctgctactttttgcaaacaaacaggatttgccaaatgctatggccatcagtgaaatgacagataaactagggcttcagtctcttcgtaacagaacatggtatgttcaagccacttgtgcaacacaaggaactggtctgtatgaaggacttgactggctgtcaaatgagctttcaaaacgttaaatgaaattggatatctaaccaaggacatgtttgataaaattggtctaggcttgttacaacaaaattagtttgtatcttggttattaaacagtatctgggactggtttgggcagaatattaaacttattttgttgccaattattgtttaccgagtataatgttgctatttagcaatgtgcttggttttaaagaaattctccttgggaaaaaagtatcctcttttaattttacttcccataagcgtaaatgcctggacatagctcttgtgcaacctttaaataaattgttttgagtgttttttgagccccagacaaataatgttttaaagttatccccttgctactttactgatacctttatcattcctgagacagtttgctaatttaaaaatgtagcattccatttgtatttatttctctcccttgccaaaaagattttctaatactgcttgtaccagccagagaaagatccaaaacactactcagctctcttgcactgaggaaatttttccccctacattgactcctggcctacatcagccaaacttaaccttggtggggtttggatttgatagccaattagttctgtgctggttgcaaagaattgatatttagatggtttttaatactcagcagattgtcttcctttatattgtgtcttttttatgttgcatgttgcttttgttatcagcctgattttttgctcagtatatgatagttctgctgatgttttgtttattgggcagacatatcttcattaagagtttttggaaaactcatcaaattcgatgaaccttctacctatgcaggtgccatcagtctaaaaaaaaggaatgtatatgc

SEQ ID NO: 51202 - DNA, 1527 bp, Homo sapiens
agagcctaaaggctagagccggagctgccgcgccagtcgcctagcaggtcctctaccggcttattcctgtgccggatcttcatcggcacaggggccactgagacgtttctgcctccctctttcttcctccgctctttctcttccctctcgtttagtttgcctgggagcttgaaaggagaaagcacggggtcgccccaaaccccttctgcttctgcccatcacaagtgccactaccgccatgggcctcactatctcctccctcttctcccgactatttggcaagaagcagatgcgcattttgatggttggattggatgctgctggcaagacaaccattctgtataaactgaagttaggggagatagtcaccaccattcctaccattggttttaatgtggaaacagtagaatataagaacatttgtttcacagtatgggatgttggtggtcaagatagaattaggcctctctggaagcattacttccagaatacccagggtcttatttttgtggtagatagcaacgatcgtgaaagaattcaggaagtagcagatgagctgcagaaaatgcttctggtagatgaattgagagatgcagtgctgctactttttgcaaacaaacaggatttgccaaatgctatggccatcagtgaaatgacagataaactagggcttcagtctcttcgtaacagaacatggtatgttcaagccacttgtgcaacacaaggaactggtctgtatgaaggacttgactggctgtcaaatgagctttcaaaacgttaaatgaaattggatatctaaccaaggacatgtttgataaaattggtctaggcttgttacaacaaaattagtttgtatcttggttattaaacagtatctgggactggtttgggcagaatattaaacttattttgttgccaattattgtttaccgagtataatgttgctatttagcaatgtgcttggttttaaagaaattctccttgggaaaaaagtatcctcttttaattttacttcccataagcgtaaatgcctggacatagctcttgtgcaacctttaaataaattgttttgagtgttttttgagccccagacaaataatgttttaaagttatccccttgctactttactgatacctttatcattcctgagacagtttgctaatttaaaaatgtagcattccatttgtatttatttctctcccttgccaaaaagattttctaatactgcttgtaccagccagagaaagatccaaaacactactcagctctcttgcactgaggaaatttttccccctacattgactcctggcctacatcagccaaacttaaccttggtggggtttggatttgatagccaattagttctgtgctggttgcaaagaattgatatttagatggtttttaatactcagcagattgtcttcctttatattgtgtcttttttatgttgcatgttgcttttgttatcagcctgattttttgctcagtatatgatagttctgatacgtcctgcgggatcctctgaa

SEQ ID NO: 51203 - DNA, 1474 bp, Homo sapiens
agagcctaaaggctagagccggagctgccgcgccagtcgcctagcaggtcctctaccggcttattcctgtgccggatcttcatcggcacaggggccactgagacgtttctgcctccctctttcttcctccgctctttctcttccctctcgtttagtttgcctgggagcttgaaaggagaaagcacggggtcgccccaaaccccttctgcttctgcccatcacaagtgccactaccgccatgggcctcactatctcctccctcttctcccgactatttggcaagaagcagatgcgcattttgatggttggattggatgctgctggcaagacaaccattctgtataaactgaagttaggggagatagtcaccaccattcctaccattggttttaatgtggaaacagtagaatataagaacatttgtttcacagtatgggatgttggtggtcaagatagaattaggcctctctggaagcattacttccagaatacccagggtcttatttttgtggtagatagcaacgatcgtgaaagaattcaggaagtagcagatgagctgcagaaaatgcttctggtagatgaattgagagatgcagtgctgctactttttgcaaacaaacaggatttgccaaatgctatggccatcagtgaaatgacagataaactagggcttcagtctcttcgtaacagaacatggtatgttcaagccacttgtgcaacacaaggaactggtctgtatgaaggacttgactggctgtcaaatgagctttcaaaacgttaaatgaaattggatatctaaccaaggacatgtttgataaaattggtctaggcttgttacaacaaaattagtttgtatcttggttattaaacagtatctgggactggtttgggcagaatattaaacttattttgttgccaattattgtttaccgagtataatgttgctatttagcaatgtgcttggttttaaagaaattctccttgggaaaaaagtatcctcttttaattttacttcccataagcgtaaatgcctggacatagctcttgtgcaacctttaaataaattgttttgagtgttttttgagccccagacaaataatgttttaaagttatccccttgctactttactgatacctttatcattcctgagacagtttgctaatttaaaaatgtagcattccatttgtatttatttctctcccttgccaaaaagattttctaatactgcttgtaccagccagagaaagatccaaaacactactcagctctcttgcactgaggaaatttttccccctacattgactcctggcctacatcagccaaacttaaccttggtggggtttggatttgatagccaattagttctgtgctggttgcaaagaattgatatttagatggtttttaatactcagcagattgtcttcctttatattgtgtcttttttatgtcatatctgccccggattacacgccg

SEQ ID NO: 51204 - DNA, 1490 bp, Homo sapiens
agagcctaaaggctagagccggagctgccgcgccagtcgcctagcaggtcctctaccggcttattcctgtgccggatcttcatcggcacaggggccactgagacgtttctgcctccctctttcttcctccgctctttctcttccctctcgtttagtttgcctgggagcttgaaaggagaaagcacggggtcgccccaaaccccttctgcttctgcccatcacaagtgccactaccgccatgggcctcactatctcctccctcttctcccgactatttggcaagaagcagatgcgcattttgatggttggattggatgctgctggcaagacaaccattctgtataaactgaagttaggggagatagtcaccaccattcctaccattggttttaatgtggaaacagtagaatataagaacatttgtttcacagtatgggatgttggtggtcaagatagaattaggcctctctggaagcattacttccagaatacccagggtcttatttttgtggtagatagcaacgatcgtgaaagaattcaggaagtagcagatgagctgcagaaaatgcttctggtagatgaattgagagatgcagtgctgctactttttgcaaacaaacaggatttgccaaatgctatggccatcagtgaaatgacagataaactagggcttcagtctcttcgtaacagaacatggtatgttcaagccacttgtgcaacacaaggaactggtctgtatgaaggacttgactggctgtcaaatgagctttcaaaacgttaaatgaaattggatatctaaccaaggacatgtttgataaaattggtctaggcttgttacaacaaaattagtttgtatcttggttattaaacagtatctgggactggtttgggcagaatattaaacttattttgttgccaattattgtttaccgagtataatgttgctatttagcaatgtgcttggttttaaagaaattctccttgggaaaaaagtatcctcttttaattttacttcccataagcgtaaatgcctggacatagctcttgtgcaacctttaaataaattgttttgagtgttttttgagccccagacaaataatgttttaaagttatccccttgctactttactgatacctttatcattcctgagacagtttgctaatttaaaaatgtagcattccatttgtatttatttctctcccttgccaaaaagattttctaatactgcttgtaccagccagagaaagatccaaaacactactcagctctcttgcactgaggaaatttttccccctacattgactcctggcctacatcagccaaacttaaccttggtggggtttggatttgatagccaattagttctgtgctggttgcaaagaattgatatttagatggtttttaatactcagcagattgtcttcctttatattgtgtcttttttatgtatcagtggccgcggtttatcctcaggagcagctatgaccat

SEQ ID NO: 51205 - DNA, 511 bp, Homo sapiens
gagaggatcccctcctagagcgcattcctgagacagtttgctaatttaaaaatgtagcattccatttgtatttatttctctcccttgccaaaaagattttctaatactgcttgtaccagccagagaaagatccaaaacactactcagctctcttgcactgaggaaatttttccccctacattgactcctggcctacatcagccaaacttaaccttggtggggtttggatttgatagccaattagttctgtgctggttgcaaagaattgatatttagatggtttttaatactcagcagattgtcttcctttatattgtgtcttttttatgttgcatgttgcttttgttatcagcctgattttttgctcagtatatgatagttctgctgatgttttgtttattgggcagacatatcttcattaagagtttttggaaaactcatcaaattcgatgaatacattttcttcataacccatttggaattattcctaataaaatgataaaatacgtaa

SEQ ID NO: 51206 - DNA, 1191 bp, Homo sapiens
agagcctaaaggctagagccggagctgccgcgccagtcgcctagcaggtcctctaccggcttattcctgtgccggatcttcatcggcacaggggccactgagacgtttctgcctccctctttcttcctccgctctttctcttccctctcgtttagtttgcctgggagcttgaaaggagaaagcacggggtcgccccaaaccccttctgcttctgcccatcacaagtgccactaccgccatgggcctcactatctcctccctcttctcccgactatttggcaagaagcagatgcgcattttgatggttggattggatgctgctggcaagacaaccattctgtataaactgaagttaggggagatagtcaccaccattcctaccattggttttaatgtggaaacagtagaatataagaacatttgtttcacagtatgggatgttggtggtcaagatagaattaggcctctctggaagcattacttccagaatacccagggtcttatttttgtggtagatagcaacgatcgtgaaagaattcaggaagtagcagatgagctgcagaaaatgcttctggtagatgaattgagagatgcagtgctgctactttttgcaaacaaacaggatttgccaaatgctatggccatcagtgaaatgacagataaactagggcttcagtctcttcgtaacagaacatggtatgttcaagccacttgtgcaacacaaggaactggtctgtatgaaggacttgactggctgtcaaatgagctttcaaaacgttaaatgaaattggatatctaaccaaggacatgtttgataaaattggtctaggcttgttacaacaaaattagtttgtatcttggttattaaacagtatctgggactggtttgggcagaatattaaacttattttgttgccaattattgtttaccgagtataatgttgctatttagcaatgtgcttggttttaaagaaattctccttgggaaaaaagtatcctcttttaattttacttcccataagcgtaaatgcctggacatagctcttgtgcaacctttaaataaattgttttgagtgttttttgagccccagacaaataatctttcaccatttattcccttcacacaatatcctattcaccctatcccctactctctaactcttctcaatctatctctctcttcacttctca

SEQ ID NO: 51207 - DNA, 919 bp, Homo sapiens
agagcctaaaggctagagccggagctgccgcgccagtcgcctagcaggtcctctaccggcttattcctgtgccggatcttcatcggcacaggggccactgagacgtttctgcctccctctttcttcctccgctctttctcttccctctcgtttagtttgcctgggagcttgaaaggagaaagcacggggtcgccccaaaccccttctgcttctgcccatcacaagtgccactaccgccatgggcctcactatctcctccctcttctcccgactatttggcaagaagcagatgcgcattttgatggttggattggatgctgctggcaagacaaccattctgtataaactgaagttaggggagatagtcaccaccattcctaccattggttttaatgtggaaacagtagaatataagaacatttgtttcacagtatgggatgttggtggtcaagatagaattaggcctctctggaagcattacttccagaatacccagggtcttatttttgtggtagatagcaacgatcgtgaaagaattcaggaagtagcagatgagctgcagaaaatgcttctggtagatgaattgagagatgcagtgctgctactttttgcaaacaaacaggatttgccaaatgctatggccatcagtgaaatgacagataaactagggcttcagtctcttcgtaacagaacatggtatgttcaagccacttgtgcaacacaaggaactggtctgtatgaaggacttgactggctgtcaaatgagctttcaaaacgttaaatgaaattggatatctaaccaaggacatgtttgataaaattggtctaggcttgttacaacaaaattagtttgtatcttggttattaaacagtatctgggactggtttgggcagaatattaaacttattttgttgccaa

SEQ ID NO: 51208 - DNA, 1409 bp, Homo sapiens
  misc_feature (20)..(20): n is a, c, g, or t
  misc_feature (23)..(23): n is a, c, g, or t
aggatcccctatatgcaagnggnctcactatctcctccctcttctcccgactatttggcaagaagcagatgcgcattttgatggttggattggatgctgctggcaagacaaccattctgtataaactgaagttaggggagatagtcaccaccattcctaccattggttttaatgtggaaacagtagaatataagaacatttgtttcacagtatgggatgttggtggtcaagatagaattaggcctctctggaagcattacttccagaatacccagggtcttatttttgtggtagatagcaacgatcgtgaaagaattcaggaagtagcagatgagctgcagaaaatgcttctggtagatgaattgagagatgcagtgctgctactttttgcaaacaaacaggatttgccaaatgctatggccatcagtgaaatgacagataaactagggcttcagtctcttcgtaacagaacatggtatgttcaagccacttgtgcaacacaaggaactggtctgtatgaaggacttgactggctgtcaaatgagctttcaaaacgttaaatgaaattggatatctaaccaaggacatgtttgataaaattggtctaggcttgttacaacaaaattagtttgtatcttggttattaaacagtatctgggactggtttgggcagaatattaaacttattttgttgccaattattgtttaccgagtataatgttgctatttagcaatgtgcttggttttaaagaaattctccttgggaaaaaagtatcctcttttaattttacttcccataagcgtaaatgcctggacatagctcttgtgcaacctttaaataaattgttttgagtgttttttgagccccagacaaataatgttttaaagttatccccttgctactttactgatacctttatcattcctgagacagtttgctaatttaaaaatgtagcattccatttgtatttatttctctcccttgccaaaaagattttctaatactgcttgtaccagccagagaaagatccaaaacactactcagctctcttgcactgaggaaatttttccccctacattgactcctggcctacatcagccaaacttaaccttggtggggtttggatttgatagccaattagttctgtgctggttgcaaagaattgatatttagatggtttttaatactcagcagattgtcttcctttatattgtgtcttttttatgttgcatgttgcttttgttatcagcctgattttttgctcagtatatgatagttctgctgatgttttgtttattgggcagacatatcttcattaagagtttttggaaaactcatcaaattcgatgaatacattttcttcataacccatttggaattattcctaataaaatgataaaatacgtaa

SEQ ID NO: 51209 - DNA, 1489 bp, Homo sapiens
agagcctaaaggctagagccggagctgccgcgccagtcgcctagcaggtcctctaccggcttattcctgtgccggatcttcatcggcacaggggccactgagacgtttctgcctccctctttcttcctccgctctttctcttccctctcgtttagtttgcctgggagcttgaaaggagaaagcacggggtcgccccaaaccccttctgcttctgcccatcacaagtgccactaccgccatgggcggttttaatgtggaaacagtagaatataagaacatttgtttcacagtatgggatgttggtggtcaagatagaattaggcctctctggaagcattacttccagaatacccagggtcttatttttgtggtagatagcaacgatcgtgaaagaattcaggaagtagcagatgagctgcagaaaatgcttctggtagatgaattgagagatgcagtgctgctactttttgcaaacaaacaggatttgccaaatgctatggccatcagtgaaatgacagataaactagggcttcagtctcttcgtaacagaacatggtatgttcaagccacttgtgcaacacaaggaactggtctgtatgaaggacttgactggctgtcaaatgagctttcaaaacgttaaatgaaattggatatctaaccaaggacatgtttgataaaattggtctaggcttgttacaacaaaattagtttgtatcttggttattaaacagtatctgggactggtttgggcagaatattaaacttattttgttgccaattattgtttaccgagtataatgttgctatttagcaatgtgcttggttttaaagaaattctccttgggaaaaaagtatcctcttttaattttacttcccataagcgtaaatgcctggacatagctcttgtgcaacctttaaataaattgttttgagtgttttttgagccccagacaaataatgttttaaagttatccccttgctactttactgatacctttatcattcctgagacagtttgctaatttaaaaatgtagcattccatttgtatttatttctctcccttgccaaaaagattttctaatactgcttgtaccagccagagaaagatccaaaacactactcagctctcttgcactgaggaaatttttccccctacattgactcctggcctacatcagccaaacttaaccttggtggggtttggatttgatagccaattagttctgtgctggttgcaaagaattgatatttagatggtttttaatactcagcagattgtcttcctttatattgtgtcttttttatgttgcatgttgcttttgttatcagcctgattttttgctcagtatatgatagttctgctgatgttttgtttattgggcagacatatcttcattaagagtttttggaaaactcatcaaattcgatgaatacattttcttcataacccatttggaattattcctaataaaatgataaaatacgtaa

SEQ ID NO: 51210 - DNA, 2018 bp, Homo sapiens
  misc_feature (1653)..(1654): n is a, c, g, or t
  misc_feature (1659)..(1659): n is a, c, g, or t
  misc_feature (1663)..(1663): n is a, c, g, or t
  misc_feature (1665)..(1665): n is a, c, g, or t
  misc_feature (1675)..(1675): n is a, c, g, or t
agagcctaaaggctagagccggagctgccgcgccagtcgcctagcaggtcctctaccggcttattcctgtgccggatcttcatcggcacaggggccactgagacgtttctgcctccctctttcttcctccgctctttctcttccctctcgtttagtttgcctgggagcttgaaaggagaaagcacggggtcgccccaaaccccttctgcttctgcccatcacaagtgccactaccgccatgggcctcactatctcctccctcttctcccgactatttggcaagaagcagatgcgcattttgatggttggattggatgctgctggcaagacaaccattctgtataaactgaagttaggggagatagtcaccaccattcctaccattggttttaatgtggaaacagtagaatataagaacatttgtttcacagtatgggatgttggtggtcaagatagaattaggcctctctggaagcattacttccagaatacccagggtcttatttttgtggtagatagcaacgatcgtgaaagaattcaggaagtagcagatgagctgcagaaaatgcttctggtagatgaattgagagatgcagtgctgctactttttgcaaacaaacaggatttgccaaatgctatggccatcagtgaaatgacagataaactagggcttcagtctcttcgtaacagaacatggtatgttcaagccacttgtgcaacacaaggaactggtctgtatgaaggacttgactggctgtcaaatgagctttcaaaacgttaaatgaaattggatatctaaccaaggacatgtttgataaaattggtctaggcttgttacaacaaaattagtttgtatcttggttattaaacagtatctgggactggtttgggcagaatattaaacttattttgttgccaattattgtttaccgagtataatgttgctatttagcaatgtgcttggttttaaagaaattctccttgggaaaaaagtatcctcttttaattttacttcccataagcgtaaatgcctggacatagctcttgtgcaacctttaaataaattgttttgagtgttttttgagccccagacaaataatgttttaaagttatccccttgctactttactgatacctttatcattcctgagacagtttgctaatttaaaaatgtagcattccatttgtatttatttctctcccttgccaaaaagattttctaatactgcttgtaccagccagagaaagatccaaaacactactcagctctcttgcactgaggaaatttttccccctacattgactcctggcctacatcagccaaacttaaccttggtggggtttggatttgatagccaattagttctgtgctggttgcaaagaattgatatttagatggtttttaatactcagcagattgtcttcctttatattgtgtcttttttatgttgcatgttgcttttgttatcagcctgattttttgctcagtatatgatagttctgctgatgttttgtttattgggcagacatatcttcattaagagtttttggaaaactcatcaaattcgatgaatacattttcttcataacccatttggaattattcctaataaaatgataaaatacgtaacaaaaacacaacaacaacaaaannaacanacananaaacaacacnacaacacgaaacaacagaggagagggggcgcgcgcgcgcctctacgagagatattctcctctcgggggggggcgccccccagatcttgagcggcgtcccacaccaggttttcctcgtcgcgaacacaacgggcggggcgcccctagacaaagagagagcgccgagaaataataaaagcggcggagccgcgcggcgccacgagagtacaaacacaacagcgcgcacacggggagcaaaccctgccaacacctgggaaggccctctcgggacgaagagcggaacccctataacagtacgggagagggggcggaccaaaatcttggcggcaacacaacttagccag

SEQ ID NO: 51211 - DNA, 1646 bp, Homo sapiens
agagcctaaaggctagagccggagctgccgcgccagtcgcctagcaggtcctctaccggcttattcctgtgccggatcttcatcggcacaggggccactgagacgtttctgcctccctctttcttcctccgctctttctcttccctctcgtttagtttgcctgggagcttgaaaggagaaagcacggggtcgccccaaaccccttctgcttctgcccatcacaagtgccactaccgccatgggcctcactatctcctccctcttctcccgactatttggcaagaagcagatgcgcattttgatggttggattggatgctgctggcaagacaaccattctgtataaactgaagttaggggagatagtcaccaccattcctaccattggttttaatgtggaaacagtagaatataagaacatttgtttcacagtatgggatgttggtggtcaagatagaattaggcctctctggaagcattacttccagaatacccagggtcttatttttgtggtagatagcaacgatcgtgaaagaattcaggaagtagcagatgagctgcagaaaatgcttctggtagatgaattgagagatgcagtgctgctactttttgcaaacaaacaggatttgccaaatgctatggccatcagtgaaatgacagataaactagggcttcagtctcttcgtaacagaacatggtatgttcaagccacttgtgcaacacaaggaactggtctgtatgaaggacttgactggctgtcaaatgagctttcaaaacgttaaatgaaattggatatctaaccaaggacatgtttgataaaattggtctaggcttgttacaacaaaattagtttgtatcttggttattaaacagtatctgggactggtttgggcagaatattaaacttattttgttgccaattattgtttaccgagtataatgttgctatttagcaatgtgcttggttttaaagaaattctccttgggaaaaaagtatcctcttttaattttacttcccataagcgtaaatgcctggacatagctcttgtgcaacctttaaataaattgttttgagtgttttttgagccccagacaaataatgttttaaagttatccccttgctactttactgatacctttatcattcctgagacagtttgctaatttaaaaatgtagcattccatttgtatttatttctctcccttgccaaaaagattttctaatactgcttgtaccagccagagaaagatccaaaacactactcagctctcttgcactgaggaaatttttccccctacattgactcctggcctacatcagccaaacttaaccttggtggggtttggatttgatagccaattagttctgtgctggttgcaaagaattgatatttagatggtttttaatactcagcagattgtcttcctttatattgtgtcttttttatgttgcatgttgcttttgttatcagcctgattttttgctcagtatatgatagttctgctgatgttttgtttattgggcagacatatcttcattaagagtttttggaaaactcatcaaattcgatgaacgactcgtgggaagcctgttctgcatcctgctgcgcttgtggaagcgtttttcctgcttaactcttgcatgct

SEQ ID NO: 51212 - DNA, 1494 bp, Homo sapiens
  misc_feature (1489)..(1489): n is a, c, g, or t
agagcctaaaggctagagccggagctgccgcgccagtcgcctagcaggtcctctaccggcttattcctgtgccggatcttcatcggcacaggggccactgagacgtttctgcctccctctttcttcctccgctctttctcttccctctcgtttagtttgcctgggagcttgaaaggagaaagcacggggtcgccccaaaccccttctgcttctgcccatcacaagtgccactaccgccatgggcctcactatctcctccctcttctcccgactatttggcaagaagcagatgcgcattttgatggttggattggatgctgctggcaagacaaccattctgtataaactgaagttaggggagatagtcaccaccattcctaccattggttttaatgtggaaacagtagaatataagaacatttgtttcacagtatgggatgttggtggtcaagatagaattaggcctctctggaagcattacttccagaatacccagggtcttatttttgtggtagatagcaacgatcgtgaaagaattcaggaagtagcagatgagctgcagaaaatgcttctggtagatgaattgagagatgcagtgctgctactttttgcaaacaaacaggatttgccaaatgctatggccatcagtgaaatgacagataaactagggcttcagtctcttcgtaacagaacatggtatgttcaagccacttgtgcaacacaaggaactggtctgtatgaaggacttgactggctgtcaaatgagctttcaaaacgttaaatgaaattggatatctaaccaaggacatgtttgataaaattggtctaggcttgttacaacaaaattagtttgtatcttggttattaaacagtatctgggactggtttgggcagaatattaaacttattttgttgccaattattgtttaccgagtataatgttgctatttagcaatgtgcttggttttaaagaaattctccttgggaaaaaagtatcctcttttaattttacttcccataagcgtaaatgcctggacatagctcttgtgcaacctttaaataaattgttttgagtgttttttgagccccagacaaataatgttttaaagttatccccttgctactttactgatacctttatcattcctgagacagtttgctaatttaaaaatgtagcattccatttgtatttatttctctcccttgccaaaaagattttctaatactgcttgtaccagccagagaaagatccaaaacactactcagctctcttgcactgaggaaatttttccccctacattgactcctggcctacatcagccaaacttaaccttggtggggtttggatttgatagccaattagttctgtgctggttgcaaagaattgatatttagatggtttttaatactcagcagattgtcttcctttatattgtgtcttttttatgtcagtgtgctgtcggtggatcctcaagagtcagctatgaanatgtc

SEQ ID NO: 51213 - DNA, 1485 bp, Homo sapiens
agagcctaaaggctagagccggagctgccgcgccagtcgcctagcaggtcctctaccggcttattcctgtgccggatcttcatcggcacaggggccactgagacgtttctgcctccctctttcttcctccgctctttctcttccctctcgtttagtttgcctgggagcttgaaaggagaaagcacggggtcgccccaaaccccttctgcttctgcccatcacaagtgccactaccgccatgggcctcactatctcctccctcttctcccgactatttggcaagaagcagatgcgcattttgatggttggattggatgctgctggcaagacaaccattctgtataaactgaagttaggggagatagtcaccaccattcctaccattggttttaatgtggaaacagtagaatataagaacatttgtttcacagtatgggatgttggtggtcaagatagaattaggcctctctggaagcattacttccagaatacccagggtcttatttttgtggtagatagcaacgatcgtgaaagaattcaggaagtagcagatgagctgcagaaaatgcttctggtagatgaattgagagatgcagtgctgctactttttgcaaacaaacaggatttgccaaatgctatggccatcagtgaaatgacagataaactagggcttcagtctcttcgtaacagaacatggtatgttcaagccacttgtgcaacacaaggaactggtctgtatgaaggacttgactggctgtcaaatgagctttcaaaacgttaaatgaaattggatatctaaccaaggacatgtttgataaaattggtctaggcttgttacaacaaaattagtttgtatcttggttattaaacagtatctgggactggtttgggcagaatattaaacttattttgttgccaattattgtttaccgagtataatgttgctatttagcaatgtgcttggttttaaagaaattctccttgggaaaaaagtatcctcttttaattttacttcccataagcgtaaatgcctggacatagctcttgtgcaacctttaaataaattgttttgagtgttttttgagccccagacaaataatgttttaaagttatccccttgctactttactgatacctttatcattcctgagacagtttgctaatttaaaaatgtagcattccatttgtatttatttctctcccttgccaaaaagattttctaatactgcttgtaccagccagagaaagatccaaaacactactcagctctcttgcactgaggaaatttttccccctacattgactcctggcctacatcagccaaacttaaccttggtggggtttggatttgatagccaattagttctgtgctggttgcaaagaattgatatttagatggtttttaatactcagcagccgccttcctcctatatgagccttttcttcactggttcctgtttcctccgcctccgtatcctctgaccg

SEQ ID NO: 51214 - DNA, 940 bp, Homo sapiens
agagcctaaaggctagagccggagctgccgcgccagtcgcctagcaggtcctctaccggcttattcctgtgccggatcttcatcggcacaggggccactgagacgtttctgcctccctctttcttcctccgctctttctcttccctctcgtttagtttgcctgggagcttgaaaggagaaagcacggggtcgccccaaaccccttctgcttctgcccatcacaagtgccactaccgccatgggcctcactatctcctccctcttctcccgactatttggcaagaagcagatgcgcattttgatggttggattggatgctgctggcaagacaaccattctgtataaactgaagttaggggagatagtcaccaccattcctaccattggttttaatgtggaaacagtagaatataagaacatttgtttcacagtatgggatgttggtggtcaagatagaattaggcctctctggaagcattacttccagaatacccagggtcttatttttgtggtagatagcaacgatcgtgaaagaattcaggaagtagcagatgagctgcagaaaatgcttctggtagatgaattgagagatgcagtgctgctactttttgcaaacaaacaggatttgccaaatgctatggccatcagtgaaatgacagataaactagggcttcagtctcttcgtaacagaacatggtatgttcaagccacttgtgcaacacaaggaactggtctgtatgaaggacttgactggctgtcaaatgagctttcaaaacgttaaatgaaattggatatctaaccaaggacatgtttgataaaattggtctaggcttgttacaacaaaattagtttgtatcttggttattaaacagtatctgggactggtttgggcagaatattaaacttattttgttgccaaaaaaaaaaaaggggagaaggg

SEQ ID NO: 51215 - DNA, 107 bp, Homo sapiens
tctgtgggccaggtgcagtggctcacacctgtgatcccagcactttgagagggtcaagacaggcagtttgatagcagcctgggcaagatggcgaaaccttgtctcca

SEQ ID NO: 51216 - DNA, 1094 bp, Homo sapiens
ctgcccacaggaaaggttgtaacacactgcagggcccagccaccaggtgatatgtctctcctgcatgtgcataactttcaggagaaaattgtaacatgccactggttgaaaacccagatgatgtgactctcctgccttttcacagccctcagggaaaaaaattacatatcatttgcccagcatccaggtaatgtcactctcctgggtggtttgtgccaacaagttggttggtaacatatatctcggcccagctcacaggtttgatggtgactctaatacctcctaccagccaatagaagagacactgtctctcacaggtaggcttagaaagaggagtaaaattcctggctgggtgtggcggctcacgcctataatcccagcacttcaagaggtagaggtggacggatcacctgatgtcgggagttcaagaccagcctgaccaacatggaaaaaccctgtctctactaaaaatacaaaaaattagccaggtatagtggcacgtgcctgtaatcccagctactcgggaggctgaggcaggagaatcgcttgaacccaggaggtggaggttgtggtgagctgagatcacaccgttgcactccagtctgggcaacaagagtgaaactctgtctcacaaaaaaaaaaaaaaagaaaaagaaaaaggagtaaaatcctggtggtctctctgtatgaaggttatagagaattaccactctcttgtatattgtgtaaagcacttggatggtacagagcatgtcttctgtaccataggacccagcaaacaggttagatcatgtttcatgtaagcacatcctgccagtttttaggattgtcatcctcacacatgaaagagcccactgactgatgaggtcataattctcatggatggatgcagtccatacttaaaattgtgactatcttatgtgaacatgtggccacacttgagatggtgaatcatttctaaacccagctcatagtggtgaggactctcctctctggacccagctaattggagagatgttaaatgtcatacctagacttgggaccacattagatcatgtgttcagagcaggttgcaactctcaggcacaccatat

SEQ ID NO: 51217 - DNA, 1238 bp, Homo sapiens
caatcttgttacacatcaacggatacacacgggagagaagccttatcagtgcaaggagtgtgggaaaagcttcagtcaacgaggtagtctcgctgtccacgagagactccacactggacagaaaccctacgagtgtgctatttgtcagagaagcttcaggaatcagagtaaccttgctgttcacaggagagttcacagtggtgagaagccctgctggagaaggcatacgccaagatcaacggatgctatgaagcactatcagggggtgccaccactgagggcttcgaagacttcaccggaggcattgctgagtggtatgagttgaagaagccccctcccaacctgttcaagatcatccagaaagctctgcaaaaaggctctctccttggctgctccatcgacatcaccagcgccgcggactcggaggccatcacgtttcagaagctggtgaaggggcacgcgtactcggtcaccggagccgaggaggttgaaagtaacggaagcctacagaaactgatccgcatccgaaatccctggggagaagtggagtggacagggcggtggaatgacaactgcccaagctggaacactatagacccagaggagagggaaaggctgaccagacggcatgaagatggagaattctggatgtctttcagtgacttcctgaggcactattcccgcctggagatctgtaacctgaccccagacactctcaccagcgatacctacaagaagtggaaactcaccaaaatggatgggaactggaggcggggctccaccgcgggaggttgcaggaactacccgaacacattctggatgaaccctcagtacctgatcaagctggaggaggaggatgaggacgaggaggatggggagagcggctgcaccttcctggtggggctcattcagaagcaccgacggcggcagaggaagatgggcgaggacatgcacaccatcggctttggcatctatgaggttccagaggaggttccagaggaggtacgtctggcccatgtcccggggtgctcaggtcaccaaaaaagcgagaggcttagactgctggagctcagggagcgtcgtgaagcccgggcaggggctggtggtcatgaaggatgagtcctggccacccctggggccctgctgaagttgcccaggctctagatcccactggtctaagctctgggcaaggtttctggaaagtccttgtgggacccgctgcctccctgtgacctggc

SEQ ID NO: 51218 - DNA, 639 bp, Homo sapiens
taatagttatgactgtaatatttatgctgtaatagttaatgctgtaatagtttatacagcataaactattctattcaagatatttaagcagctggatcccgagaatactggaacaatagagctcgaccttatctcttggctctgtttctcagtactttgaagttataactaatctgcctgaagacttctcatgatggaaaatcagccaaggactaagcttccatagaaatacactttgtatctggacctcaaaattatgggaacatttacttaaacggatgatcatagctgaaaataatgatactgtcaatttgagatagcagaagtttcacacatcaaagtaaaagatttgcatatcattatactaaatgcaaatgagtcgcttaacccttgacaaggtcaaagaaagctttaaatctgtaaatagtatacactattgtctttggatatactacagcataaactattgaggagtatcctgaggcatgggggtcaggggtatactacagcataaactattggttacatataaaattttgttacatgtatataatgcgtagtgatcaagtcagagtgtatagggtgtaccacacccaagtacaatatatgttagataagataatcaacctaatctgcgat

SEQ ID NO: 51219 - DNA, 338 bp, Homo sapiens
agaatgtgttcgggtagttcctgcaacctcccgcggtggagccccgcctccagttcccatcggcttggcatctatgaggttccagaggaggttccagaggaggtacgtctggcccatgtcccggggtgctcaggtcaccaaaaaagcgagaggcttagactgctggagctcagggagcgtcgtgaagcccgggcaggggctggtggtcatgaaggatgagtcctggccacccctggggccctgctgaagttgcccaggctctagatcccactggtctaagctctgggcaaggtttctggaaagtccttgtgggacccgctgcctccctgtgacctggc

SEQ ID NO: 51220 - DNA, 144 bp, Homo sapiens
cctctcagaagcctccaagcctgagaccagggccaccccccacccccatgcattcctgctcagggctgggctcctctgcccctttctggctgcagacacattctgagagggatggagataaagggagatggtggcaggtggtgg

SEQ ID NO: 51221 - DNA, 3334 bp, Homo sapiens
gcggcgttcccggcgctcggcaggccgcaggatggcctggtcccgggccgggagcccagcaggccgggagcggctgaggccacaccccgcgggccgggccgcttccctccggtgaatcatcgctcgcagcggcggcgcccgcagtggccgcagcagcgcgccgggccctggccgcgccccagccgagcgcagcgcggagtcgccccgacctttctctgcgcagtacggccgccgggaccgcagcatggcgggcatcgcggccaagctggcgaaggaccgggaggcggccgaggggctgggctcccacgagagggccatcaagtacctcaaccaggactacgaggcgctgcggaacgagtgcctggaggccgggacgctcttccaggacccgtccttcccggccatcccctcggccctgggcttcaaggagttggggccctactccagcaaaacccggggcatcgagtggaagcgccccacggagatctgcgctgacccccagtttatcattggaggagccacccgcacagacatctgccaaggagccctaggtgactgctggctgctggcagccattgcctccctcaccttgaatgaagaaatcctggctcgagtcgtccccctaaaccagagcttccaggaaaactatgcagggatctttcacttccagttctggcaatacggcgagtgggtggaggtggtggtggatgacaggctgcccaccaaggacggggagctgctctttgtgcattcagccgaagggagcgagttctggagcgccctgctggagaaggcatacgccaagatcaacggatgctatgaagcactatcagggggtgccaccactgagggcttcgaagacttcaccggaggcattgctgagtggtatgagttgaagaagccccctcccaacctgttcaagatcatccagaaagctctgcaaaaaggctctctccttggctgctccatcgacatcaccagcgccgcggactcggaggccatcacgtttcagaagctggtgaaggggcacgcgtactcggtcaccggagccgaggaggttgaaagtaacggaagcctacagaaactgatccgcatccgaaatccctggggagaagtggagtggacagggcggtggaatgacaactgcccaagctggaacactatagacccagaggagagggaaaggctgaccagacggcatgaagatggagaattctggatgtctttcagtgacttcctgaggcactattcccgcctggagatctgtaacctgaccccagacactctcaccagcgatacctacaagaagtggaaactcaccaaaatggatgggaactggaggcggggctccaccgcgggaggttgcaggaactacccgaacacattctggatgaaccctcagtacctgatcaagctggaggaggaggatgaggacgaggaggatggggagagcggctgcaccttcctggtggggctcattcagaagcaccgacggcggcagaggaagatgggcgaggacatgcacaccatcggctttggcatctatgaggttccagaggagttaagtgggcagaccaacatccacctcagcaaaaacttcttcctgacgaatcgcgccagggagcgctcagacaccttcatcaacctccgggaggtgctcaaccgcttcaagctgccgccaggagagtacattctcgtgccttccaccttcgaacccaacaaggatggggatttctgcatccgggtcttttctgaaaagaaagctgactaccaagctgtcgatgatgaaatcgaggccaatcttgaagagttcgacatcagcgaggatgacattgatgatggattcaggagactgtttgcccagttggcaggagaggatgcggagatctctgcctttgagctgcagaccatcctgagaagggttctagcaaagcgccaagatatcaagtcagatggcttcagcatcgagacatgcaaaattatggttgacatgctagattcggacgggagtggcaagctggggctgaaggagttctacattctctggacgaagattcaaaaataccaaaaaatttaccgagaaatcgacgttgacaggtctggtaccatgaattcctatgaaatgcggaaggcattagaagaagcaggtttcaagatgccctgtcaactccaccaagtcatcgttgctcggtttgcagatgaccagctcatcatcgattttgataattttgttcggtgtttggttcggctggaaacgctattcaagatatttaagcagctggatcccgagaatactggaacaatagagctcgaccttatctcttggctctgtttctcagtactttgaagttataactaatctgcctgaagacttctcatgatggaaaatcagccaaggactaagcttccatagaaatacactttgtatctggacctcaaaattatgggaacatttacttaaacggatgatcatagctgaaaataatgatactgtcaatttgagatagcagaagtttcacacatcaaagtaaaagatttgcatatcattatactaaatgcaaatgagtcgcttaacccttgacaaggtcaaagaaagctttaaatctgtaaatagtatacactttttacttttacacactttcctgttcatagcaatattaaatcaggaaaaaaaaatgcagggaggtatttaacagctgagcaaaaacattgagtcgctctcaaaggacacgaggcccttggcagggaatatttaaagcaacttcaagtttaaaatgcagctgttgattctaccaaacaacagtccaagattaccatttcccatgagccaactgggaaacatggtatatcatgaagtaatcttgtcaaggcatctggagagtccaggagagaagactcacctctgtcgcttgggttaaacaagagacaggttttgtagaatattgattggtaatagtaaatcgttctccttacaatcaagttcttgaccctattcggccttatacatctggtcttacaaagaccaaagggatcctgcgcttgatcaactgaaccagtatgccaaaaccaggcatccaatttgtaaaccaattatgataaaggacaaaataagctgtttgccacctcaaaactttatgaacttcaccaccactagtgtctgtccatggagttagaggggacatcacttagaagttcttatagaaaggacacaagtttgtttcctggctttaccttgggaaaatgctagcaacattatagaaattttgccttgttgccttatcttcttccaaatgtactgttaaataaaaataaagggttaccccatgcaatcaca

SEQ ID NO: 51222 - DNA, 3341 bp, Homo sapiens
gctcccgtgttatttctacagggcatgcgttgatttactgtgatctccggcctcggtatgtcccagcaggccgggagcggctgaggccacaccccgcgggccgggccgcttccctccggtgaatcatcgctcgcagcggcggcgcccgcagtggccgcagcagcgcgccgggccctggccgcgccccagccgagcgcagcgcggagtcgccccgacctttctctgcgcagtacggccgccgggaccgcagcatggcgggcatcgcggccaagctggcgaaggaccgggaggcggccgaggggctgggctcccacgagagggccatcaagtacctcaaccaggactacgaggcgctgcggaacgagtgcctggaggccgggacgctcttccaggacccgtccttcccggccatcccctcggccctgggcttcaaggagttggggccctactccagcaaaacccggggcatcgagtggaagcgccccacggagatctgcgctgacccccagtttatcattggaggagccacccgcacagacatctgccaaggagccctaggtgactgctggctgctggcagccattgcctccctcaccttgaatgaagaaatcctggctcgagtcgtccccctaaaccagagcttccaggaaaactatgcagggatctttcacttccagttctggcaatacggcgagtgggtggaggtggtggtggatgacaggctgcccaccaaggacggggagctgctctttgtgcattcagccgaagggagcgagttctggagcgccctgctggagaaggcatacgccaagatcaacggatgctatgaagcactatcagggggtgccaccactgagggcttcgaagacttcaccggaggcattgctgagtggtatgagttgaagaagccccctcccaacctgttcaagatcatccagaaagctctgcaaaaaggctctctccttggctgctccatcgacatcaccagcgccgcggactcggaggccatcacgtttcagaagctggtgaaggggcacgcgtactcggtcaccggagccgaggaggttgaaagtaacggaagcctacagaaactgatccgcatccgaaatccctggggagaagtggagtggacagggcggtggaatgacaactgcccaagctggaacactatagacccagaggagagggaaaggctgaccagacggcatgaagatggagaattctggatgtctttcagtgacttcctgaggcactattcccgcctggagatctgtaacctgaccccagacactctcaccagcgatacctacaagaagtggaaactcaccaaaatggatgggaactggaggcggggctccaccgcgggaggttgcaggaactacccgaacacattctggatgaaccctcagtacctgatcaagctggaggaggaggatgaggacgaggaggatggggagagcggctgcaccttcctggtggggctcattcagaagcaccgacggcggcagaggaagatgggcgaggacatgcacaccatcggctttggcatctatgaggttccagaggagttaagtgggcagaccaacatccacctcagcaaaaacttcttcctgacgaatcgcgccagggagcgctcagacaccttcatcaacctccgggaggtgctcaaccgcttcaagctgccgccaggagagtacattctcgtgccttccaccttcgaacccaacaaggatggggatttctgcatccgggtcttttctgaaaagaaagctgactaccaagctgtcgatgatgaaatcgaggccaatcttgaagagttcgacatcagcgaggatgacattgatgatggattcaggagactgtttgcccagttggcaggagaggatgcggagatctctgcctttgagctgcagaccatcctgagaagggttctagcaaagcgccaagatatcaagtcagatggcttcagcatcgagacatgcaaaattatggttgacatgctagattcggacgggagtggcaagctggggctgaaggagttctacattctctggacgaagattcaaaaataccaaaaaatttaccgagaaatcgacgttgacaggtctggtaccatgaattcctatgaaatgcggaaggcattagaagaagcaggtttcaagatgccctgtcaactccaccaagtcatcgttgctcggtttgcagatgaccagctcatcatcgattttgataattttgttcggtgtttggttcggctggaaacgctattcaagatatttaagcagctggatcccgagaatactggaacaatagagctcgaccttatctcttggctctgtttctcagtactttgaagttataactaatctgcctgaagacttctcatgatggaaaatcagccaaggactaagcttccatagaaatacactttgtatctggacctcaaaattatgggaacatttacttaaacggatgatcatagctgaaaataatgatactgtcaatttgagatagcagaagtttcacacatcaaagtaaaagatttgcatatcattatactaaatgcaaatgagtcgcttaacccttgacaaggtcaaagaaagctttaaatctgtaaatagtatacactttttacttttacacactttcctgttcatagcaatattaaatcaggaaaaaaaaatgcagggaggtatttaacagctgagcaaaaacattgagtcgctctcaaaggacacgaggcccttggcagggaatatttaaagcaacttcaagtttaaaatgcagctgttgattctaccaaacaacagtccaagattaccatttcccatgagccaactgggaaacatggtatatcatgaagtaatcttgtcaaggcatctggagagtccaggagagaagactcacctctgtcgcttgggttaaacaagagacaggttttgtagaatattgattggtaatagtaaatcgttctccttacaatcaagttcttgaccctattcggccttatacatctggtcttacaaagaccaaagggatcctgcgcttgatcaactgaaccagtatgccaaaaccaggcatccaatttgtaaaccaattatgataaaggacaaaataagctgtttgccacctcaaaactttatgaacttcaccaccactagtgtctgtccatggagttagaggggacatcacttagaagttcttatagaaaggacacaagtttgtttcctggctttaccttgggaaaatgctagcaacattatagaaattttgccttgttgccttatcttcttccaaatgtactgttaaataaaaataaagggttaccccatgcaatcaca

SEQ ID NO: 51223 - DNA, 3870 bp, Homo sapiens
gcggcgttcccggcgctcggcaggccgcaggatggcctggtcccgggccgggagcccagcaggccgggagcggctgaggccacaccccgcgggccgggccgcttccctccggtgaatcatcgctcgcagcggcggcgcccgcagtggccgcagcagcgcgccgggccctggccgcgccccagccgagcgcagcgcggagtcgccccgacctttctctgcgcagtacggccgccgggaccgcagcatggcgggcatcgcggccaagctggcgaaggaccgggaggcggccgaggggctgggctcccacgagagggccatcaagtacctcaaccaggactacgaggcgctgcggaacgagtgcctggaggccgggacgctcttccaggacccgtccttcccggccatcccctcggccctgggcttcaaggagttggggccctactccagcaaaacccggggcatcgagtggaagcgccccacggagatctgcgctgacccccagtttatcattggaggagccacccgcacagacatctgccaaggagccctaggtgactgctggctgctggcagccattgcctccctcaccttgaatgaagaaatcctggctcgagtcgtccccctaaaccagagcttccaggaaaactatgcagggatctttcacttccagttctggcaatacggcgagtgggtggaggtggtggtggatgacaggctgcccaccaaggacggggagctgctctttgtgcattcagccgaagggagcgagttctggagcgccctgctggagaaggcatacgccaagatcaacggatgctatgaagcactatcagggggtgccaccactgagggcttcgaagacttcaccggaggcattgctgagtggtatgagttgaagaagccccctcccaacctgttcaagatcatccagaaagctctgcaaaaaggctctctccttggctgctccatcgacatcaccagcgccgcggactcggaggccatcacgtttcagaagctggtgaaggggcacgcgtactcggtcaccggagccgaggaggttgaaagtaacggaagcctacagaaactgatccgcatccgaaatccctggggagaagtggagtggacagggcggtggaatgacaactgcccaagctggaacactatagacccagaggagagggaaaggctgaccagacggcatgaagatggagaattctggatgtctttcagtgacttcctgaggcactattcccgcctggagatctgtaacctgaccccagacactctcaccagcgatacctacaagaagtggaaactcaccaaaatggatgggaactggaggcggggctccaccgcgggaggttgcaggaactacccgaacacattctggatgaaccctcagtacctgatcaagctggaggaggaggatgaggacgaggaggatggggagagcggctgcaccttcctggtggggctcattcagaagcaccgacggcggcagaggaagatgggcgaggacatgcacaccatcggctttggcatctatgaggttccagaggagttaagtgggcagaccaacatccacctcagcaaaaacttcttcctgacgaatcgcgccagggagcgctcagacaccttcatcaacctccgggaggtgctcaaccgcttcaagctgccgccaggagagtacattctcgtgccttccaccttcgaacccaacaaggatggggatttctgcatccgggtcttttctgaaaagaaagctgactaccaagctgtcgatgatgaaatcgaggccaatcttgaagagttcgacatcagcgaggatgacattgatgatggattcaggagactgtttgcccagttggcaggagaggatgcggagatctctgcctttgagctgcagaccatcctgagaagggttctagcaaagcgccaagatatcaagtcagatggcttcagcatcgagacatgcaaaattatggttgacatgctagattcggacgggagtggcaagctggggctgaaggagttctacattctctggacgaagattcaaaaataccaagtaagatcccagagatgcgggtggatctgtgttgggaaacattctgttcatatgctttaagatgcagcaactcctgcacagagtggagaaacatttccaaggggattgggattttacccataatgaagctcagagtgagtaaagatggggctgaggaaatgcaaacaaaaaaccaaccaggacttcgcaggtgaaatggcctattcccttcctcctgattattgggatcatctaaaggccaccatcaagggtttcctgaaaagggtttttgacagctaaagtacaaaaattatataagacaagaacatggacctatgggcgttggctggctgatttgatgggcatatttacaaaccagtcacagacagaagcaaaatactattagttatttaaggcagaaacataagtgattcttccacggccaaactagaggcacagagctggaaaaacttcatccccactcagcacatactagggaggtaacttgccagctttgctttgggtcatagttcttacagctaacttatgtgttccagaaaatttaccgagaaatcgacgttgacaggtctggtaccatgaattcctatgaaatgcggaaggcattagaagaagcaggtttcaagatgccctgtcaactccaccaagtcatcgttgctcggtttgcagatgaccagctcatcatcgattttgataattttgttcggtgtttggttcggctggaaacgctattcaagatatttaagcagctggatcccgagaatactggaacaatagagctcgaccttatctcttggctctgtttctcagtactttgaagttataactaatctgcctgaagacttctcatgatggaaaatcagccaaggactaagcttccatagaaatacactttgtatctggacctcaaaattatgggaacatttacttaaacggatgatcatagctgaaaataatgatactgtcaatttgagatagcagaagtttcacacatcaaagtaaaagatttgcatatcattatactaaatgcaaatgagtcgcttaacccttgacaaggtcaaagaaagctttaaatctgtaaatagtatacactttttacttttacacactttcctgttcatagcaatattaaatcaggaaaaaaaaatgcagggaggtatttaacagctgagcaaaaacattgagtcgctctcaaaggacacgaggcccttggcagggaatatttaaagcaacttcaagtttaaaatgcagctgttgattctaccaaacaacagtccaagattaccatttcccatgagccaactgggaaacatggtatatcatgaagtaatcttgtcaaggcatctggagagtccaggagagaagactcacctctgtcgcttgggttaaacaagagacaggttttgtagaatattgattggtaatagtaaatcgttctccttacaatcaagttcttgaccctattcggccttatacatctggtcttacaaagaccaaagggatcctgcgcttgatcaactgaaccagtatgccaaaaccaggcatccaatttgtaaaccaattatgataaaggacaaaataagctgtttgccacctcaaaactttatgaacttcaccaccactagtgtctgtccatggagttagaggggacatcacttagaagttcttatagaaaggacacaagtttgtttcctggctttaccttgggaaaatgctagcaacattatagaaattttgccttgttgccttatcttcttccaaatgtactgttaaataaaaataaagggttaccccatgcaatcaca

SEQ ID NO: 51224 - DNA, 3512 bp, Homo sapiens
gcggcgttcccggcgctcggcaggccgcaggatggcctggtcccgggccgggagcccagcaggccgggagcggctgaggccacaccccgcgggccgggccgcttccctccggtgaatcatcgctcgcagcggcggcgcccgcagtggccgcagcagcgcgccgggccctggccgcgccccagccgagcgcagcgcggagtcgccccgacctttctctgcgcagtacggccgccgggaccgcagcatggcgggcatcgcggccaagctggcgaaggaccgggaggcggccgaggggctgggctcccacgagagggccatcaagtacctcaaccaggactacgaggcgctgcggaacgagtgcctggaggccgggacgctcttccaggacccgtccttcccggccatcccctcggccctgggcttcaaggagttggggccctactccagcaaaacccggggcatcgagtggaagcgccccacggagatctgcgctgacccccagtttatcattggaggagccacccgcacagacatctgccaaggagccctaggtgactgctggctgctggcagccattgcctccctcaccttgaatgaagaaatcctggctcgagtcgtccccctaaaccagagcttccaggaaaactatgcagggatctttcacttccagttctggcaatacggcgagtgggtggaggtggtggtggatgacaggctgcccaccaaggacggggagctgctctttgtgcattcagccgaagggagcgagttctggagcgccctgctggagaaggcatacgccaagatcaacggatgctatgaagcactatcagggggtgccaccactgagggcttcgaagacttcaccggaggcattgctgagtggtatgagttgaagaagccccctcccaacctgttcaagatcatccagaaagctctgcaaaaaggctctctccttggctgctccatcgacatcaccagcgccgcggactcggaggccatcacgtttcagaagctggtgaaggggcacgcgtactcggtcaccggagccgaggaggttgaaagtaacggaagcctacagaaactgatccgcatccgaaatccctggggagaagtggagtggacagggcggtggaatgacaactgcccaagctggaacactatagacccagaggagagggaaaggctgaccagacggcatgaagatggagaattctggatgtctttcagtgacttcctgaggcactattcccgcctggagatctgtaacctgaccccagacactctcaccagcgatacctacaagaagtggaaactcaccaaaatggatgggaactggaggcggggctccaccgcgggaggttgcaggaactacccgaacacattctggatgaaccctcagtacctgatcaagctggaggaggaggatgaggacgaggaggatggggagagcggctgcaccttcctggtggggctcattcagaagcaccgacggcggcagaggaagatgggcgaggacatgcacaccatcggctttggcatctatgaggttccagaggagttaagtgggcagaccaacatccacctcagcaaaaacttcttcctgacgaatcgcgccagggagcgctcagacaccttcatcaacctccgggaggtgctcaaccgcttcaagctgccgccaggagagtacattctcgtgccttccaccttcgaacccaacaaggatggggatttctgcatccgggtcttttctgaaaagaaagctgactaccaagctgtcgatgatgaaatcgaggccaatcttgaagagttcgacatcagcgaggatgacattgatgatggattcaggagactgtttgcccagttggcaggagaggatgcggagatctctgcctttgagctgcagaccatcctgagaagggttctagcaaagcgccaagatatcaagtcagatggcttcagcatcgagacatgcaaaattatggttgacatgctagattcggacgggagtggcaagctggggctgaaggagttctacattctctggacgaagattcaaaaataccaaaaaatttaccgagaaatcgacgttgacaggtctggtaccatgaattcctatgaaatgcggaaggcattagaagaagcaggtttcaagatgccctgtcaactccaccaagtcatcgttgctcggtttgcagatgaccagctcatcatcgattttgataattttgttcggtgtttggttcggctggaaacgctattcaagatatttaagcagctggatcccgagaatactggaacaatagagctcgaccttatctcttggctctgtttctcagtactttgaagttataactaatctgcctgaagacttctcatgatggaaaatcagccaaggactaagcttccatagaaatacactttgtatctggacctcaaaattatgggaacatttacttaaacggatgatcatagctgaaaataatgatactgtcaatttgagatagcagaagtttcacacatcaaagtaaaagatttgcatatcattatactaaatgcaaatgagtcgcttaacccttgacaaggtcaaagaaagctttaaatctgtaaatagtatacactttttacttttacacactttcctgttcatagcaatattaaatcaggaaaaaaaaatgcagggaggtatttaacagctgagcaaaaacattgagtcgctctcaaaggacacgaggcccttggcagggaatatttaaagcaacttcaagtttaaaatgcagctgttgattctaccaaacaacagtccaagattaccatttcccatgagccaactgggaaacatggtatatcatgaagtaatcttgtcaaggcatctggagagtccaggagagaagactcacctctgtcgcttgggttaaacaagagacaggttttgtagaatattgattggtaatagtaaatcgttctccttacaatcaagttcttgaccctattcggccttatacatctggtcttacaaagaccaaagggatcctgcgcttgatcaactgaaccagtatgccaaaaccaggcatccaatttgtaaaccaattatgataaaggacaaaataagctgtttgccacctcaaaactttatgaacttcaccaccactagtgtctgtccatggagttagaggggacatcacttagaagttcttatagaaaggacacaagtttgtttcctggctttaccttgggaaaatgctagcaacattatagaaattttgccttgttgccttatcttcttccaaatgtactgttaaataaaaataaagggttaccccatgcaatcacaccatgccatgttttccttcctggagggcagccccacaggacggtttatgagcacacaattatagcttgtttctactttaacaaggtatgctgcctctgtaaattcatgtattcaaaggaaaagacaccttgcctataattaaaatgtggaactataaaattttttaaaatccaattca

SEQ ID NO: 51225 - DNA, 3039 bp, Homo sapiens
caaaggaacgaatttccaggatgttcgactatgtggagaaaacaaaaaaaaaagcaaagaaaaaaatatttttaaagaaagaaagaaggccaggtcagtgcctcacacctgtaatcccagcactatgggaggccaaggtgggaggatcgcttgagccaggagttcaagaccagcctgggcaacacagagatctgcgctgacccccagtttatcattggaggagccacccgcacagacatctgccaaggagccctaggtgactgctggctgctggcagccattgcctccctcaccttgaatgaagaaatcctggctcgagtcgtccccctaaaccagagcttccaggaaaactatgcagggatctttcacttccagttctggcaatacggcgagtgggtggaggtggtggtggatgacaggctgcccaccaaggacggggagctgctctttgtgcattcagccgaagggagcgagttctggagcgccctgctggagaaggcatacgccaagatcaacggatgctatgaagcactatcagggggtgccaccactgagggcttcgaagacttcaccggaggcattgctgagtggtatgagttgaagaagccccctcccaacctgttcaagatcatccagaaagctctgcaaaaaggctctctccttggctgctccatcgacatcaccagcgccgcggactcggaggccatcacgtttcagaagctggtgaaggggcacgcgtactcggtcaccggagccgaggaggttgaaagtaacggaagcctacagaaactgatccgcatccgaaatccctggggagaagtggagtggacagggcggtggaatgacaactgcccaagctggaacactatagacccagaggagagggaaaggctgaccagacggcatgaagatggagaattctggatgtctttcagtgacttcctgaggcactattcccgcctggagatctgtaacctgaccccagacactctcaccagcgatacctacaagaagtggaaactcaccaaaatggatgggaactggaggcggggctccaccgcgggaggttgcaggaactacccgaacacattctggatgaaccctcagtacctgatcaagctggaggaggaggatgaggacgaggaggatggggagagcggctgcaccttcctggtggggctcattcagaagcaccgacggcggcagaggaagatgggcgaggacatgcacaccatcggctttggcatctatgaggttccagaggagttaagtgggcagaccaacatccacctcagcaaaaacttcttcctgacgaatcgcgccagggagcgctcagacaccttcatcaacctccgggaggtgctcaaccgcttcaagctgccgccaggagagtacattctcgtgccttccaccttcgaacccaacaaggatggggatttctgcatccgggtcttttctgaaaagaaagctgactaccaagctgtcgatgatgaaatcgaggccaatcttgaagagttcgacatcagcgaggatgacattgatgatggattcaggagactgtttgcccagttggcaggagaggatgcggagatctctgcctttgagctgcagaccatcctgagaagggttctagcaaagcgccaagatatcaagtcagatggcttcagcatcgagacatgcaaaattatggttgacatgctagattcggacgggagtggcaagctggggctgaaggagttctacattctctggacgaagattcaaaaataccaaaaaatttaccgagaaatcgacgttgacaggtctggtaccatgaattcctatgaaatgcggaaggcattagaagaagcaggtttcaagatgccctgtcaactccaccaagtcatcgttgctcggtttgcagatgaccagctcatcatcgattttgataattttgttcggtgtttggttcggctggaaacgctattcaagatatttaagcagctggatcccgagaatactggaacaatagagctcgaccttatctcttggctctgtttctcagtactttgaagttataactaatctgcctgaagacttctcatgatggaaaatcagccaaggactaagcttccatagaaatacactttgtatctggacctcaaaattatgggaacatttacttaaacggatgatcatagctgaaaataatgatactgtcaatttgagatagcagaagtttcacacatcaaagtaaaagatttgcatatcattatactaaatgcaaatgagtcgcttaacccttgacaaggtcaaagaaagctttaaatctgtaaatagtatacactttttacttttacacactttcctgttcatagcaatattaaatcaggaaaaaaaaatgcagggaggtatttaacagctgagcaaaaacattgagtcgctctcaaaggacacgaggcccttggcagggaatatttaaagcaacttcaagtttaaaatgcagctgttgattctaccaaacaacagtccaagattaccatttcccatgagccaactgggaaacatggtatatcatgaagtaatcttgtcaaggcatctggagagtccaggagagaagactcacctctgtcgcttgggttaaacaagagacaggttttgtagaatattgattggtaatagtaaatcgttctccttacaatcaagttcttgaccctattcggccttatacatctggtcttacaaagaccaaagggatcctgcgcttgatcaactgaaccagtatgccaaaaccaggcatccaatttgtaaaccaattatgataaaggacaaaataagctgtttgccacctcaaaactttatgaacttcaccaccactagtgtctgtccatggagttagaggggacatcacttagaagttcttatagaaaggacacaagtttgtttcctggctttaccttgggaaaatgctagcaacattatagaaattttgccttgttgccttatcttcttccaaatgtactgttaaataaaaataaagggttaccccatgcaatcaca

SEQ ID NO: 51226 - DNA, 2787 bp, Homo sapiens
gcgcttccactcgatgccccgggttttgctggagtagggccccaactccttgaagcccagggccgagtcgtccccctaaaccagagcttccaggaaaactatgcagggatctttcacttccagttctggcaatacggcgagtgggtggaggtggtggtggatgacaggctgcccaccaaggacggggagctgctctttgtgcattcagccgaagggagcgagttctggagcgccctgctggagaaggcatacgccaagatcaacggatgctatgaagcactatcagggggtgccaccactgagggcttcgaagacttcaccggaggcattgctgagtggtatgagttgaagaagccccctcccaacctgttcaagatcatccagaaagctctgcaaaaaggctctctccttggctgctccatcgacatcaccagcgccgcggactcggaggccatcacgtttcagaagctggtgaaggggcacgcgtactcggtcaccggagccgaggaggttgaaagtaacggaagcctacagaaactgatccgcatccgaaatccctggggagaagtggagtggacagggcggtggaatgacaactgcccaagctggaacactatagacccagaggagagggaaaggctgaccagacggcatgaagatggagaattctggatgtctttcagtgacttcctgaggcactattcccgcctggagatctgtaacctgaccccagacactctcaccagcgatacctacaagaagtggaaactcaccaaaatggatgggaactggaggcggggctccaccgcgggaggttgcaggaactacccgaacacattctggatgaaccctcagtacctgatcaagctggaggaggaggatgaggacgaggaggatggggagagcggctgcaccttcctggtggggctcattcagaagcaccgacggcggcagaggaagatgggcgaggacatgcacaccatcggctttggcatctatgaggttccagaggagttaagtgggcagaccaacatccacctcagcaaaaacttcttcctgacgaatcgcgccagggagcgctcagacaccttcatcaacctccgggaggtgctcaaccgcttcaagctgccgccaggagagtacattctcgtgccttccaccttcgaacccaacaaggatggggatttctgcatccgggtcttttctgaaaagaaagctgactaccaagctgtcgatgatgaaatcgaggccaatcttgaagagttcgacatcagcgaggatgacattgatgatggattcaggagactgtttgcccagttggcaggagaggatgcggagatctctgcctttgagctgcagaccatcctgagaagggttctagcaaagcgccaagatatcaagtcagatggcttcagcatcgagacatgcaaaattatggttgacatgctagattcggacgggagtggcaagctggggctgaaggagttctacattctctggacgaagattcaaaaataccaaaaaatttaccgagaaatcgacgttgacaggtctggtaccatgaattcctatgaaatgcggaaggcattagaagaagcaggtttcaagatgccctgtcaactccaccaagtcatcgttgctcggtttgcagatgaccagctcatcatcgattttgataattttgttcggtgtttggttcggctggaaacgctattcaagatatttaagcagctggatcccgagaatactggaacaatagagctcgaccttatctcttggctctgtttctcagtactttgaagttataactaatctgcctgaagacttctcatgatggaaaatcagccaaggactaagcttccatagaaatacactttgtatctggacctcaaaattatgggaacatttacttaaacggatgatcatagctgaaaataatgatactgtcaatttgagatagcagaagtttcacacatcaaagtaaaagatttgcatatcattatactaaatgcaaatgagtcgcttaacccttgacaaggtcaaagaaagctttaaatctgtaaatagtatacactttttacttttacacactttcctgttcatagcaatattaaatcaggaaaaaaaaatgcagggaggtatttaacagctgagcaaaaacattgagtcgctctcaaaggacacgaggcccttggcagggaatatttaaagcaacttcaagtttaaaatgcagctgttgattctaccaaacaacagtccaagattaccatttcccatgagccaactgggaaacatggtatatcatgaagtaatcttgtcaaggcatctggagagtccaggagagaagactcacctctgtcgcttgggttaaacaagagacaggttttgtagaatattgattggtaatagtaaatcgttctccttacaatcaagttcttgaccctattcggccttatacatctggtcttacaaagaccaaagggatcctgcgcttgatcaactgaaccagtatgccaaaaccaggcatccaatttgtaaaccaattatgataaaggacaaaataagctgtttgccacctcaaaactttatgaacttcaccaccactagtgtctgtccatggagttagaggggacatcacttagaagttcttatagaaaggacacaagtttgtttcctggctttaccttgggaaaatgctagcaacattatagaaattttgccttgttgccttatcttcttccaaatgtactgttaaataaaaataaagggttaccccatgcaatcaca

SEQ ID NO: 51227 - DNA, 3456 bp, Homo sapiens
gcggcgttcccggcgctcggcaggccgcaggatggcctggtcccgggccgggagcccagcaggccgggagcggctgaggccacaccccgcgggccgggccgcttccctccggtgaatcatcgctcgcagcggcggcgcccgcagtggccgcagcagcgcgccgggccctggccgcgccccagccgagcgcagcgcggagtcgccccgacctttctctgcgcagtacggccgccgggaccgcagcatggcgggcatcgcggccaagctggcgaaggaccgggaggcggccgaggggctgggctcccacgagagggccatcaagtacctcaaccaggactacgaggcgctgcggaacgagtgcctggaggccgggacgctcttccaggacccgtccttcccggccatcccctcggccctgggcttcaaggagttggggccctactccagcaaaacccggggcatcgagtggaagcgccccacggagatctgcgctgacccccagtttatcattggaggagccacccgcacagacatctgccaaggagccctaggtgactgctggctgctggcagccattgcctccctcaccttgaatgaagaaatcctggctcgagtcgtccccctaaaccagagcttccaggaaaactatgcagggatctttcacttccagttctggcaatacggcgagtgggtggaggtggtggtggatgacaggctgcccaccaaggacggggagctgctctttgtgcattcagccgaagggagcgagttctggagcgccctgctggagaaggcatacgccaagatcaacggatgctatgaagcactatcagggggtgccaccactgagggcttcgaagacttcaccggaggcattgctgagtggtatgagttgaagaagccccctcccaacctgttcaagatcatccagaaagctctgcaaaaaggctctctccttggctgctccatcgacatcaccagcgccgcggactcggaggccatcacgtttcagaagctggtgaaggggcacgcgtactcggtcaccggagccgaggaggttgaaagtaacggaagcctacagaaactgatccgcatccgaaatccctggggagaagtggagtggacagggcggtggaatgacaactgcccaagctggaacactatagacccagaggagagggaaaggctgaccagacggcatgaagatggagaattctggatgtctttcagtgacttcctgaggcactattcccgcctggagatctgtaacctgaccccagacactctcaccagcgatacctacaagaagtggaaactcaccaaaatggatgggaactggaggcggggctccaccgcgggaggttgcaggaactacccgaacacattctggatgaaccctcagtacctgatcaagctggaggaggaggatgaggacgaggaggatggggagagcggctgcaccttcctggtggggctcattcagaagcaccgacggcggcagaggaagatgggcgaggacatgcacaccatcggctttggcatctatgaggttccagaggagttaagtgggcagaccaacatccacctcagcaaaaacttcttcctgacgaatcgcgccagggagcgctcagacaccttcatcaacctccgggaggtgctcaaccgcttcaagctgccgccaggagagtacattctcgtgccttccaccttcgaacccaacaaggatggggatttctgcatccgggtcttttctgaaaagaaagctgactaccaagctgtcgatgatgaaatcgaggccaatcttgaagaggtatttgtaactctttgaatttcacccactctgtcctggacaatccagagagcagaggagcaaaaaaactccaagagtttttggacttcacgaacaaagcctgaaactaaggataaagccggttcgacatcagcgaggatgacattgatgatggattcaggagactgtttgcccagttggcaggagaggatgcggagatctctgcctttgagctgcagaccatcctgagaagggttctagcaaagcgccaagatatcaagtcagatggcttcagcatcgagacatgcaaaattatggttgacatgctagattcggacgggagtggcaagctggggctgaaggagttctacattctctggacgaagattcaaaaataccaaaaaatttaccgagaaatcgacgttgacaggtctggtaccatgaattcctatgaaatgcggaaggcattagaagaagcaggtttcaagatgccctgtcaactccaccaagtcatcgttgctcggtttgcagatgaccagctcatcatcgattttgataattttgttcggtgtttggttcggctggaaacgctattcaagatatttaagcagctggatcccgagaatactggaacaatagagctcgaccttatctcttggctctgtttctcagtactttgaagttataactaatctgcctgaagacttctcatgatggaaaatcagccaaggactaagcttccatagaaatacactttgtatctggacctcaaaattatgggaacatttacttaaacggatgatcatagctgaaaataatgatactgtcaatttgagatagcagaagtttcacacatcaaagtaaaagatttgcatatcattatactaaatgcaaatgagtcgcttaacccttgacaaggtcaaagaaagctttaaatctgtaaatagtatacactttttacttttacacactttcctgttcatagcaatattaaatcaggaaaaaaaaatgcagggaggtatttaacagctgagcaaaaacattgagtcgctctcaaaggacacgaggcccttggcagggaatatttaaagcaacttcaagtttaaaatgcagctgttgattctaccaaacaacagtccaagattaccatttcccatgagccaactgggaaacatggtatatcatgaagtaatcttgtcaaggcatctggagagtccaggagagaagactcacctctgtcgcttgggttaaacaagagacaggttttgtagaatattgattggtaatagtaaatcgttctccttacaatcaagttcttgaccctattcggccttatacatctggtcttacaaagaccaaagggatcctgcgcttgatcaactgaaccagtatgccaaaaccaggcatccaatttgtaaaccaattatgataaaggacaaaataagctgtttgccacctcaaaactttatgaacttcaccaccactagtgtctgtccatggagttagaggggacatcacttagaagttcttatagaaaggacacaagtttgtttcctggctttaccttgggaaaatgctagcaacattatagaaattttgccttgttgccttatcttcttccaaatgtactgttaaataaaaataaagggttaccccatgcaatcaca

SEQ ID NO: 51228 - DNA, 2588 bp, Homo sapiens
gctctatcttgcttttcctgtgtaacttgtatccagctatggtagaaggatacgccaagatcaacggatgctatgaagcactatcagggggtgccaccactgagggcttcgaagacttcaccggaggcattgctgagtggtatgagttgaagaagccccctcccaacctgttcaagatcatccagaaagctctgcaaaaaggctctctccttggctgctccatcgacatcaccagcgccgcggactcggaggccatcacgtttcagaagctggtgaaggggcacgcgtactcggtcaccggagccgaggaggttgaaagtaacggaagcctacagaaactgatccgcatccgaaatccctggggagaagtggagtggacagggcggtggaatgacaactgcccaagctggaacactatagacccagaggagagggaaaggctgaccagacggcatgaagatggagaattctggatgtctttcagtgacttcctgaggcactattcccgcctggagatctgtaacctgaccccagacactctcaccagcgatacctacaagaagtggaaactcaccaaaatggatgggaactggaggcggggctccaccgcgggaggttgcaggaactacccgaacacattctggatgaaccctcagtacctgatcaagctggaggaggaggatgaggacgaggaggatggggagagcggctgcaccttcctggtggggctcattcagaagcaccgacggcggcagaggaagatgggcgaggacatgcacaccatcggctttggcatctatgaggttccagaggagttaagtgggcagaccaacatccacctcagcaaaaacttcttcctgacgaatcgcgccagggagcgctcagacaccttcatcaacctccgggaggtgctcaaccgcttcaagctgccgccaggagagtacattctcgtgccttccaccttcgaacccaacaaggatggggatttctgcatccgggtcttttctgaaaagaaagctgactaccaagctgtcgatgatgaaatcgaggccaatcttgaagagttcgacatcagcgaggatgacattgatgatggattcaggagactgtttgcccagttggcaggagaggatgcggagatctctgcctttgagctgcagaccatcctgagaagggttctagcaaagcgccaagatatcaagtcagatggcttcagcatcgagacatgcaaaattatggttgacatgctagattcggacgggagtggcaagctggggctgaaggagttctacattctctggacgaagattcaaaaataccaaaaaatttaccgagaaatcgacgttgacaggtctggtaccatgaattcctatgaaatgcggaaggcattagaagaagcaggtttcaagatgccctgtcaactccaccaagtcatcgttgctcggtttgcagatgaccagctcatcatcgattttgataattttgttcggtgtttggttcggctggaaacgctattcaagatatttaagcagctggatcccgagaatactggaacaatagagctcgaccttatctcttggctctgtttctcagtactttgaagttataactaatctgcctgaagacttctcatgatggaaaatcagccaaggactaagcttccatagaaatacactttgtatctggacctcaaaattatgggaacatttacttaaacggatgatcatagctgaaaataatgatactgtcaatttgagatagcagaagtttcacacatcaaagtaaaagatttgcatatcattatactaaatgcaaatgagtcgcttaacccttgacaaggtcaaagaaagctttaaatctgtaaatagtatacactttttacttttacacactttcctgttcatagcaatattaaatcaggaaaaaaaaatgcagggaggtatttaacagctgagcaaaaacattgagtcgctctcaaaggacacgaggcccttggcagggaatatttaaagcaacttcaagtttaaaatgcagctgttgattctaccaaacaacagtccaagattaccatttcccatgagccaactgggaaacatggtatatcatgaagtaatcttgtcaaggcatctggagagtccaggagagaagactcacctctgtcgcttgggttaaacaagagacaggttttgtagaatattgattggtaatagtaaatcgttctccttacaatcaagttcttgaccctattcggccttatacatctggtcttacaaagaccaaagggatcctgcgcttgatcaactgaaccagtatgccaaaaccaggcatccaatttgtaaaccaattatgataaaggacaaaataagctgtttgccacctcaaaactttatgaacttcaccaccactagtgtctgtccatggagttagaggggacatcacttagaagttcttatagaaaggacacaagtttgtttcctggctttaccttgggaaaatgctagcaacattatagaaattttgccttgttgccttatcttcttccaaatgtactgttaaataaaaataaagggttaccccatgcaatcaca

SEQ ID NO: 51229 - DNA, 2763 bp, Homo sapiens
caatcttgttacacatcaacggatacacacgggagagaagccttatcagtgcaaggagtgtgggaaaagcttcagtcaacgaggtagtctcgctgtccacgagagactccacactggacagaaaccctacgagtgtgctatttgtcagagaagcttcaggaatcagagtaaccttgctgttcacaggagagttcacagtggtgagaagccctgctggagaaggcatacgccaagatcaacggatgctatgaagcactatcagggggtgccaccactgagggcttcgaagacttcaccggaggcattgctgagtggtatgagttgaagaagccccctcccaacctgttcaagatcatccagaaagctctgcaaaaaggctctctccttggctgctccatcgacatcaccagcgccgcggactcggaggccatcacgtttcagaagctggtgaaggggcacgcgtactcggtcaccggagccgaggaggttgaaagtaacggaagcctacagaaactgatccgcatccgaaatccctggggagaagtggagtggacagggcggtggaatgacaactgcccaagctggaacactatagacccagaggagagggaaaggctgaccagacggcatgaagatggagaattctggatgtctttcagtgacttcctgaggcactattcccgcctggagatctgtaacctgaccccagacactctcaccagcgatacctacaagaagtggaaactcaccaaaatggatgggaactggaggcggggctccaccgcgggaggttgcaggaactacccgaacacattctggatgaaccctcagtacctgatcaagctggaggaggaggatgaggacgaggaggatggggagagcggctgcaccttcctggtggggctcattcagaagcaccgacggcggcagaggaagatgggcgaggacatgcacaccatcggctttggcatctatgaggttccagaggagttaagtgggcagaccaacatccacctcagcaaaaacttcttcctgacgaatcgcgccagggagcgctcagacaccttcatcaacctccgggaggtgctcaaccgcttcaagctgccgccaggagagtacattctcgtgccttccaccttcgaacccaacaaggatggggatttctgcatccgggtcttttctgaaaagaaagctgactaccaagctgtcgatgatgaaatcgaggccaatcttgaagagttcgacatcagcgaggatgacattgatgatggattcaggagactgtttgcccagttggcaggagaggatgcggagatctctgcctttgagctgcagaccatcctgagaagggttctagcaaagcgccaagatatcaagtcagatggcttcagcatcgagacatgcaaaattatggttgacatgctagattcggacgggagtggcaagctggggctgaaggagttctacattctctggacgaagattcaaaaataccaaaaaatttaccgagaaatcgacgttgacaggtctggtaccatgaattcctatgaaatgcggaaggcattagaagaagcaggtttcaagatgccctgtcaactccaccaagtcatcgttgctcggtttgcagatgaccagctcatcatcgattttgataattttgttcggtgtttggttcggctggaaacgctattcaagatatttaagcagctggatcccgagaatactggaacaatagagctcgaccttatctcttggctctgtttctcagtactttgaagttataactaatctgcctgaagacttctcatgatggaaaatcagccaaggactaagcttccatagaaatacactttgtatctggacctcaaaattatgggaacatttacttaaacggatgatcatagctgaaaataatgatactgtcaatttgagatagcagaagtttcacacatcaaagtaaaagatttgcatatcattatactaaatgcaaatgagtcgcttaacccttgacaaggtcaaagaaagctttaaatctgtaaatagtatacactttttacttttacacactttcctgttcatagcaatattaaatcaggaaaaaaaaatgcagggaggtatttaacagctgagcaaaaacattgagtcgctctcaaaggacacgaggcccttggcagggaatatttaaagcaacttcaagtttaaaatgcagctgttgattctaccaaacaacagtccaagattaccatttcccatgagccaactgggaaacatggtatatcatgaagtaatcttgtcaaggcatctggagagtccaggagagaagactcacctctgtcgcttgggttaaacaagagacaggttttgtagaatattgattggtaatagtaaatcgttctccttacaatcaagttcttgaccctattcggccttatacatctggtcttacaaagaccaaagggatcctgcgcttgatcaactgaaccagtatgccaaaaccaggcatccaatttgtaaaccaattatgataaaggacaaaataagctgtttgccacctcaaaactttatgaacttcaccaccactagtgtctgtccatggagttagaggggacatcacttagaagttcttatagaaaggacacaagtttgtttcctggctttaccttgggaaaatgctagcaacattatagaaattttgccttgttgccttatcttcttccaaatgtactgttaaataaaaataaagggttaccccatgcaatcaca

SEQ ID NO: 51230 - DNA, 2238 bp, Homo sapiens
  misc_feature (27)..(27): n is a, c, g, or t
cgagctcggtacccccattccattccngcgtgggggtggaatgacaactgcccaagctggaacactatagacccagaggagagggaaaggctgaccagacggcatgaagatggagaattctggatgtctttcagtgacttcctgaggcactattcccgcctggagatctgtaacctgaccccagacactctcaccagcgatacctacaagaagtggaaactcaccaaaatggatgggaactggaggcggggctccaccgcgggaggttgcaggaactacccgaacacattctggatgaaccctcagtacctgatcaagctggaggaggaggatgaggacgaggaggatggggagagcggctgcaccttcctggtggggctcattcagaagcaccgacggcggcagaggaagatgggcgaggacatgcacaccatcggctttggcatctatgaggttccagaggagttaagtgggcagaccaacatccacctcagcaaaaacttcttcctgacgaatcgcgccagggagcgctcagacaccttcatcaacctccgggaggtgctcaaccgcttcaagctgccgccaggagagtacattctcgtgccttccaccttcgaacccaacaaggatggggatttctgcatccgggtcttttctgaaaagaaagctgactaccaagctgtcgatgatgaaatcgaggccaatcttgaagagttcgacatcagcgaggatgacattgatgatggattcaggagactgtttgcccagttggcaggagaggatgcggagatctctgcctttgagctgcagaccatcctgagaagggttctagcaaagcgccaagatatcaagtcagatggcttcagcatcgagacatgcaaaattatggttgacatgctagattcggacgggagtggcaagctggggctgaaggagttctacattctctggacgaagattcaaaaataccaaaaaatttaccgagaaatcgacgttgacaggtctggtaccatgaattcctatgaaatgcggaaggcattagaagaagcaggtttcaagatgccctgtcaactccaccaagtcatcgttgctcggtttgcagatgaccagctcatcatcgattttgataattttgttcggtgtttggttcggctggaaacgctattcaagatatttaagcagctggatcccgagaatactggaacaatagagctcgaccttatctcttggctctgtttctcagtactttgaagttataactaatctgcctgaagacttctcatgatggaaaatcagccaaggactaagcttccatagaaatacactttgtatctggacctcaaaattatgggaacatttacttaaacggatgatcatagctgaaaataatgatactgtcaatttgagatagcagaagtttcacacatcaaagtaaaagatttgcatatcattatactaaatgcaaatgagtcgcttaacccttgacaaggtcaaagaaagctttaaatctgtaaatagtatacactttttacttttacacactttcctgttcatagcaatattaaatcaggaaaaaaaaatgcagggaggtatttaacagctgagcaaaaacattgagtcgctctcaaaggacacgaggcccttggcagggaatatttaaagcaacttcaagtttaaaatgcagctgttgattctaccaaacaacagtccaagattaccatttcccatgagccaactgggaaacatggtatatcatgaagtaatcttgtcaaggcatctggagagtccaggagagaagactcacctctgtcgcttgggttaaacaagagacaggttttgtagaatattgattggtaatagtaaatcgttctccttacaatcaagttcttgaccctattcggccttatacatctggtcttacaaagaccaaagggatcctgcgcttgatcaactgaaccagtatgccaaaaccaggcatccaatttgtaaaccaattatgataaaggacaaaataagctgtttgccacctcaaaactttatgaacttcaccaccactagtgtctgtccatggagttagaggggacatcacttagaagttcttatagaaaggacacaagtttgtttcctggctttaccttgggaaaatgctagcaacattatagaaattttgccttgttgccttatcttcttccaaatgtactgttaaataaaaataaagggttaccccatgcaatcaca

SEQ ID NO: 51231 - DNA, 3842 bp, Homo sapiens
gcggcgttcccggcgctcggcaggccgcaggatggcctggtcccgggccgggagcccagcaggccgggagcggctgaggccacaccccgcgggccgggccgcttccctccggtgaatcatcgctcgcagcggcggcgcccgcagtggccgcagcagcgcgccgggccctggccgcgccccagccgagcgcagcgcggagtcgccccgacctttctctgcgcagtacggccgccgggaccgcagcatggcgggcatcgcggccaagctggcgaaggaccgggaggcggccgaggggctgggctcccacgagagggccatcaagtacctcaaccaggactacgaggcgctgcggaacgagtgcctggaggccgggacgctcttccaggacccgtccttcccggccatcccctcggccctgggcttcaaggagttggggccctactccagcaaaacccggggcatcgagtggaagcgccccacggagatctgcgctgacccccagtttatcattggaggagccacccgcacagacatctgccaaggagccctaggtgactgctggctgctggcagccattgcctccctcaccttggcctcccaaagtgctgggattaagaggcatgagccaccatgcctggcctcttttatctttttcttttcttttcttttctttttggggggcacagagtctcactctgttgcccaggatgaagtgcagtggcatgatctcgactcactgcaacctctacctcctgggttcaagtgattctcctgcttcagcctccccagtagctgggactacaggcacgcaccaggatgccaggccaatttttgtatttttagtagagacggggtttcaccatggtggccaggctggtcttgaactcctgacctcaggtgatccacccccttcagcctcccaaagtgctaggattacaggtgtagccaccgtgcctggctgcatttcagtttatttttcagtaaaactggtcaaccatccacctcactgcactaccgtggaatgacttaaattttgcgagagcatttgggcccacagtcaccgcttgctgaagcagatgggatgcctggtccaaggtcacgattattaaagtagacacacggggcactttgacccacctgtagtacatttctttcacagcaaggcagtgcaaccggtagcacatcgggctcttttagatgctgctccagccttggtccggtggatcatgcttggtttagaagctgggttgtctttctcctgcccccagtcctgtctttgcttttatagtgcatcatacaccacgtagaaccgagccaggttcctgccatgtggacgctgttcctgcctgagagtctcttagaggaaggctgggaacactgtggaaagactgggcatctctgcaggcggagctgaatggatgtgaaacccctgtgggcatgtgcttccgagttcctcagcaggcatttgtgttttttggtagaaagtttgctttttgttttttttttttttaagacaaggtctcattctgtcacccaggctagagtacagtggtgtgatcatagctcactgccgtccttgaactctcagactcacgtgagcctcctacctcagcctcctgagtagctgagactacaggcgcttgccgccacccctggctaatatttttattttttgcagagacaggggtctcactacattgcccaggctggtctcaaactcctggcctcgagcaatcctctcacagcctcccaaagtgctggtattacaggcgtgagccaccacacctaacaaaagtttgctttttatctaaaatgacccaggcattgtcactgtactgctatttttttaaaaaaattttgttgttttgttgttgttgtcgtcgttatatagatgagggcttcctgtgttgcccaggctggtttctgacgcctggcctcgcctccttatacaccaggacagcaggactgagccaccacactacccaactgcttttatctcagtgaatgaaaatgatacttgcctggaggcttcccctcatctacccccatgtttctctatttattcctcattaagtgggcagaccaacatccacctcagcaaaaacttcttcctgacgaatcgcgccagggagcgctcagacaccttcatcaacctccgggaggtgctcaaccgcttcaagctgccgccaggagagtacattctcgtgccttccaccttcgaacccaacaaggatggggatttctgcatccgggtcttttctgaaaagaaagctgactaccaagctgtcgatgatgaaatcgaggccaatcttgaagagttcgacatcagcgaggatgacattgatgatggattcaggagactgtttgcccagttggcaggagaggatgcggagatctctgcctttgagctgcagaccatcctgagaagggttctagcaaagcgccaagatatcaagtcagatggcttcagcatcgagacatgcaaaattatggttgacatgctagattcggacgggagtggcaagctggggctgaaggagttctacattctctggacgaagattcaaaaataccaaaaaatttaccgagaaatcgacgttgacaggtctggtaccatgaattcctatgaaatgcggaaggcattagaagaagcaggtttcaagatgccctgtcaactccaccaagtcatcgttgctcggtttgcagatgaccagctcatcatcgattttgataattttgttcggtgtttggttcggctggaaacgctattcaagatatttaagcagctggatcccgagaatactggaacaatagagctcgaccttatctcttggctctgtttctcagtactttgaagttataactaatctgcctgaagacttctcatgatggaaaatcagccaaggactaagcttccatagaaatacactttgtatctggacctcaaaattatgggaacatttacttaaacggatgatcatagctgaaaataatgatactgtcaatttgagatagcagaagtttcacacatcaaagtaaaagatttgcatatcattatactaaatgcaaatgagtcgcttaacccttgacaaggtcaaagaaagctttaaatctgtaaatagtatacactttttacttttacacactttcctgttcatagcaatattaaatcaggaaaaaaaaatgcagggaggtatttaacagctgagcaaaaacattgagtcgctctcaaaggacacgaggcccttggcagggaatatttaaagcaacttcaagtttaaaatgcagctgttgattctaccaaacaacagtccaagattaccatttcccatgagccaactgggaaacatggtatatcatgaagtaatcttgtcaaggcatctggagagtccaggagagaagactcacctctgtcgcttgggttaaacaagagacaggttttgtagaatattgattggtaatagtaaatcgttctccttacaatcaagttcttgaccctattcggccttatacatctggtcttacaaagaccaaagggatcctgcgcttgatcaactgaaccagtatgccaaaaccaggcatccaatttgtaaaccaattatgataaaggacaaaataagctgtttgccacctcaaaactttatgaacttcaccaccactagtgtctgtccatggagttagaggggacatcacttagaagttcttatagaaaggacacaagtttgtttcctggctttaccttgggaaaatgctagcaacattatagaaattttgccttgttgccttatcttcttccaaatgtactgttaaataaaaataaagggttaccccatgcaatcaca

SEQ ID NO: 51232 - DNA, 3454 bp, Homo sapiens
caaaccctctgacccaaccctcatatgggggactgcctgaaacttcactctgtctattcacaggttgtcttaggctttaagcccctggaggtggagacaagatttttaacatcctcctggttctaagaccctctgataagagctccttgtgctgtgttcacaggtgactgctggctgctggcagccattgcctccctcaccttggcctcccaaagtgctgggattaagaggcatgagccaccatgcctggcctcttttatctttttcttttcttttcttttctttttggggggcacagagtctcactctgttgcccaggatgaagtgcagtggcatgatctcgactcactgcaacctctacctcctgggttcaagtgattctcctgcttcagcctccccagtagctgggactacaggcacgcaccaggatgccaggccaatttttgtatttttagtagagacggggtttcaccatggtggccaggctggtcttgaactcctgacctcaggtgatccacccccttcagcctcccaaagtgctaggattacaggtgtagccaccgtgcctggctgcatttcagtttatttttcagtaaaactggtcaaccatccacctcactgcactaccgtggaatgacttaaattttgcgagagcatttgggcccacagtcaccgcttgctgaagcagatgggatgcctggtccaaggtcacgattattaaagtagacacacggggcactttgacccacctgtagtacatttctttcacagcaaggcagtgcaaccggtagcacatcgggctcttttagatgctgctccagccttggtccggtggatcatgcttggtttagaagctgggttgtctttctcctgcccccagtcctgtctttgcttttatagtgcatcatacaccacgtagaaccgagccaggttcctgccatgtggacgctgttcctgcctgagagtctcttagaggaaggctgggaacactgtggaaagactgggcatctctgcaggcggagctgaatggatgtgaaacccctgtgggcatgtgcttccgagttcctcagcaggcatttgtgttttttggtagaaagtttgctttttgttttttttttttttaagacaaggtctcattctgtcacccaggctagagtacagtggtgtgatcatagctcactgccgtccttgaactctcagactcacgtgagcctcctacctcagcctcctgagtagctgagactacaggcgcttgccgccacccctggctaatatttttattttttgcagagacaggggtctcactacattgcccaggctggtctcaaactcctggcctcgagcaatcctctcacagcctcccaaagtgctggtattacaggcgtgagccaccacacctaacaaaagtttgctttttatctaaaatgacccaggcattgtcactgtactgctatttttttaaaaaaattttgttgttttgttgttgttgtcgtcgttatatagatgagggcttcctgtgttgcccaggctggtttctgacgcctggcctcgcctccttatacaccaggacagcaggactgagccaccacactacccaactgcttttatctcagtgaatgaaaatgatacttgcctggaggcttcccctcatctacccccatgtttctctatttattcctcattaagtgggcagaccaacatccacctcagcaaaaacttcttcctgacgaatcgcgccagggagcgctcagacaccttcatcaacctccgggaggtgctcaaccgcttcaagctgccgccaggagagtacattctcgtgccttccaccttcgaacccaacaaggatggggatttctgcatccgggtcttttctgaaaagaaagctgactaccaagctgtcgatgatgaaatcgaggccaatcttgaagagttcgacatcagcgaggatgacattgatgatggattcaggagactgtttgcccagttggcaggagaggatgcggagatctctgcctttgagctgcagaccatcctgagaagggttctagcaaagcgccaagatatcaagtcagatggcttcagcatcgagacatgcaaaattatggttgacatgctagattcggacgggagtggcaagctggggctgaaggagttctacattctctggacgaagattcaaaaataccaaaaaatttaccgagaaatcgacgttgacaggtctggtaccatgaattcctatgaaatgcggaaggcattagaagaagcaggtttcaagatgccctgtcaactccaccaagtcatcgttgctcggtttgcagatgaccagctcatcatcgattttgataattttgttcggtgtttggttcggctggaaacgctattcaagatatttaagcagctggatcccgagaatactggaacaatagagctcgaccttatctcttggctctgtttctcagtactttgaagttataactaatctgcctgaagacttctcatgatggaaaatcagccaaggactaagcttccatagaaatacactttgtatctggacctcaaaattatgggaacatttacttaaacggatgatcatagctgaaaataatgatactgtcaatttgagatagcagaagtttcacacatcaaagtaaaagatttgcatatcattatactaaatgcaaatgagtcgcttaacccttgacaaggtcaaagaaagctttaaatctgtaaatagtatacactttttacttttacacactttcctgttcatagcaatattaaatcaggaaaaaaaaatgcagggaggtatttaacagctgagcaaaaacattgagtcgctctcaaaggacacgaggcccttggcagggaatatttaaagcaacttcaagtttaaaatgcagctgttgattctaccaaacaacagtccaagattaccatttcccatgagccaactgggaaacatggtatatcatgaagtaatcttgtcaaggcatctggagagtccaggagagaagactcacctctgtcgcttgggttaaacaagagacaggttttgtagaatattgattggtaatagtaaatcgttctccttacaatcaagttcttgaccctattcggccttatacatctggtcttacaaagaccaaagggatcctgcgcttgatcaactgaaccagtatgccaaaaccaggcatccaatttgtaaaccaattatgataaaggacaaaataagctgtttgccacctcaaaactttatgaacttcaccaccactagtgtctgtccatggagttagaggggacatcacttagaagttcttatagaaaggacacaagtttgtttcctggctttaccttgggaaaatgctagcaacattatagaaattttgccttgttgccttatcttcttccaaatgtactgttaaataaaaataaagggttaccccatgcaatcaca

SEQ ID NO: 51233 - DNA, 1845 bp, Homo sapiens
tgctgaggtgatctagaggaccccaacgatggtcctcagctatcggctggcatctatgaggttccagaagagttaagtgggcagaccaacatccacctcagcaaaaacttcttcctgacgaatcgcgccagggagcgctcagacaccttcatcaacctccgggaggtgctcaaccgcttcaagctgccgccaggagagtacattctcgtgccttccaccttcgaacccaacaaggatggggatttctgcatccgggtcttttctgaaaagaaagctgactaccaagctgtcgatgatgaaatcgaggccaatcttgaagagttcgacatcagcgaggatgacattgatgatggattcaggagactgtttgcccagttggcaggagaggatgcggagatctctgcctttgagctgcagaccatcctgagaagggttctagcaaagcgccaagatatcaagtcagatggcttcagcatcgagacatgcaaaattatggttgacatgctagattcggacgggagtggcaagctggggctgaaggagttctacattctctggacgaagattcaaaaataccaaaaaatttaccgagaaatcgacgttgacaggtctggtaccatgaattcctatgaaatgcggaaggcattagaagaagcaggtttcaagatgccctgtcaactccaccaagtcatcgttgctcggtttgcagatgaccagctcatcatcgattttgataattttgttcggtgtttggttcggctggaaacgctattcaagatatttaagcagctggatcccgagaatactggaacaatagagctcgaccttatctcttggctctgtttctcagtactttgaagttataactaatctgcctgaagacttctcatgatggaaaatcagccaaggactaagcttccatagaaatacactttgtatctggacctcaaaattatgggaacatttacttaaacggatgatcatagctgaaaataatgatactgtcaatttgagatagcagaagtttcacacatcaaagtaaaagatttgcatatcattatactaaatgcaaatgagtcgcttaacccttgacaaggtcaaagaaagctttaaatctgtaaatagtatacactttttacttttacacactttcctgttcatagcaatattaaatcaggaaaaaaaaatgcagggaggtatttaacagctgagcaaaaacattgagtcgctctcaaaggacacgaggcccttggcagggaatatttaaagcaacttcaagtttaaaatgcagctgttgattctaccaaacaacagtccaagattaccatttcccatgagccaactgggaaacatggtatatcatgaagtaatcttgtcaaggcatctggagagtccaggagagaagactcacctctgtcgcttgggttaaacaagagacaggttttgtagaatattgattggtaatagtaaatcgttctccttacaatcaagttcttgaccctattcggccttatacatctggtcttacaaagaccaaagggatcctgcgcttgatcaactgaaccagtatgccaaaaccaggcatccaatttgtaaaccaattatgataaaggacaaaataagctgtttgccacctcaaaactttatgaacttcaccaccactagtgtctgtccatggagttagaggggacatcacttagaagttcttatagaaaggacacaagtttgtttcctggctttaccttgggaaaatgctagcaacattatagaaattttgccttgttgccttatcttcttccaaatgtactgttaaataaaaataaagggttaccccatgcaatcaca

SEQ ID NO: 51234 - DNA, 1920 bp, Homo sapiens
gtaccgccattatccctggcccgtgggggtggtccatgacatggtgtccactacctgctgctgtgggctgactctgcatgtgtcaggtggaagagggcacggaggtcatcacaccatcggcttggcatctatgaggttccagaggagttaagtgggcagaccaacatccacctcagcaaaaacttcttcctgacgaatcgcgccagggagcgctcagacaccttcatcaacctccgggaggtgctcaaccgcttcaagctgccgccaggagagtacattctcgtgccttccaccttcgaacccaacaaggatggggatttctgcatccgggtcttttctgaaaagaaagctgactaccaagctgtcgatgatgaaatcgaggccaatcttgaagagttcgacatcagcgaggatgacattgatgatggattcaggagactgtttgcccagttggcaggagaggatgcggagatctctgcctttgagctgcagaccatcctgagaagggttctagcaaagcgccaagatatcaagtcagatggcttcagcatcgagacatgcaaaattatggttgacatgctagattcggacgggagtggcaagctggggctgaaggagttctacattctctggacgaagattcaaaaataccaaaaaatttaccgagaaatcgacgttgacaggtctggtaccatgaattcctatgaaatgcggaaggcattagaagaagcaggtttcaagatgccctgtcaactccaccaagtcatcgttgctcggtttgcagatgaccagctcatcatcgattttgataattttgttcggtgtttggttcggctggaaacgctattcaagatatttaagcagctggatcccgagaatactggaacaatagagctcgaccttatctcttggctctgtttctcagtactttgaagttataactaatctgcctgaagacttctcatgatggaaaatcagccaaggactaagcttccatagaaatacactttgtatctggacctcaaaattatgggaacatttacttaaacggatgatcatagctgaaaataatgatactgtcaatttgagatagcagaagtttcacacatcaaagtaaaagatttgcatatcattatactaaatgcaaatgagtcgcttaacccttgacaaggtcaaagaaagctttaaatctgtaaatagtatacactttttacttttacacactttcctgttcatagcaatattaaatcaggaaaaaaaaatgcagggaggtatttaacagctgagcaaaaacattgagtcgctctcaaaggacacgaggcccttggcagggaatatttaaagcaacttcaagtttaaaatgcagctgttgattctaccaaacaacagtccaagattaccatttcccatgagccaactgggaaacatggtatatcatgaagtaatcttgtcaaggcatctggagagtccaggagagaagactcacctctgtcgcttgggttaaacaagagacaggttttgtagaatattgattggtaatagtaaatcgttctccttacaatcaagttcttgaccctattcggccttatacatctggtcttacaaagaccaaagggatcctgcgcttgatcaactgaaccagtatgccaaaaccaggcatccaatttgtaaaccaattatgataaaggacaaaataagctgtttgccacctcaaaactttatgaacttcaccaccactagtgtctgtccatggagttagaggggacatcacttagaagttcttatagaaaggacacaagtttgtttcctggctttaccttgggaaaatgctagcaacattatagaaattttgccttgttgccttatcttcttccaaatgtactgttaaataaaaataaagggttaccccatgcaatcaca

SEQ ID NO: 51235 - DNA, 1860 bp, Homo sapiens
gcttaaattctcctcctcctctgctgcactctatatttatctgttgaaattttcatgcactgaaaccatttctctatttattcctcattaagtgggcagaccaacatccacctcagcaaaaacttcttcctgacgaatcgcgccagggagcgctcagacaccttcatcaacctccgggaggtgctcaaccgcttcaagctgccgccaggagagtacattctcgtgccttccaccttcgaacccaacaaggatggggatttctgcatccgggtcttttctgaaaagaaagctgactaccaagctgtcgatgatgaaatcgaggccaatcttgaagagttcgacatcagcgaggatgacattgatgatggattcaggagactgtttgcccagttggcaggagaggatgcggagatctctgcctttgagctgcagaccatcctgagaagggttctagcaaagcgccaagatatcaagtcagatggcttcagcatcgagacatgcaaaattatggttgacatgctagattcggacgggagtggcaagctggggctgaaggagttctacattctctggacgaagattcaaaaataccaaaaaatttaccgagaaatcgacgttgacaggtctggtaccatgaattcctatgaaatgcggaaggcattagaagaagcaggtttcaagatgccctgtcaactccaccaagtcatcgttgctcggtttgcagatgaccagctcatcatcgattttgataattttgttcggtgtttggttcggctggaaacgctattcaagatatttaagcagctggatcccgagaatactggaacaatagagctcgaccttatctcttggctctgtttctcagtactttgaagttataactaatctgcctgaagacttctcatgatggaaaatcagccaaggactaagcttccatagaaatacactttgtatctggacctcaaaattatgggaacatttacttaaacggatgatcatagctgaaaataatgatactgtcaatttgagatagcagaagtttcacacatcaaagtaaaagatttgcatatcattatactaaatgcaaatgagtcgcttaacccttgacaaggtcaaagaaagctttaaatctgtaaatagtatacactttttacttttacacactttcctgttcatagcaatattaaatcaggaaaaaaaaatgcagggaggtatttaacagctgagcaaaaacattgagtcgctctcaaaggacacgaggcccttggcagggaatatttaaagcaacttcaagtttaaaatgcagctgttgattctaccaaacaacagtccaagattaccatttcccatgagccaactgggaaacatggtatatcatgaagtaatcttgtcaaggcatctggagagtccaggagagaagactcacctctgtcgcttgggttaaacaagagacaggttttgtagaatattgattggtaatagtaaatcgttctccttacaatcaagttcttgaccctattcggccttatacatctggtcttacaaagaccaaagggatcctgcgcttgatcaactgaaccagtatgccaaaaccaggcatccaatttgtaaaccaattatgataaaggacaaaataagctgtttgccacctcaaaactttatgaacttcaccaccactagtgtctgtccatggagttagaggggacatcacttagaagttcttatagaaaggacacaagtttgtttcctggctttaccttgggaaaatgctagcaacattatagaaattttgccttgttgccttatcttcttccaaatgtactgttaaataaaaataaagggttaccccatgcaatcaca

SEQ ID NO: 51236 - DNA, 3592 bp, Homo sapiens
gcggcgttcccggcgctcggcaggccgcaggatggcctggtcccgggccgggagcccagcaggccgggagcggctgaggccacaccccgcgggccgggccgcttccctccggtgaatcatcgctcgcagcggcggcgcccgcagtggccgcagcagcgcgccgggccctggccgcgccccagccgagcgcagcgcggagtcgccccgacctttctctgcgcagtacggccgccgggaccgcagcatggcgggcatcgcggccaagctggcgaaggaccgggaggcggccgaggggctgggctcccacgagagggccatcaagtacctcaaccaggactacgaggcgctgcggaacgagtgcctggaggccgggacgctcttccaggacccgtccttcccggccatcccctcggccctgggcttcaaggagttggggccctactccagcaaaacccggggcatcgagtggaagcgccccacggagatctgcgctgacccccagtttatcattggaggagccacccgcacagacatctgccaaggagccctaggtgactgctggctgctggcagccattgcctccctcaccttgaatgaagaaatcctggctcgagtcgtccccctaaaccagagcttccaggaaaactatgcagggatctttcacttccagttctggcaatacggcgagtgggtggaggtggtggtggatgacaggctgcccaccaaggacggggagctgctctttgtgcattcagccgaagggagcgagttctggagcgccctgctggagaaggcatacgccaagatcaacggatgctatgaagcactatcagggggtgccaccactgagggcttcgaagacttcaccggaggcattgctgagtggtatgagttgaagaagccccctcccaacctgttcaagatcatccagaaagctctgcaaaaaggctctctccttggctgctccatcgacatcaccagcgccgcggactcggaggccatcacgtttcagaagctggtgaaggggcacgcgtactcggtcaccggagccgaggaggttgaaagtaacggaagcctacagaaactgatccgcatccgaaatccctggggagaagtggagtggacagggcggtggaatgacaactgcccaagctggaacactatagacccagaggagagggaaaggctgaccagacggcatgaagatggagaattctggatgtctttcagtgacttcctgaggcactattcccgcctggagatctgtaacctgaccccagacactctcaccagcgatacctacaagaagtggaaactcaccaaaatggatgggaactggaggcggggctccaccgcgggaggttgcaggaactacccgaacacattctggatgaaccctcagtacctgatcaagctggaggaggaggatgaggacgaggaggatggggagagcggctgcaccttcctggtggggctcattcagaagcaccgacggcggcagaggaagatgggcgaggacatgcacaccatcggctttggcatctatgaggttccagaggagttaagtgggcagaccaacatccacctcagcaaaaacttcttcctgacgaatcgcgccagggagcgctcagacaccttcatcaacctccgggaggtgctcaaccgcttcaagctgccgccaggagagtacattctcgtgccttccaccttcgaacccaacaaggatggggatttctgcatccgggtcttttctgaaaagaaagctgactaccaagctgtcgatgatgaaatcgaggccaatcttgaagagttcgacatcagcgaggatgacattgatgatggattcaggagactgtttgcccagttggcaggagaggatgcggagatctctgcctttgagctgcagaccatcctgagaagggttctagcaaagcgccaagatatcaagtcagatggcttcagcatcgagacatgcaaaattatggttgacatgctagattcggacgggagtggcaagctggggctgaaggagttctacattctctggacgaagattcaaaaataccaaaaaatttaccgagaaatcgacgttgacaggtctggtaccatgaattcctatgaaatgcggaaggcattagaagaagcaggtttcaagatgccctgtcaactccaccaagtcatcgttgctcggtttgcagatgaccagctcatcatcgattttgataattttgttcggtgtttggttcggctggaaacgctattcaagatatttaagcagctggatcccgagaatactggaacaatagagctcgaccttatctcttggctctgtttctcagtactttgaagttataactaatctgcctgaagacttctcatgatggaaaatcagccaaggactaagcttccatagaaatacactttgtatctggacctcaaaattatgggaacatttacttaaacggatgatcatagctgaaaataatgatactgtcaatttgagatagcagaagtttcacacatcaaagtaaaagatttgcatatcattatactaaatgcaaatgagtcgcttaacccttgacaaggtcaaagaaagctttaaatctgtaaatagtatacactttttacttttacacactttcctgttcatagcaatattaaatcaggaaaaaaaaatgcagggaggtatttaacagctgagcaaaaacattgagtcgctctcaaaggacacgaggcccttggcagggaatatttaaagcaacttcaagtttaaaatgcagctgttgattctaccaaacaacagtccaagattaccatttcccatgagccaactgggaaacatggtatatcatgaagtaatcttgtcaaggcatctggagagtccaggagagaagactcacctctgtcgcttgggttaaacaagagacaggttttgtagaatattgattggtaatagtaaatcgttctccttacaatcaagttcttgaccctattcggccttatacatctggtcttacaaagaccaaagggatcctgcgcttgatcaactgaaccagtatgccaaaaccaggcatccaatttgtaaaccaattatgataaaggacaaaataagctgtttgccacctcaaaactttatgaacttcaccaccactagtgtctgtccatggagttagaggggacatcacttagaagttcttatagaaaggacacaagtttgtttcctggctttaccttgggaaaatgctagcaacattatagaaattttgccttgttgccttatcttcttccaaatgtactgttaaataaaaataaagggttaccccatgcaatcacaaaaaaaaaaaaaaaaaaaaaattggtgggggcgcgcccgggccccgagagaaagttttcaaaacccattccgttggggcgccggcggcccaggaggttatctgagaccctgggccaaaggcggggcccaaaggaaaccccggccatgacaggggcggggttccccaccaactaaaaaaaccgccggggcaccgcggtctgacaaccaggggggtccggggccatacgggcttacaacagggccaaggagcgagaatag

SEQ ID NO: 51237 - DNA, 3484 bp, Homo sapiens
gcggcgttcccggcgctcggcaggccgcaggatggcctggtcccgggccgggagcccagcaggccgggagcggctgaggccacaccccgcgggccgggccgcttccctccggtgaatcatcgctcgcagcggcggcgcccgcagtggccgcagcagcgcgccgggccctggccgcgccccagccgagcgcagcgcggagtcgccccgacctttctctgcgcagtacggccgccgggaccgcagcatggcgggcatcgcggccaagctggcgaaggaccgggaggcggccgaggggctgggctcccacgagagggccatcaagtacctcaaccaggactacgaggcgctgcggaacgagtgcctggaggccgggacgctcttccaggacccgtccttcccggccatcccctcggccctgggcttcaaggagttggggccctactccagcaaaacccggggcatcgagtggaagcgccccacggagatctgcgctgacccccagtttatcattggaggagccacccgcacagacatctgccaaggagccctaggtgactgctggctgctggcagccattgcctccctcaccttgaatgaagaaatcctggctcgagtcgtccccctaaaccagagcttccaggaaaactatgcagggatctttcacttccagttctggcaatacggcgagtgggtggaggtggtggtggatgacaggctgcccaccaaggacggggagctgctctttgtgcattcagccgaagggagcgagttctggagcgccctgctggagaaggcatacgccaagatcaacggatgctatgaagcactatcagggggtgccaccactgagggcttcgaagacttcaccggaggcattgctgagtggtatgagttgaagaagccccctcccaacctgttcaagatcatccagaaagctctgcaaaaaggctctctccttggctgctccatcgacatcaccagcgccgcggactcggaggccatcacgtttcagaagctggtgaaggggcacgcgtactcggtcaccggagccgaggaggttgaaagtaacggaagcctacagaaactgatccgcatccgaaatccctggggagaagtggagtggacagggcggtggaatgacaactgcccaagctggaacactatagacccagaggagagggaaaggctgaccagacggcatgaagatggagaattctggatgtctttcagtgacttcctgaggcactattcccgcctggagatctgtaacctgaccccagacactctcaccagcgatacctacaagaagtggaaactcaccaaaatggatgggaactggaggcggggctccaccgcgggaggttgcaggaactacccgaacacattctggatgaaccctcagtacctgatcaagctggaggaggaggatgaggacgaggaggatggggagagcggctgcaccttcctggtggggctcattcagaagcaccgacggcggcagaggaagatgggcgaggacatgcacaccatcggctttggcatctatgaggttccagaggagttaagtgggcagaccaacatccacctcagcaaaaacttcttcctgacgaatcgcgccagggagcgctcagacaccttcatcaacctccgggaggtgctcaaccgcttcaagctgccgccaggagagtacattctcgtgccttccaccttcgaacccaacaaggatggggatttctgcatccgggtcttttctgaaaagaaagctgactaccaagctgtcgatgatgaaatcgaggccaatcttgaagagttcgacatcagcgaggatgacattgatgatggattcaggagactgtttgcccagttggcaggagaggatgcggagatctctgcctttgagctgcagaccatcctgagaagggttctagcaaagcgccaagatatcaagtcagatggcttcagcatcgagacatgcaaaattatggttgacatgctagattcggacgggagtggcaagctggggctgaaggagttctacattctctggacgaagattcaaaaataccaaaaaatttaccgagaaatcgacgttgacaggtctggtaccatgaattcctatgaaatgcggaaggcattagaagaagcaggtttcaagatgccctgtcaactccaccaagtcatcgttgctcggtttgcagatgaccagctcatcatcgattttgataattttgttcggtgtttggttcggctggaaacgctattcaagatatttaagcagctggatcccgagaatactggaacaatagagctcgaccttatctcttggctctgtttctcagtactttgaagttataactaatctgcctgaagacttctcatgatggaaaatcagccaaggactaagcttccatagaaatacactttgtatctggacctcaaaattatgggaacatttacttaaacggatgatcatagctgaaaataatgatactgtcaatttgagatagcagaagtttcacacatcaaagtaaaagatttgcatatcattatactaaatgcaaatgagtcgcttaacccttgacaaggtcaaagaaagctttaaatctgtaaatagtatacactttttacttttacacactttcctgttcatagcaatattaaatcaggaaaaaaaaatgcagggaggtatttaacagctgagcaaaaacattgagtcgctctcaaaggacacgaggcccttggcagggaatatttaaagcaacttcaagtttaaaatgcagctgttgattctaccaaacaacagtccaagattaccatttcccatgagccaactgggaaacatggtatatcatgaagtaatcttgtcaaggcatctggagagtccaggagagaagactcacctctgtcgcttgggttaaacaagagacaggttttgtagaatattgattggtaatagtaaatcgttctccttacaatcaagttcttgaccctattcggccttatacatctggtcttacaaagaccaaagggatcctgcgcttgatcaactgaaccagtatgccaaaaccaggcatccaatttgtaaaccaattatgataaaggacaaaataagctgtttgccacctcaaaactttatgaacttcaccaccactagtgtctgtccatggagttagaggggacatcacttagaagttcttatagaaaggacacaagtttgtttcctggctttaccttgggaaaatgctagcaacattatagaaattttgccttgttgccttatcttcttccaaatgtactgttaaataaaaataaagggttaccccatgcaatcacaaaaaaaacacggaaacaacaacgacccaacacaacaaccaaagaaaagacacaacacaacgaaacaacacagcaatcaccctggaccacacgccaccccagcgacaacaacagagagaagaaggaccgacccgccgacgccaggagagag

SEQ ID NO: 51238 - DNA, 3312 bp, Homo sapiens
gcggcgttcccggcgctcggcaggccgcaggatggcctggtcccgggccgggagcccagcaggccgggagcggctgaggccacaccccgcgggccgggccgcttccctccggtgaatcatcgctcgcagcggcggcgcccgcagtggccgcagcagcgcgccgggccctggccgcgccccagccgagcgcagcgcggagtcgccccgacctttctctgcgcagtacggccgccgggaccgcagcatggcgggcatcgcggccaagctggcgaaggaccgggaggcggccgaggggctgggctcccacgagagggccatcaagtacctcaaccaggactacgaggcgctgcggaacgagtgcctggaggccgggacgctcttccaggacccgtccttcccggccatcccctcggccctgggcttcaaggagttggggccctactccagcaaaacccggggcatcgagtggaagcgccccacggagatctgcgctgacccccagtttatcattggaggagccacccgcacagacatctgccaaggagccctaggtgactgctggctgctggcagccattgcctccctcaccttgaatgaagaaatcctggctcgagtcgtccccctaaaccagagcttccaggaaaactatgcagggatctttcacttccagttctggcaatacggcgagtgggtggaggtggtggtggatgacaggctgcccaccaaggacggggagctgctctttgtgcattcagccgaagggagcgagttctggagcgccctgctggagaaggcatacgccaagatcaacggatgctatgaagcactatcagggggtgccaccactgagggcttcgaagacttcaccggaggcattgctgagtggtatgagttgaagaagccccctcccaacctgttcaagatcatccagaaagctctgcaaaaaggctctctccttggctgctccatcgacatcaccagcgccgcggactcggaggccatcacgtttcagaagctggtgaaggggcacgcgtactcggtcaccggagccgaggaggttgaaagtaacggaagcctacagaaactgatccgcatccgaaatccctggggagaagtggagtggacagggcggtggaatgacaactgcccaagctggaacactatagacccagaggagagggaaaggctgaccagacggcatgaagatggagaattctggatgtctttcagtgacttcctgaggcactattcccgcctggagatctgtaacctgaccccagacactctcaccagcgatacctacaagaagtggaaactcaccaaaatggatgggaactggaggcggggctccaccgcgggaggttgcaggaactacccgaacacattctggatgaaccctcagtacctgatcaagctggaggaggaggatgaggacgaggaggatggggagagcggctgcaccttcctggtggggctcattcagaagcaccgacggcggcagaggaagatgggcgaggacatgcacaccatcggctttggcatctatgaggttccagaggagttaagtgggcagaccaacatccacctcagcaaaaacttcttcctgacgaatcgcgccagggagcgctcagacaccttcatcaacctccgggaggtgctcaaccgcttcaagctgccgccaggagagtacattctcgtgccttccaccttcgaacccaacaaggatggggatttctgcatccgggtcttttctgaaaagaaagctgactaccaagctgtcgatgatgaaatcgaggccaatcttgaagagttcgacatcagcgaggatgacattgatgatggattcaggagactgtttgcccagttggcaggagaggatgcggagatctctgcctttgagctgcagaccatcctgagaagggttctagcaaagcgccaagatatcaagtcagatggcttcagcatcgagacatgcaaaattatggttgacatgctagattcggacgggagtggcaagctggggctgaaggagttctacattctctggacgaagattcaaaaataccaaaaaatttaccgagaaatcgacgttgacaggtctggtaccatgaattcctatgaaatgcggaaggcattagaagaagcaggtttcaagatgccctgtcaactccaccaagtcatcgttgctcggtttgcagatgaccagctcatcatcgattttgataattttgttcggtgtttggttcggctggaaacgctattcaagatatttaagcagctggatcccgagaatactggaacaatagagctcgaccttatctcttggctctgtttctcagtactttgaagttataactaatctgcctgaagacttctcatgatggaaaatcagccaaggactaagcttccatagaaatacactttgtatctggacctcaaaattatgggaacatttacttaaacggatgatcatagctgaaaataatgatactgtcaatttgagatagcagaagtttcacacatcaaagtaaaagatttgcatatcattatactaaatgcaaatgagtcgcttaacccttgacaaggtcaaagaaagctttaaatctgtaaatagtatacactttttacttttacacactttcctgttcatagcaatattaaatcaggaaaaaaaaatgcagggaggtatttaacagctgagcaaaaacattgagtcgctctcaaaggacacgaggcccttggcagggaatatttaaagcaacttcaagtttaaaatgcagctgttgattctaccaaacaacagtccaagattaccatttcccatgagccaactgggaaacatggtatatcatgaagtaatcttgtcaaggcatctggagagtccaggagagaagactcacctctgtcgcttgggttaaacaagagacaggttttgtagaatattgattggtaatagtaaatcgttctccttacaatcaagttcttgaccctattcggccttatacatctggtcttacaaagaccaaagggatcctgcgcttgatcaactgaaccagtatgccaaaaccaggcatccaatttgtaaaccaattatgataaaggacaaaataagctgtttgccacctcaaaactttatgaacttcaccaccactagtgtctgtccatggagttagaggggacatcacttagaagttcttatagaaaggacacaagtttgtttcctggctttaccttgggaaaatgctagcaacattatagaaattttgccttgttgccttatctgcgggacctctagatcacctgcgagcacac

SEQ ID NO: 51239 - DNA, 1766 bp, Homo sapiens
ggtcatagctgactccagaggaaaaaacaacgcctagtgacacagaggagttgacacttggcaaggttcttggggtaaaacccataatgaagctcagagtgagtaaagatggggctgaggaaatgcaaacaaaaaaccaaccaggacttcgcaggtgaaatggcctattcccttcctcctgattattgggatcatctaaaggccaccatcaagggtttcctgaaaagggtttttgacagctaaagtacaaaaattatataagacaagaacatggacctatgggcgttggctggctgatttgatgggcatatttacaaaccagtcacagacagaagcaaaatactattagttatttaaggcagaaacataagtgattcttccacggccaaactagaggcacagagctggaaaaacttcatccccactcagcacatactagggaggtaacttgccagctttgctttgggtcatagttcttacagctaacttatgtgttccagaaaatttaccgagaaatcgacgttgacaggtctggtaccatgaattcctatgaaatgcggaaggcattagaagaagcaggtttcaagatgccctgtcaactccaccaagtcatcgttgctcggtttgcagatgaccagctcatcatcgattttgataattttgttcggtgtttggttcggctggaaacgctattcaagatatttaagcagctggatcccgagaatactggaacaatagagctcgaccttatctcttggctctgtttctcagtactttgaagttataactaatctgcctgaagacttctcatgatggaaaatcagccaaggactaagcttccatagaaatacactttgtatctggacctcaaaattatgggaacatttacttaaacggatgatcatagctgaaaataatgatactgtcaatttgagatagcagaagtttcacacatcaaagtaaaagatttgcatatcattatactaaatgcaaatgagtcgcttaacccttgacaaggtcaaagaaagctttaaatctgtaaatagtatacactttttacttttacacactttcctgttcatagcaatattaaatcaggaaaaaaaaatgcagggaggtatttaacagctgagcaaaaacattgagtcgctctcaaaggacacgaggcccttggcagggaatatttaaagcaacttcaagtttaaaatgcagctgttgattctaccaaacaacagtccaagattaccatttcccatgagccaactgggaaacatggtatatcatgaagtaatcttgtcaaggcatctggagagtccaggagagaagactcacctctgtcgcttgggttaaacaagagacaggttttgtagaatattgattggtaatagtaaatcgttctccttacaatcaagttcttgaccctattcggccttatacatctggtcttacaaagaccaaagggatcctgcgcttgatcaactgaaccagtatgccaaaaccaggcatccaatttgtaaaccaattatgataaaggacaaaataagctgtttgccacctcaaaactttatgaacttcaccaccactagtgtctgtccatggagttagaggggacatcacttagaagttcttatagaaaggacacaagtttgtttcctggctttaccttgggaaaatgctagcaacattatagaaattttgccttgttgccttatcttcttccaaatgtactgttaaataaaaataaagggttaccccatgcaatcaca

SEQ ID NO: 51240 - DNA, 3280 bp, Homo sapiens
gcggcgttcccggcgctcggcaggccgcaggatggcctggtcccgggccgggagcccagcaggccgggagcggctgaggccacaccccgcgggccgggccgcttccctccggtgaatcatcgctcgcagcggcggcgcccgcagtggccgcagcagcgcgccgggccctggccgcgccccagccgagcgcagcgcggagtcgccccgacctttctctgcgcagtacggccgccgggaccgcagcatggcgggcatcgcggccaagctggcgaaggaccgggaggcggccgaggggctgggctcccacgagagggccatcaagtacctcaaccaggactacgaggcgctgcggaacgagtgcctggaggccgggacgctcttccaggacccgtccttcccggccatcccctcggccctgggcttcaaggagttggggccctactccagcaaaacccggggcatcgagtggaagcgccccacggagatctgcgctgacccccagtttatcattggaggagccacccgcacagacatctgccaaggagccctaggtgactgctggctgctggcagccattgcctccctcaccttgaatgaagaaatcctggctcgagtcgtccccctaaaccagagcttccaggaaaactatgcagggatctttcacttccagttctggcaatacggcgagtgggtggaggtggtggtggatgacaggctgcccaccaaggacggggagctgctctttgtgcattcagccgaagggagcgagttctggagcgccctgctggagaaggcatacgccaagatcaacggatgctatgaagcactatcagggggtgccaccactgagggcttcgaagacttcaccggaggcattgctgagtggtatgagttgaagaagccccctcccaacctgttcaagatcatccagaaagctctgcaaaaaggctctctccttggctgctccatcgacatcaccagcgccgcggactcggaggccatcacgtttcagaagctggtgaaggggcacgcgtactcggtcaccggagccgaggaggttgaaagtaacggaagcctacagaaactgatccgcatccgaaatccctggggagaagtggagtggacagggcggtggaatgacaactgcccaagctggaacactatagacccagaggagagggaaaggctgaccagacggcatgaagatggagaattctggatgtctttcagtgacttcctgaggcactattcccgcctggagatctgtaacctgaccccagacactctcaccagcgatacctacaagaagtggaaactcaccaaaatggatgggaactggaggcggggctccaccgcgggaggttgcaggaactacccgaacacattctggatgaaccctcagtacctgatcaagctggaggaggaggatgaggacgaggaggatggggagagcggctgcaccttcctggtggggctcattcagaagcaccgacggcggcagaggaagatgggcgaggacatgcacaccatcggctttggcatctatgaggttccagaggagttaagtgggcagaccaacatccacctcagcaaaaacttcttcctgacgaatcgcgccagggagcgctcagacaccttcatcaacctccgggaggtgctcaaccgcttcaagctgccgccaggagagtacattctcgtgccttccaccttcgaacccaacaaggatggggatttctgcatccgggtcttttctgaaaagaaagctgactaccaagctgtcgatgatgaaatcgaggccaatcttgaagagttcgacatcagcgaggatgacattgatgatggattcaggagactgtttgcccagttggcaggagaggatgcggagatctctgcctttgagctgcagaccatcctgagaagggttctagcaaagcgccaagatatcaagtcagatggcttcagcatcgagacatgcaaaattatggttgacatgctagattcggacgggagtggcaagctggggctgaaggagttctacattctctggacgaagattcaaaaataccaaaaaatttaccgagaaatcgacgttgacaggtctggtaccatgaattcctatgaaatgcggaaggcattagaagaagcaggtttcaagatgccctgtcaactccaccaagtcatcgttgctcggtttgcagatgaccagctcatcatcgattttgataattttgttcggtgtttggttcggctggaaacgctattcaagatatttaagcagctggatcccgagaatactggaacaatagagctcgaccttatctcttggctctgtttctcagtactttgaagttataactaatctgcctgaagacttctcatgatggaaaatcagccaaggactaagcttccatagaaatacactttgtatctggacctcaaaattatgggaacatttacttaaacggatgatcatagctgaaaataatgatactgtcaatttgagatagcagaagtttcacacatcaaagtaaaagatttgcatatcattatactaaatgcaaatgagtcgcttaacccttgacaaggtcaaagaaagctttaaatctgtaaatagtatacactttttacttttacacactttcctgttcatagcaatattaaatcaggaaaaaaaaatgcagggaggtatttaacagctgagcaaaaacattgagtcgctctcaaaggacacgaggcccttggcagggaatatttaaagcaacttcaagtttaaaatgcagctgttgattctaccaaacaacagtccaagattaccatttcccatgagccaactgggaaacatggtatatcatgaagtaatcttgtcaaggcatctggagagtagaatattgattggtaatagtaaatcgttctccttacaatcaagttcttgaccctattcggccttatacatctggtcttacaaagaccaaagggatcctgcgcttgatcaactgaaccagtatgccaaaaccaggcatccaatttgtaaaccaattatgataaaggacaaaataagctgtttgccacctcaaaactttatgaacttcaccaccactagtgtctgtccatggagttagaggggacatcacttagaagttcttatagaaaggacacaagtttgtttcctggctttaccttgggaaaatgctagcaacattatagaaattttgccttgttgccttatcttcttccaaatgtactgttaaataaaaataaagggttaccccatgcaatcaca

SEQ ID NO: 51241 - DNA, 1537 bp, Homo sapiens
cccttaacctccacaggtaattcaacaaaactgctctccagaacactacgagccacagcttcaacttcaaaggacctgcggtgcttcatatccctctagaggagcctgttctgtaatcgataacccccgatcaacctcaccacctcttgctcagcctatatacccccatcttcagcaaaccctgatgaaggctaccaagtaagcgcaagtacccacgtaaagacgttaggtcaaggtgtagcccatgaggtggcaagaaatgggctacattttctaccccagaaaactgcgatagcccttatgaaacttaagcggatcagcgctgatccgttaggcattagaagaagcaggtttcaagatgccctgtcaactccaccaagtcatcgttgctcggtttgcagatgaccagctcatcatcgattttgataattttgttcggtgtttggttcggctggaaacgctattcaagatatttaagcagctggatcccgagaatactggaacaatagagctcgaccttatctcttggctctgtttctcagtactttgaagttataactaatctgcctgaagacttctcatgatggaaaatcagccaaggactaagcttccatagaaatacactttgtatctggacctcaaaattatgggaacatttacttaaacggatgatcatagctgaaaataatgatactgtcaatttgagatagcagaagtttcacacatcaaagtaaaagatttgcatatcattatactaaatgcaaatgagtcgcttaacccttgacaaggtcaaagaaagctttaaatctgtaaatagtatacactttttacttttacacactttcctgttcatagcaatattaaatcaggaaaaaaaaatgcagggaggtatttaacagctgagcaaaaacattgagtcgctctcaaaggacacgaggcccttggcagggaatatttaaagcaacttcaagtttaaaatgcagctgttgattctaccaaacaacagtccaagattaccatttcccatgagccaactgggaaacatggtatatcatgaagtaatcttgtcaaggcatctggagagtccaggagagaagactcacctctgtcgcttgggttaaacaagagacaggttttgtagaatattgattggtaatagtaaatcgttctccttacaatcaagttcttgaccctattcggccttatacatctggtcttacaaagaccaaagggatcctgcgcttgatcaactgaaccagtatgccaaaaccaggcatccaatttgtaaaccaattatgataaaggacaaaataagctgtttgccacctcaaaactttatgaacttcaccaccactagtgtctgtccatggagttagaggggacatcacttagaagttcttatagaaaggacacaagtttgtttcctggctttaccttgggaaaatgctagcaacattatagaaattttgccttgttgccttatcttcttccaaatgtactgttaaataaaaataaagggttaccccatgcaatcaca

SEQ ID NO: 51242 - DNA, 1166 bp, Homo sapiens
ttgacaagattacttcatgatataccatgtttcccagttggctcatgggaaatggtaatcttggactgttgtttggttcggtggaaacgctattcaagatatttaagcagctggatcccgagaatactggaacaatagagctcgaccttatctcttggctctgtttctcagtactttgaagttataactaatctgcctgaagacttctcatgatggaaaatcagccaaggactaagcttccatagaaatacactttgtatctggacctcaaaattatgggaacatttacttaaacggatgatcatagctgaaaataatgatactgtcaatttgagatagcagaagtttcacacatcaaagtaaaagatttgcatatcattatactaaatgcaaatgagtcgcttaacccttgacaaggtcaaagaaagctttaaatctgtaaatagtatacactttttacttttacacactttcctgttcatagcaatattaaatcaggaaaaaaaaatgcagggaggtatttaacagctgagcaaaaacattgagtcgctctcaaaggacacgaggcccttggcagggaatatttaaagcaacttcaagtttaaaatgcagctgttgattctaccaaacaacagtccaagattaccatttcccatgagccaactgggaaacatggtatatcatgaagtaatcttgtcaaggcatctggagagtccaggagagaagactcacctctgtcgcttgggttaaacaagagacaggttttgtagaatattgattggtaatagtaaatcgttctccttacaatcaagttcttgaccctattcggccttatacatctggtcttacaaagaccaaagggatcctgcgcttgatcaactgaaccagtatgccaaaaccaggcatccaatttgtaaaccaattatgataaaggacaaaataagctgtttgccacctcaaaactttatgaacttcaccaccactagtgtctgtccatggagttagaggggacatcacttagaagttcttatagaaaggacacaagtttgtttcctggctttaccttgggaaaatgctagcaacattatagaaattttgccttgttgccttatcttcttccaaatgtactgttaaataaaaataaagggttaccccatgcaatcaca

SEQ ID NO: 51243 - DNA, 1077 bp, Homo sapiens
ctttgaagttataactaatctgcctgaagacttcaaagtactgagaaacagagccaagagataaggtggctctgtttctcagtactttgaagttataactaatctgcctgaagacttctcatgatggaaaatcagccaaggactaagcttccatagaaatacactttgtatctggacctcaaaattatgggaacatttacttaaacggatgatcatagctgaaaataatgatactgtcaatttgagatagcagaagtttcacacatcaaagtaaaagatttgcatatcattatactaaatgcaaatgagtcgcttaacccttgacaaggtcaaagaaagctttaaatctgtaaatagtatacactttttacttttacacactttcctgttcatagcaatattaaatcaggaaaaaaaaatgcagggaggtatttaacagctgagcaaaaacattgagtcgctctcaaaggacacgaggcccttggcagggaatatttaaagcaacttcaagtttaaaatgcagctgttgattctaccaaacaacagtccaagattaccatttcccatgagccaactgggaaacatggtatatcatgaagtaatcttgtcaaggcatctggagagtccaggagagaagactcacctctgtcgcttgggttaaacaagagacaggttttgtagaatattgattggtaatagtaaatcgttctccttacaatcaagttcttgaccctattcggccttatacatctggtcttacaaagaccaaagggatcctgcgcttgatcaactgaaccagtatgccaaaaccaggcatccaatttgtaaaccaattatgataaaggacaaaataagctgtttgccacctcaaaactttatgaacttcaccaccactagtgtctgtccatggagttagaggggacatcacttagaagttcttatagaaaggacacaagtttgtttcctggctttaccttgggaaaatgctagcaacattatagaaattttgccttgttgccttatcttcttccaaatgtactgttaaataaaaataaagggttaccccatgcaatcaca

SEQ ID NO: 51244 - DNA, 3877 bp, Homo sapiens
  misc_feature (3318)..(3318): n is a, c, g, or t
gcggcgttcccggcgctcggcaggccgcaggatggcctggtcccgggccgggagcccagcaggccgggagcggctgaggccacaccccgcgggccgggccgcttccctccggtgaatcatcgctcgcagcggcggcgcccgcagtggccgcagcagcgcgccgggccctggccgcgccccagccgagcgcagcgcggagtcgccccgacctttctctgcgcagtacggccgccgggaccgcagcatggcgggcatcgcggccaagctggcgaaggaccgggaggcggccgaggggctgggctcccacgagagggccatcaagtacctcaaccaggactacgaggcgctgcggaacgagtgcctggaggccgggacgctcttccaggacccgtccttcccggccatcccctcggccctgggcttcaaggagttggggccctactccagcaaaacccggggcatcgagtggaagcgccccacggagatctgcgctgacccccagtttatcattggaggagccacccgcacagacatctgccaaggagccctaggtgactgctggctgctggcagccattgcctccctcaccttgaatgaagaaatcctggctcgagtcgtccccctaaaccagagcttccaggaaaactatgcagggatctttcacttccagttctggcaatacggcgagtgggtggaggtggtggtggatgacaggctgcccaccaaggacggggagctgctctttgtgcattcagccgaagggagcgagttctggagcgccctgctggagaaggcatacgccaagatcaacggatgctatgaagcactatcagggggtgccaccactgagggcttcgaagacttcaccggaggcattgctgagtggtatgagttgaagaagccccctcccaacctgttcaagatcatccagaaagctctgcaaaaaggctctctccttggctgctccatcgacatcaccagcgccgcggactcggaggccatcacgtttcagaagctggtgaaggggcacgcgtactcggtcaccggagccgaggaggttgaaagtaacggaagcctacagaaactgatccgcatccgaaatccctggggagaagtggagtggacagggcggtggaatgacaactgcccaagctggaacactatagacccagaggagagggaaaggctgaccagacggcatgaagatggagaattctggatgtctttcagtgacttcctgaggcactattcccgcctggagatctgtaacctgaccccagacactctcaccagcgatacctacaagaagtggaaactcaccaaaatggatgggaactggaggcggggctccaccgcgggaggttgcaggaactacccgaacacattctggatgaaccctcagtacctgatcaagctggaggaggaggatgaggacgaggaggatggggagagcggctgcaccttcctggtggggctcattcagaagcaccgacggcggcagaggaagatgggcgaggacatgcacaccatcggctttggcatctatgaggttccagaggagttaagtgggcagaccaacatccacctcagcaaaaacttcttcctgacgaatcgcgccagggagcgctcagacaccttcatcaacctccgggaggtgctcaaccgcttcaagctgccgccaggagagtacattctcgtgccttccaccttcgaacccaacaaggatggggatttctgcatccgggtcttttctgaaaagaaagctgactaccaagctgtcgatgatgaaatcgaggccaatcttgaagagttcgacatcagcgaggatgacattgatgatggattcaggagactgtttgcccagttggcaggagaggatgcggagatctctgcctttgagctgcagaccatcctgagaagggttctagcaaagcgccaagatatcaagtcagatggcttcagcatcgagacatgcaaaattatggttgacatgctagattcggacgggagtggcaagctggggctgaaggagttctacattctctggacgaagattcaaaaataccaagtaagatcccagagatgcgggtggatctgtgttgggaaacattctgttcatatgctttaagatgcagcaactcctgcacagagtggagaaacatttccaaggggattgggattttacccataatgaagctcagagtgagtaaagatggggctgaggaaatgcaaacaaaaaaccaaccaggacttcgcaggtgaaatggcctattcccttcctcctgattattgggatcatctaaaggccaccatcaagggtttcctgaaaagggtttttgacagctaaagtacaaaaattatataagacaagaacatggacctatgggcgttggctggctgatttgatgggcatatttacaaaccagtcacagacagaagcaaaatactattagttatttaaggcagaaacataagtgattcttccacggccaaactagaggcacagagctggaaaaacttcatccccactcagcacatactagggaggtaacttgccagctttgctttgggtcatagttcttacagctaacttatgtgttccagaaaatttaccgagaaatcgacgttgacaggtctggtaccatgaattcctatgaaatgcggaaggcattagaagaagcaggtttcaagatgccctgtcaactccaccaagtcatcgttgctcggtttgcagatgaccagctcatcatcgattttgataattttgttcggtgtttggttcggctggaaacgctattcaagatatttaagcagctggatcccgagaatactggaacaatagagctcgaccttatctctgtgagtcagcaggccccgccttgcttctaaggggatgggggaggcatggggcggaaagggctgttacttgagtgatctgctttttcaagttttgctttaaagagctcttggtctgtcggggccaggcctgtaaccggttgtaagatcccacaatgcacttttacttgcagttgttttccaaccacctattctcaagtccaaaatgcacgcctggctccctcttctcatgagctttgacttgagtgtagctcaaggttaaactaaggagtggctgcaggatcatgcttagaaaaatgaactcctgattagcatgcaagggagaacatgtttatataaagaaatccttcagctgaaattcaagttgggttttgggaagatccatcattcttagagtggatctacttaaaatactttaagcaaattagttttctctactccctccccgtttaagataaaacnaatactagtaaatacgtttgccatttattattgttattgcactcatgtgtctggaaccctagcaatacacatctctgaaatgatcatcaatctgaattaagtgggtatgctaatttcacaaaaagcaaagcgtaaaatgttctcgtgtcatcccaatgacaggaagttctctcactgaaagaaagaagccaggtggggtatacttccattatcacctggctccagtcagcatttcctctatactcagggaaggccacagagggccgggcgaagtggctgacactgggtgagaatggcagttgtcagtcctgtccgtgtaacagaggagtgaagtggtgaggagggcaggtctaaggcactggcagctcttttccatggattttgaactctggaggaaggcagcaactaaataactgtctcattctgctattatgcattgtattagcaaagtgaaaatatagtctatctggttacaaataacactaacttgcttaaaactttacatatcctaggaaatatctctacccctagattgcaatgtagagtcaaccccatctct

SEQ ID NO: 51245 - DNA, 3171 bp, Homo sapiens
  misc_feature (2612)..(2612): n is a, c, g, or t
gcggcgttcccggcgctcggcaggccgcaggatggcctggtcccgggccgggagcccagcaggccgggagcggctgaggccacaccccgcgggccgggccgcttccctccggtgaatcatcgctcgcagcggcggcgcccgcagtggccgcagcagcgcgccgggccctggccgcgccccagccgagcgcagcgcggagtcgccccgacctttctctgcgcagtacggccgccgggaccgcagcatggcgggcatcgcggccaagctggcgaaggaccgggaggcggccgaggggctgggctcccacgagagggccatcaagtacctcaaccaggactacgaggcgctgcggaacgagtgcctggaggccgggacgctcttccaggacccgtccttcccggccatcccctcggccctgggcttcaaggagttggggccctactccagcaaaacccggggcatcgagtggaagcgccccacggagatctgcgctgacccccagtttatcattggaggagccacccgcacagacatctgccaaggagccctaggtgactgctggctgctggcagccattgcctccctcaccttgaatgaagaaatcctggctcgagtcgtccccctaaaccagagcttccaggaaaactatgcagggatctttcacttccagttctggcaatacggcgagtgggtggaggtggtggtggatgacaggctgcccaccaaggacggggagctgctctttgtgcattcagccgaagggagcgagttctggagcgccctgctggagaaggcatacgccaagatcaacggatgctatgaagcactatcagggggtgccaccactgagggcttcgaagacttcaccggaggcattgctgagtggtatgagttgaagaagccccctcccaacctgttcaagatcatccagaaagctctgcaaaaaggctctctccttggctgctccatcgacatcaccagcgccgcggactcggaggccatcacgtttcagaagctggtgaaggggcacgcgtactcggtcaccggagccgaggaggttgaaagtaacggaagcctacagaaactgatccgcatccgaaatccctggggagaagtggagtggacagggcggtggaatgacaactgcccaagctggaacactatagacccagaggagagggaaaggctgaccagacggcatgaagatggagaattctggatgtctttcagtgacttcctgaggcactattcccgcctggagatctgtaacctgaccccagacactctcaccagcgatacctacaagaagtggaaactcaccaaaatggatgggaactggaggcggggctccaccgcgggaggttgcaggaactacccgaacacattctggatgaaccctcagtacctgatcaagctggaggaggaggatgaggacgaggaggatggggagagcggctgcaccttcctggtggggctcattcagaagcaccgacggcggcagaggaagatgggcgaggacatgcacaccatcggctttggcatctatgaggttccagaggagttaagtgggcagaccaacatccacctcagcaaaaacttcttcctgacgaatcgcgccagggagcgctcagacaccttcatcaacctccgggaggtgctcaaccgcttcaagctgccgccaggagagtacattctcgtgccttccaccttcgaacccaacaaggatggggatttctgcatccgggtcttttctgaaaagaaagctgactaccaagctgtcgatgatgaaatcgaggccaatcttgaagagttcgacatcagcgaggatgacattgatgatggattcaggagactgtttgcccagttggcaggagaggatgcggagatctctgcctttgagctgcagaccatcctgagaagggttctagcaaagcgccaagatatcaagtcagatggcttcagcatcgagacatgcaaaattatggttgacatgctagattcggacgggagtggcaagctggggctgaaggagttctacattctctggacgaagattcaaaaataccaaaaaatttaccgagaaatcgacgttgacaggtctggtaccatgaattcctatgaaatgcggaaggcattagaagaagcaggtttcaagatgccctgtcaactccaccaagtcatcgttgctcggtttgcagatgaccagctcatcatcgattttgataattttgttcggtgtttggttcggctggaaacgctattcaagatatttaagcagctggatcccgagaatactggaacaatagagctcgaccttatctctttgttttccaaccacctattctcaagtccaaaatgcacgcctggctccctcttctcatgagctttgacttgagtgtagctcaaggttaaactaaggagtggctgcaggatcatgcttagaaaaatgaactcctgattagcatgcaagggagaacatgtttatataaagaaatccttcagctgaaattcaagttgggttttgggaagatccatcattcttagagtggatctacttaaaatactttaagcaaattagttttctctactccctccccgtttaagataaaacnaatactagtaaatacgtttgccatttattattgttattgcactcatgtgtctggaaccctagcaatacacatctctgaaatgatcatcaatctgaattaagtgggtatgctaatttcacaaaaagcaaagcgtaaaatgttctcgtgtcatcccaatgacaggaagttctctcactgaaagaaagaagccaggtggggtatacttccattatcacctggctccagtcagcatttcctctatactcagggaaggccacagagggccgggcgaagtggctgacactgggtgagaatggcagttgtcagtcctgtccgtgtaacagaggagtgaagtggtgaggagggcaggtctaaggcactggcagctcttttccatggattttgaactctggaggaaggcagcaactaaataactgtctcattctgctattatgcattgtattagcaaagtgaaaatatagtctatctggttacaaataacactaacttgcttaaaactttacatatcctaggaaatatctctacccctagattgcaatgtagagtcaaccccatctct

SEQ ID NO: 51246 - DNA, 2027 bp, Homo sapiens
gcggcgttcccggcgctcggcaggccgcaggatggcctggtcccgggccgggagcccagcaggccgggagcggctgaggccacaccccgcgggccgggccgcttccctccggtgaatcatcgctcgcagcggcggcgcccgcagtggccgcagcagcgcgccgggccctggccgcgccccagccgagcgcagcgcggagtcgccccgacctttctctgcgcagtacggccgccgggaccgcagcatggcgggcatcgcggccaagctggcgaaggaccgggaggcggccgaggggctgggctcccacgagagggccatcaagtacctcaaccaggactacgaggcgctgcggaacgagtgcctggaggccgggacgctcttccaggacccgtccttcccggccatcccctcggccctgggcttcaaggagttggggccctactccagcaaaacccggggcatcgagtggaagcgccccacggagatctgcgctgacccccagtttatcattggaggagccacccgcacagacatctgccaaggagccctaggtgactgctggctgctggcagccattgcctccctcaccttgaatgaagaaatcctggctcgagtcgtccccctaaaccagagcttccaggaaaactatgcagggatctttcacttccagttctggcaatacggcgagtgggtggaggtggtggtggatgacaggctgcccaccaaggacggggagctgctctttgtgcattcagccgaagggagcgagttctggagcgccctgctggagaaggcatacgccaagatcaacggatgctatgaagcactatcagggggtgccaccactgagggcttcgaagacttcaccggaggcattgctgagtggtatgagttgaagaagccccctcccaacctgttcaagatcatccagaaagctctgcaaaaaggctctctccttggctgctccatcgacatcaccagcgccgcggactcggaggccatcacgtttcagaagctggtgaaggggcacgcgtactcggtcaccggagccgaggaggttgaaagtaacggaagcctacagaaactgatccgcatccgaaatccctggggagaagtggagtggacagggcggtggaatgacaactgcccaagctggaacactatagacccagaggagagggaaaggctgaccagacggcatgaagatggagaattctggatgtctttcagtgacttcctgaggcactattcccgcctggagatctgtaacctgaccccagacactctcaccagcgatacctacaagaagtggaaactcaccaaaatggatgggaactggaggcggggctccaccgcgggaggttgcaggaactacccgaacacattctggatgaaccctcagtacctgatcaagctggaggaggaggatgaggacgaggaggatggggagagcggctgcaccttcctggtggggctcattcagaagcaccgacggcggcagaggaagatgggcgaggacatgcacaccatcggctttggcatctatgaggttccagaggagttaagtgggcagaccaacatccacctcagcaaaaacttcttcctgacgaatcgcgccagggagcgctcagacaccttcatcaacctccgggaggtgctcaaccgcttcaagctgccgccaggagagtacattctcgtgccttccaccttcgaacccaacaaggatggggatttctgcatccgggtcttttctgaaaagaaagctgactaccaagctgtcgatgatgaaatcgaggccaatcttgaagagttcgacatcagcgaggatgacattgatgatggattcaggagactgtttgcccagttggcaggagaggatgcggagatctctgcctttgagctgcagaccatcctgagaagggttctagcaaagcgccaagatatcaagtcagatggcttcagcatcgagacatgcaaaattatggttgacatgctagattcggcccggctagtcgccaagcctggct

SEQ ID NO: 51247 - DNA, 1809 bp, Homo sapiens
gcggcgttcccggcgctcggcaggccgcaggatggcctggtcccgggccgggagcccagcaggccgggagcggctgaggccacaccccgcgggccgggccgcttccctccggtgaatcatcgctcgcagcggcggcgcccgcagtggccgcagcagcgcgccgggccctggccgcgccccagccgagcgcagcgcggagtcgccccgacctttctctgcgcagtacggccgccgggaccgcagcatggcgggcatcgcggccaagctggcgaaggaccgggaggcggccgaggggctgggctcccacgagagggccatcaagtacctcaaccaggactacgaggcgctgcggaacgagtgcctggaggccgggacgctcttccaggacccgtccttcccggccatcccctcggccctgggcttcaaggagttggggccctactccagcaaaacccggggcatcgagtggaagcgccccacggagatctgcgctgacccccagtttatcattggaggagccacccgcacagacatctgccaaggagccctaggtgactgctggctgctggcagccattgcctccctcaccttgaatgaagaaatcctggctcgagtcgtccccctaaaccagagcttccaggaaaactatgcagggatctttcacttccagttctggcaatacggcgagtgggtggaggtggtggtggatgacaggctgcccaccaaggacggggagctgctctttgtgcattcagccgaagggagcgagttctggagcgccctgctggagaaggcatacgccaagatcaacggatgctatgaagcactatcagggggtgccaccactgagggcttcgaagacttcaccggaggcattgctgagtggtatgagttgaagaagccccctcccaacctgttcaagatcatccagaaagctctgcaaaaaggctctctccttggctgctccatcgacatcaccagcgccgcggactcggaggccatcacgtttcagaagctggtgaaggggcacgcgtactcggtcaccggagccgaggaggttgaaagtaacggaagcctacagaaactgatccgcatccgaaatccctggggagaagtggagtggacagggcggtggaatgacaactgcccaagctggaacactatagacccagaggagagggaaaggctgaccagacggcatgaagatggagaattctggatgtctttcagtgacttcctgaggcactattcccgcctggagatctgtaacctgaccccagacactctcaccagcgatacctacaagaagtggaaactcaccaaaatggatgggaactggaggcggggctccaccgcgggaggttgcaggaactacccgaacacattctggatgaaccctcagtacctgatcaagctggaggaggaggatgaggacgaggaggatggggagagcggctgcaccttcctggtggggctcattcagaagcaccgacggcggcagaggaagatgggcgaggacatgcacaccatcggctttggcatctatgaggttccagaggaggttccagaggaggtacgtctggcccatgtcccggggtgctcaggtcaccaaaaaagcgagaggcttagactgctggagctcagggagcgtcgtgaagcccgggcaggggctggtggtcatgaaggatgagtcctggccacccctggggccctgctgaagttgcccaggctctagatcccactggtctaagctctgggcaaggtttctggaaagtccttgtgggacccgctgcctccctgtgacctggc

SEQ ID NO: 51248 - DNA, 1592 bp, Homo sapiens
gcggcgttcccggcgctcggcaggccgcaggatggcctggtcccgggccgggagcccagcaggccgggagcggctgaggccacaccccgcgggccgggccgcttccctccggtgaatcatcgctcgcagcggcggcgcccgcagtggccgcagcagcgcgccgggccctggccgcgccccagccgagcgcagcgcggagtcgccccgacctttctctgcgcagtacggccgccgggaccgcagcatggcgggcatcgcggccaagctggcgaaggaccgggaggcggccgaggggctgggctcccacgagagggccatcaagtacctcaaccaggactacgaggcgctgcggaacgagtgcctggaggccgggacgctcttccaggacccgtccttcccggccatcccctcggccctgggcttcaaggagttggggccctactccagcaaaacccggggcatcgagtggaagcgccccacggagatctgcgctgacccccagtttatcattggaggagccacccgcacagacatctgccaaggagccctaggtgactgctggctgctggcagccattgcctccctcaccttgaatgaagaaatcctggctcgagtcgtccccctaaaccagagcttccaggaaaactatgcagggatctttcacttccagttctggcaatacggcgagtgggtggaggtggtggtggatgacaggctgcccaccaaggacggggagctgctctttgtgcattcagccgaagggagcgagttctggagcgccctgctggagaaggcatacgccaagatcaacggatgctatgaagcactatcagggggtgccaccactgagggcttcgaagacttcaccggaggcattgctgagtggtatgagttgaagaagccccctcccaacctgttcaagatcatccagaaagctctgcaaaaaggctctctccttggctgctccatcgacatcaccagcgccgcggactcggaggccatcacgtttcagaagctggtgaaggggcacgcgtactcggtcaccggagccgaggaggttgaaagtaacggaagcctacagaaactgatccgcatccgaaatccctggggagaagtggagtggacagggcggtggaatgacaactgcccaagctggaacactatagacccagaggagagggaaaggctgaccagacggcatgaagatggagaattctggatgtctttcagtgacttcctgaggcactattcccgcctggagatctgtaacctgaccccagacactctcaccagcgatacctacaagaagtggaaactcaccaaaatggatgggaactggaggcggggctccaccgcgggaggttgcaggaactacccgaacacattctggatgaaccctcagtacctgatcaagctggaggaggaggatgaggacgaggaggatggggagagcggctgcaccttcctggtggggctcattcagaagcaccgacggcggcagcttgaagcgttgaacaacagcacgaagaaagaaaaggtgactgaggcgcacccggcgcgattcgtcaggaagaagatatgcaaaggtgatg

SEQ ID NO: 51249 - DNA, 1506 bp, Homo sapiens
gcggcgttcccggcgctcggcaggccgcaggatggcctggtcccgggccgggagcccagcaggccgggagcggctgaggccacaccccgcgggccgggccgcttccctccggtgaatcatcgctcgcagcggcggcgcccgcagtggccgcagcagcgcgccgggccctggccgcgccccagccgagcgcagcgcggagtcgccccgacctttctctgcgcagtacggccgccgggaccgcagcatggcgggcatcgcggccaagctggcgaaggaccgggaggcggccgaggggctgggctcccacgagagggccatcaagtacctcaaccaggactacgaggcgctgcggaacgagtgcctggaggccgggacgctcttccaggacccgtccttcccggccatcccctcggccctgggcttcaaggagttggggccctactccagcaaaacccggggcatcgagtggaagcgccccacggagatctgcgctgacccccagtttatcattggaggagccacccgcacagacatctgccaaggagccctaggtgactgctggctgctggcagccattgcctccctcaccttgaatgaagaaatcctggctcgagtcgtccccctaaaccagagcttccaggaaaactatgcagggatctttcacttccagttctggcaatacggcgagtgggtggaggtggtggtggatgacaggctgcccaccaaggacggggagctgctctttgtgcattcagccgaagggagcgagttctggagcgccctgctggagaaggcatacgccaagatcaacggatgctatgaagcactatcagggggtgccaccactgagggcttcgaagacttcaccggaggcattgctgagtggtatgagttgaagaagccccctcccaacctgttcaagatcatccagaaagctctgcaaaaaggctctctccttggctgctccatcgacatcaccagcgccgcggactcggaggccatcacgtttcagaagctggtgaaggggcacgcgtactcggtcaccggagccgaggaggttgaaagtaacggaagcctacagaaactgatccgcatccgaaatccctggggagaagtggagtggacagggcggtggaatgacaactgcccaagctggaacactatagacccagaggagagggaaaggctgaccagacggcatgaagatggagaattctggatgtctttcagtgacttcctgaggcactattcccgcctggagatctgtaacctgaccccagacactctcaccagcgatacctacaagaagtggaaactcaccactagtgtctgtccatggagttagaggggacatcacttagaagttcttatagaaaggacacaagtttgtttcctggctttaccttgggaaaatgctagcaacattatagaaattttgccttgttgccttatcttcttccaaatgtactgttaaataaaaataaagggttaccccatgcaatcaca

SEQ ID NO: 51250 - DNA, 1413 bp, Homo sapiens
gcggcgttcccggcgctcggcaggccgcaggatggcctggtcccgggccgggagcccagcaggccgggagcggctgaggccacaccccgcgggccgggccgcttccctccggtgaatcatcgctcgcagcggcggcgcccgcagtggccgcagcagcgcgccgggccctggccgcgccccagccgagcgcagcgcggagtcgccccgacctttctctgcgcagtacggccgccgggaccgcagcatggcgggcatcgcggccaagctggcgaaggaccgggaggcggccgaggggctgggctcccacgagagggccatcaagtacctcaaccaggactacgaggcgctgcggaacgagtgcctggaggccgggacgctcttccaggacccgtccttcccggccatcccctcggccctgggcttcaaggagttggggccctactccagcaaaacccggggcatcgagtggaagcgccccacggagatctgcgctgacccccagtttatcattggaggagccacccgcacagacatctgccaaggagccctaggtgactgctggctgctggcagccattgcctccctcaccttgaatgaagaaatcctggctcgagtcgtccccctaaaccagagcttccaggaaaactatgcagggatctttcacttccagttctggcaatacggcgagtgggtggaggtggtggtggatgacaggctgcccaccaaggacggggagctgctctttgtgcattcagccgaagggagcgagttctggagcgccctgctggagaaggcatacgccaagatcaacggatgctatgaagcactatcagggggtgccaccactgagggcttcgaagacttcaccggaggcattgctgagtggtatgagttgaagaagccccctcccaacctgttcaagatcatccagaaagctctgcaaaaaggctctctccttggctgctccatcgacatcaccagcgccgcggactcggaggccatcacgtttcagaagctggtgaaggggcacgcgtactcggtcaccggagccgaggaggtaacggccggcgcggatgtgcaggggtcctgctgtcctgacacgatggccacaggcacagtttgtggtgatgcccaggggcccgcgcggccccacggtggtccagtttacactcgggccccgcactcctgaagttccgcgcgggaggagaagggcgtccctttcgcagctcgggcgccgggtgcgccgcgctgccacctggtggccgcagtggccggcgccaggggccctggttttacttgttttagatgttaccctgttttacagttacaaccttactattttgataagctaaaaataataaaacaatgcatcttcatagtgttttatactctataaggtgctttctcttttga

SEQ ID NO: 51251 - DNA, 242 bp, Homo sapiens
tctagagcatcccccatgactccatgtgcacctcaaaactttatgaacttcaccaccactagtgtctgtccatggagttagaggggacatcacttagaagttcttatagaaaggacacaagtttgtttcctggctttaccttgggaaaatgctagcaacattatagaaattttgccttgttgccttatcttcttccaaatgtactgttaaataaaaataaagggttaccccatgcaatcaca

SEQ ID NO: 51252 - DNA, 605 bp, Homo sapiens
gcggcgttcccggcgctcggcaggccgcaggatggcctggtcccgggccgggagcccagcaggccgggagcggctgaggccacaccccgcgggccgggccgcttccctccggtgaatcatcgctcgcagcggcggcgcccgcagtggccgcagcagcgcgccgggccctggccgcgccccagccgagcgcagcgcggagtcgccccgacctttctctgcgcagtacggccgccgggaccgcagcatggcgggcatcgcggccaagctggcgaaggaccgggaggcggccgaggggctgggctcccacgagagggccatcaagtacctcaaccaggactacgaggcgctgcggaacgagtgcctggaggccgggacgctcttccaggacccgtccttcccggccatcccctcggccctgggcttcaaggagttggggccctactccagcaaaacccggggcatcgagtggaagcgccccacggagatctgcgctgacccccagtttatcattggaggagccacccgcacagacatctgccaaggagccctaggtgactgctggcttgctggcagacatttgccccccttattcggttaatcaatgg

SEQ ID NO: 51253 - DNA, 232 bp, Homo sapiens
tcgtacactaacgcctctctctttactttgttttccagctgcccaagctggaacactatagacccagaggagagggaaaggctgaccagacggcatgaagatggagaattctggtaagattagtggaggcttcagggaaagctctgtctgccccaatgttctttactagaaaactgctaattagaaagagtgtcggccaaagtgagtttaccatgtcgaggacacaagcgtg

SEQ ID NO: 51254 - DNA, 445 bp, Homo sapiens
cctgtagaggggcgtagagctaggaattagcatttgagacgtttaaaatctggaaaaaattaaagcgtctacacaggcaaccctaagcagtgtggggaggattactctaaggcaactctagggaaaggcttctttatcattttgggtgttgtggacctctacaagaatctgatgacagctgttggcaaatgtgtgtgagggcatgaatgtgggtgtgagagtatctgtctgcaattccatttggcatgcaatttcaagaggttcacagaccccatgaagcacacccaagaatccaggctaagaagcccagcaaatagagatggtaaaatatgagatatcatgtcacttatgaatctttctgttatggataacaggaaaaccccattttaagccacattttaaaattattagattcaatgggcataaaatgactctgttgaatttc

SEQ ID NO: 51255 - DNA, 478 bp, Homo sapiens
ggaaaagggtggttgtgcctccagatctcatggagagacaagcaaaggggagtgggtggcatgttttgcagaagggtgaatctcaaactacacagggaatgaaagaatgctggacactggagagaggggtggaagagtggctctacatttactgagttctgtgacctaagacaagtcacaggttttttgtttgtttgtttatttttgagatggagtctcatcctttcacccaagctggagtgcagtggcatgatctcggctcactgcaacctctgtctcctggattcaagtgattctcctgcctcagcctccccagtagctgggactacaggtgcgtgccaccacgctagctaatttttgtatttttttttttagtagagatggggtttcaccatgttggccgggctggtttctaactcccgacctcaggtgatcacctgcctcggcctcccaaagtgctgggattacaggcgtgagc

SEQ ID NO: 51256 - DNA, 297 bp, Homo sapiens
cagagctgttggctgcgtggagtttgaccccttccttagtagcagcgctttgagtagtgggcagagtctcagggtgttctgtgtggttggagcaggctggtgtgccgggcctctcccttggtacaggttggtacagggagcatagcccagtctggagtgaggctaccaggggactaagaccttgctttgtcacatgagatctgtaggtgagtccaaagacacaagtgtgctgcgtggcagtgtcgctggcgttgctgtggcctcggatggaggctcttgggttcccaaaagagtgcc

SEQ ID NO: 51257 - DNA, 566 bp, Homo sapiens
gaagtactgcacctttataactttaaataagtgtttatattttaggcagcaagtctggctctaaaaatttgaaaatggggtacatttgaatcttacaaattcttaagccaaaaagggcaggcaagttaagtattttgaagacattaattaaaagttattagaatcacataaaatcctaagttagtgatttaaaaaattttaatgaatgtgaagtttgtaaaggttttgttaagttttagactatgcctgttattttcattacgtgggatagatggtcttgctagtgacttctcatttgcttagtgtaatttgtctgtacattttaaagttcatttttattgttatattttgcctcatcattgctttccttagcctgcattttctgatcatcttctgaatctgcatcttttctctgctactttcctccacagcaccttacccacagggacctaggatttacctgtgtcccagctccccctctctctcttgtggttcccttcatcttaaaaagtcctgtctcctcctctcggaatctagccttacccctcatcattctagccttgtca

SEQ ID NO: 51258 - DNA, 331 bp, Homo sapiens
acttcttagtttatcaaccatttttttaacttttactttaaaattaacaattttattataaatatgctgtaaactgcatcaggacttttaaagtattttctagtttatgagaagaaagagttaaaaatggaatggaagtgtcctctttagagaacatatttactatctaaaattctgtgatgtccatctatgatggacaacaatgacaaatttgaatgaaaacaaacaaatagacattgaattgtgaaacaaacggaacacttaatttatatgttaggaattttcgggaaagcatggagattggaatgcaaggatatggactgaagagtag

SEQ ID NO: 51259 - DNA, 302 bp, Homo sapiens
gacaagcaacaagcactcaagcacttaagaaaataaaacagctactgcctgacacttctttggcctcaggaagcccatcatgttccttggaggaaatagttaccaagcattcaccgaaccggatgccccagctgctgggagcactggcccaggtcacggttcactatgaaaaccaccatgagaaaacattgctctaggtttcaggagagcccacaccaaggactaagggggccctggaaagcagagcttatcagaaaaaggagaaaggactggactcagaacccacaaatgtgactccatca

SEQ ID NO: 51260 - DNA, 1533 bp, Homo sapiens
aggagaacagcaagaggtccccagcaaacatccacagatggccttggaacctcaccctgcaggaatgccagtgaacatactgctgacatcttggagctcagtaccctcatagtgtaacggcgtcagtagatctgcctgtgcttggacttcctgtactacccattcctgaggggcgatgcttctgcagggcctgtgacttggtgcacaacttcagacaccatcatcttgcagcagcaccgcaccctcactagccagggtgttgatgacttcctcaaggccaaggccacattcaaggcttcggactttattgatgcgcttgtgctgagcaaggtggcttctccaggatcttaattcaggaggtagaatggagcttgagatcaagtgtctgatcaagcctcagtgtatgggcgctgttcatcctctggtgctgaagcagccaagagacccaagtctgcctggctgcctcttaggatatgacagcagagccagtggcctctactagatcctgtacaacctcacaaaacacccagacatcgggagtgctgccagcctgtgatgcaagagtcctaatcctgaagacattgaatgacctgtcattctgctgtttttaccaaaaaggatcatgaggatcagagaggaaaagtcacttgcccaaagtcacacagctgaacagtggtggagttcaactttgaccatgggctgtctggccccaaggtgtatgcttgcttctctcccaagagactcctttcttatcaggctcaaatgaatgaaaggaggatgttaaagttcctagaagctttaattgaatgaaagttcctagtagatctgtacctactaaaaaccacacttctgaagctacgtggccaccagaagacacagctagtctgccatgtaaaaaaggaaaggtggcgtgtgccctgaaggcgcaggggtgagaggcagggaaatggagaccccaacagccagcatcagtggccctcatcacagccctccaggagatatcaaaggagacaacgccattattgacgagatcactcccaagcggattggagattgtcccaatacttagacctatagcaaggccttgggagaaatggtggtgcagcaggagagcaggaacctaaccattgccatcctaaggccctccattgtgcggagcaacgtcgcaccagcttttcctgggttgggttgataatctaaatggatgtagctgactcattattgcggtatgtatagggatgaggaagtaactgtaatgtagtggaggaatagtaagaaaattcttagtgctggcttagcttcattgatccaaaaacataaatgctactttactatcaattgaagcatattatttcaattattctggttataatatggaggcaggatgaaattgtttttattcttttagaattttttttatcaggaaaacagaggtaaagtgctatcaattactatttaagagttctattttgaaaagtgagaattaaggatttttcttttctttttaaaaaaaacttttttaaaaattaaaaa

SEQ ID NO: 51261 - DNA, 1604 bp, Homo sapiens
  misc_feature (90)..(90): n is a, c, g, or t
gcaagccagaaaaataacagctatcagctttctaaataattttaaagtcctgagaagcatttgctatttctttttctatccccactgtantcccctccagtcgggatctgcacacatctttgcagtacctcttatagccatgacccaaacgttctataggagcatgcaagtaagtcaagcctcctattctgttagacttgagagagatggttttcattgcatagtgacattttcttagccttaacgttctgatagtagcttactactcacttctctttttcagttttcataataagtattcatttttttgccataatgcttcctataaagccaatggtcctgcggaccgcaggaccattggcaccgaattcgaatcaccctaacaagcaaaaatgtaaaattggatgcacagaaaagtgactcaaagtgcttaatgactagaagaaatctaggagcagcaagaagcctcagtgtatgggcgctgttcatcctctggtgctgaagcagccaagagacccaagtctgcctggctgcctcttaggatatgacagcagagccagtggcctctactagatcctgtacaacctcacaaaacacccagacatcgggagtgctgccagcctgtgatgcaagagtcctaatcctgaagacattgaatgacctgtcattctgctgtttttaccaaaaaggatcatgaggatcagagaggaaaagtcacttgcccaaagtcacacagctgaacagtggtggagttcaactttgaccatgggctgtctggccccaaggtgtatgcttgcttctctcccaagagactcctttcttatcaggctcaaatgaatgaaaggaggatgttaaagttcctagaagctttaattgaatgaaagttcctagtagatctgtacctactaaaaaccacacttctgaagctacgtggccaccagaagacacagctagtctgccatgtaaaaaaggaaaggtggcgtgtgccctgaaggcgcaggggtgagaggcagggaaatggagaccccaacagccagcatcagtggccctcatcacagccctccaggagatatcaaaggagacaacgccattattgacgagatcactcccaagcggattggagattgtcccaatacttagacctatagcaaggccttgggagaaatggtggtgcagcaggagagcaggaacctaaccattgccatcctaaggccctccattgtgcggagcaacgtcgcaccagcttttcctgggttgggttgataatctaaatggatgtagctgactcattattgcggtatgtatagggatgaggaagtaactgtaatgtagtggaggaatagtaagaaaattcttagtgctggcttagcttcattgatccaaaaacataaatgctactttactatcaattgaagcatattatttcaattattctggttataatatggaggcaggatgaaattgtttttattcttttagaattttttttatcaggaaaacagaggtaaagtgctatcaattactatttaagagttctattttgaaaagtgagaattaaggatttttcttttctttttaaaaaaaacttttttaaaaattaaaaa

SEQ ID NO: 51262 - DNA, 130 bp, Homo sapiens
atacttttacatgtaaaagacatgccaaatactaaacatgtaaaattgctaaacatgtaaagttgcttcacatctttacttttcgaggaattgtatattaaaaatacagtaagaaccccccccaccacca

SEQ ID NO: 51263 - DNA, 759 bp, Homo sapiens
acggcatggctggtacatcaacagcatagaggcactgtcatgatttccaggcacagcttgcgtatatcccaaacatctcacacttgataatgtacctgttccttagaaacataactgggtaaggaaggattatcttagttcagtgaagccattacatctacggtctcttcagcttttataccttgttcccattctcaagtgcagcaacatctcatcagtactggaaaagcagtctgcacagtgaaccagaagtccttggtcaagtacaagtaacttcagccagattttcatgtatcttgggtttagtatattcctgtaaattatcagttacaaatttcaaggatgattcaggcacagcagcacatgtgcctgtagtcctagctactcaggagactgagagaaagaggattactagagcccaggagtttgaggccagcctgtgcaacatagcaagaccccatcttcataaataaacaaggttaggcatggtggcccacgcctgtaatcccaacacttacggaggttgagacaggaagatcccttgagcccaggagttcgagactagcctaggcaacatggggagaacttgtctctacaaaaataaaaattaaaaaaattagcagggcatggtggcatacacctgtgtttccagttactcaggaggccgagacagaagtatcacttgagcccggaaggtcaagactgcagtgagctatggtctgcactctagcctgggcaacagagcaagaccctgtctcc

SEQ ID NO: 51264 - DNA, 341 bp, Homo sapiens
ttgctctgaaacttatttgtcttttttccacgtaaggccatgtcttggggattttccaatgttggtgaatgtagagccattttctttttaatgtgatggcacagcatcccgttatgtgggtgtttcctagttgatttaacggcttttccataaatgctataggaaacaatgcagtaacttcattcctatacagacttctttgcatttaggtgtttttgcatttaggtgtttttccctaaactgacataaagaagtagaattgctggatcagagaatgtgcagagttaaaattttgataaatgcattgaaaacctttcaagaaaaattataccaattgacat

SEQ ID NO: 51265 - DNA, 746 bp, Homo sapiens
attggttgcttgatacagagactactattagcatggcccctgcccaagatagacgcacaaatttgtaaagcattctgtattaaaaaaagttgtttcttgtgtgaattcacaaaggaaaggttaaggatttaatgcttataagaatatagccatattttcattttgcttttcatacttcactcttgctcttaaactccttgcccataaactaaatacatttctagaaatttctaaatattatgtgaaaatacattagggacaggctaaattgttttcttttaaactgtgtgcatatgacgatttgtgtgtcctgttttatacttttataacacctgtgtgtgtccttggtatggcacttactatattgctttatttgtttacatatctcactcccctactagaacagttccctcagtgatggaccttcatattcacaatgactagcaaacagatgaaaattaataggccaggcgcggtggctcacacctgtaatcccagcactttgggaagctgaggtgggtggagcatgaggtcaggaattcgagaccagcctggccagcatagtgaaaccccatctctactaaatacaaaaattagccacgcgtggtaaaaatacaaaattagtagtcccagctacttgggaggctgaggcaggagaatcgcttgaacctggcaggcagaggttgtggtaagccgagatcacaccactgcactccagcctgtgcaacagaatgagactctgtctc

SEQ ID NO: 51266 - DNA, 925 bp, Homo sapiens
gagacagtctcgctctgttgcccaggctgggtccctggtgttttaatcatcgtgaaacagcagctgagatttagaagatgatctcatggcactctgtgaagtttctgcaactctgttgctttctctgttggtcattgcctttcatttttatattctttttttctgataagttgtttcattattgataagtgttaaattgcactgtgtcttgctcccctctataatgaaagctattcttcgcttgagatcacagcttagattttctttgaaattccccaagagcttaacacagggctttgaacacagtgggcatttaataaatccttgatgatgatgttcaagttccacattggtcttcaactctctggcggggtcagaggaccatctgtgctcgctcagatatgtcaactgcagacccagaaagcagccttctccagacaagttgctcctgtctcctgggccgtgtgattcgaggcatgtaatcataatcctgagctgtcagcagggcagtgattggtttccagatttcaagtccatgaaacaggtagccagggttggggaaaagaatatttccgggaagttaggaggcctggttgagtcttggatcttcagtgactgatgctgtgaccatgagatactcaactcacccctggtgggtctcagtttcctcatccataacatgaggagagggacacagtgctctctccggccccccagctgtcaggtctctaaatctattactgtgccaccgtgaggagatggctgtcacgtgagttctgcacggtattggcatgttcccttatacgagggtggctttacacatttgagcatggcaaagtttaagtggcccctctttcaaccaaaaatgaaaacttttcatacatgatttttagcagaatgtatacaaacgaccatcaaaatggaa

SEQ ID NO: 51267 - DNA, 3044 bp, Homo sapiens
  misc_feature (961)..(961): n is a, c, g, or t
  misc_feature (1535)..(1535): n is a, c, g, or t
  misc_feature (1766)..(1766): n is a, c, g, or t
  misc_feature (1840)..(1840): n is a, c, g, or t
cgcctctcttggaaagttgatctccctgcttttcttctcctctgtttcatgccatgaatttcgcactaacagtcctcccccatccagggtccagccagcctcttgcttgctaaggcagaggaatctccctggctttcctccttgactgcattgcagccccttagcctgtgtatctgccatagagctccattcttctctcatttgctccaattatggtgctttttgtctgcctttcttttctcctagctctgcaatactgctcggaagccccaccggccctttcagtgctaccttcttcctcctagtgcctccccactccccactcccagtcctggtaacacttaatggtcagggaggatttcatcactgacctgagtaataaggctatgactgctctgtgccagagaaacatgggtaggggagaagacattaggaagtttaccttcttggtaaaggacctaggcttcccaaggtcccagccctcagcttatgcatgactatcagcacctttactttcttctggctcaccacaaggaaaggtaatctattcctggactaaatcagtgccttgggacagctatagtgctggtgtagggatcagagcacaaggcaaggttttcctgggaggataagtataaccatgtttttcacagtgatcgggcttatagatactattgtctctgacttctagatcatcatccttcttctctggagtagcacaataggcatgtctctctttggacatatacaatgttcaagaataggggtggtgatgggggcttctctgttgatctgtgtgtttgtgtgtattgtcaaataactgttatctagcatttgctatatggtgtggagcactaagtgtgagatctatgtcacacacatacatatataattatatatgtaaaatttcaattctcacaatctgtgaagtactgaggtagatagtaatattgtctgtatnttttaggtgaagaaactgagtctttttccaaagtcacacagctagtaagtgatgggaactaggattcaacacaggaagactggctacagagtctgtgcttgtaagcactatgctatattgctgtgtgtgtgtgtgtgtgtatttcactgatctagttgctgaagcccttatcactgctccaagaagtaatttacttcattttaatttaaagcaaagatgaaaacaacttatcctactgtccaaaacattcttccccttgcataggagaggggtgcttcctgaaaggagtgagaccaagagagttgctctgagccaaaagctgccttgcagtttagctgaggcaggatttagaaatggcgtgaacagtgcctgcattagccgatggcatggagtgctgagtgccagcagaggagataaaatcagacatatgtttggatataaatgttcctctctctcttctaattttaagcccctgctgctttgttgcagtgaaatgatggagccttaattataggccctggccccctgaggtagaagcctgggttgagtaaggcccacttagccctctcccagnctctacccattaccacggaaggaagccagagaccatggactctgaccctcttctcagacaacaataggaattgtcttgcagggactctctgctggttgttccacggcactcagcaagttgctggcctcaatacatgttaaatagccatgataaagctaatgtctctaggccttagaaactagcctatctacctttacctccattgacgataggatgcagctgaagggtgtnaaaaagtcctggagcacattgtagaagtggcagctacagcatggcacttaaagagttagagctggggtagatanagtggagaagaggagcaaaagaccctcccagtattctcattgttgagccgggtaagcaaaaaccactccattatggggaacctctgtggtccagtaggtgttttaagacctcctccacactgcagagtttccaaggctgggaggaggccaagccaccttttctaactataaaacaccaagtcttacctacttcactccttccccttagctgtcaccctctgtgggatcctgcagtttctgtctgccattgggcctaagaatcaggaaatggttatgtagagtcctgatagtctaaccccttagcacatgtggagcccctgtagtcaggccttagagggcagtatagccagttctaaagagagtgaacagctctaagggataagagaacacagacgtatcttaggaaggtctcattttaactgttttgctagttaagtatgttcttgatagccaatagcagcctgggtgagaaagcacattgactcaggagtcaaaagacctgggcttttagtcccacctcctccactagcagtgtgaccttggatatgtcttttaatttctctggggctcagtttctttgactgtaaaatgtgaagggattagactaaatgatttttcacggccttcagttctgtaatgaaaattctctaactccgtatcatcagcaagagtctttacatccaacgtgttgctataactaccccctaaagagctaccaacccgtgttccattcctaggtaacaaaccttggcctggccaaggatgagtcacagcattcacggctgcatttttggtactcacgggatgcctctctgaaaagctgtcccaagtgcctgctacagaggaggatataccatgatagcaaaggaaggttactgctgtaaaagtggaaactgcatggatcaaagggcaggcctactggggtaaggaactctccctgcagctctgaggatacttaaatctaggatcctagtcttagtctcccccaactcctttgaggttcctttcaaaagtccttctcccacagattgaagctgaatatagtcttccttgggacaaatgcatttgtccataggactctttcccgagattgttttaggcccatttctgtacctctcccctcagactgttagccacagacccttagtcattgcaaagttactgcataattccctgtctgctcaaatagctgtcaaaaaaaaaa

SEQ ID NO: 51268 - DNA, 329 bp, Homo sapiens
tgagacagtctcgctctgttgcccaggctggagtgcagtggcacgatctcagctcactgcatcctccacctcctgtactcggaaggctgaggcaggaaaatcacttgaacccaggaggtggagagtttattgtattacagacacttaacttaaacttagatatatttgtgccaatcaccattttttttcctgttccaactttctgatagaacctaaagctgggccatagtgcccagcagtttgggaggccaagatgggaggagtgtttgagcctagaagttcaagaccagcctaggcaacatagcaagaccctgtctctacagaaaaaa

SEQ ID NO: 51269 - DNA, 244 bp, Homo sapiens
caggctggtctcgaactcctttcctcaagcgatccacccacctaggcctcccaaagggctaggattacagccatgagccactgagcctggcctgaataggtacagctttttgtatgtcaattatatcctaataaagtgattttttttaaaaagaagcattattactagagtacacattttcaaatgattgtgataactgcatttcaatgtaattgataacctttgtagtcctgtatattttatt

SEQ ID NO: 51270 - DNA, 1475 bp, Homo sapiens
ggcagcgtggcgcacaaccccgagcgcgagtgccagagcccagccggcgcggagcgggagcggtgcaggctgaggtctccgagcggctcgccatggctggcccgcagcagcagcccccttacctgcacctggccgagctgacggcgtcccagttcctggaaatatggaagcactttgacgcagacggaaatgggtatattgaaggtaaagagctagaaaactttttccaagagctggagaaggcaaggaaaggctctggcatgatgtcaaagagtgacaactttggagaaaagatgaaggagttcatgcagaagtatgataaaaactcagatgggaaaatcgagatggcagagctggcgcagatcctgccaaccgaagagaacttccttctgtgcttcaggcagcacgtgggctccagcgccgagtttatggaggcttggcggaagtacgacacagacaggagtggctacatcgaagccaatgagctcaagggattcctgtcagacctgctgaagaaggcgaaccggccgtacgatgagcccaagctccaggaatacacccaaaccatactacggatgtttgacttgaacggggatggcaaattgggcctctcagagatgtcccgactcctgcctgtccaggaaaacttcctgcttaaatttcagggcatgaagctgacctcagaggagtttaacgcgatcttcacattttacgacaaggatagaagcggctacattgacgagcatgagctggatgcccttttgaaggatctgtacgagaaaaacaaaaaggaaatgaatattcaacagctcaccaactacagaaagagcgtcatgtccttggcagaggcagggaagctctaccgcaaggacctggagattgtgctctgcagcgagccccccatgtaaagtggggacgggggctgcttctccacctcccccaaaccctgcttctgctgccctgatgcgtctacccagactcagagaccgtgagcgccccgcccccacccctacagcctgcacacacctgcctgcagagcaggaaacgagagatagaggatgggcagctggggggctgtcctgagccccctgcacccacccctgcccaggcagtctttgctcagtggatcacacacatggaaggtgatgggggcatgggtggagggtccctaattctcttcgctgtgatgcatgagctccctcgctgtatgatttaggcttctatgtccaacagagtggactcttccctctcgctcccctctgccggtcccccatgccaccacccaccccaaacttccaggttccatccaccaccttgccaatggtgtagctgtcctctcagaactcctgtgtgtggaaggcacccgccctttccttgccttctttactcggcgtgctccttttctctttgggtttcttgtttaccaaagaagagtttacagacaataaaatggaaaggtcctgctgtggaaactt

SEQ ID NO: 51271 - DNA, 1381 bp, Homo sapiens
ggcagcgtggcgcacaaccccgagcgcgagtgccagagcccagccggcgcggagcgggagcggtgcaggctgaggtctccgagcggctcgccatggctggcccgcagcagcagcccccttacctgcacctggccgagctgacggcgtcccagttcctggaaatatggaagcactttgacgcagacggaaatgggtatattgaaggtaaagagctagaaaactttttccaagagctggagaaggcaaggaaaggctctggcatgatgtcaaagagtgacaactttggagaaaagatgaaggagttcatgcagaagtatgataaaaactcagatgggaaaatcgagatggcagagctggcgcagatcctgccaaccgaagagaacttccttctgtgcttcaggcagcacgtgggctccagcgccgagtttatggaggcttggcggaagtacgacacagacaggagtggctacatcgaagccaatgagctcaagggattcctgtcagacctgctgaagaaggcgaaccggccgtacgatgagcccaagctccaggaatacacccaaaccatactacggatgtttgacttgaacggggatggcaaattgggcctctcagagatgtcccggatagaagcggctacattgacgagcatgagctggatgcccttttgaaggatctgtacgagaaaaacaaaaaggaaatgaatattcaacagctcaccaactacagaaagagcgtcatgtccttggcagaggcagggaagctctaccgcaaggacctggagattgtgctctgcagcgagccccccatgtaaagtggggacgggggctgcttctccacctcccccaaaccctgcttctgctgccctgatgcgtctacccagactcagagaccgtgagcgccccgcccccacccctacagcctgcacacacctgcctgcagagcaggaaacgagagatagaggatgggcagctggggggctgtcctgagccccctgcacccacccctgcccaggcagtctttgctcagtggatcacacacatggaaggtgatgggggcatgggtggagggtccctaattctcttcgctgtgatgcatgagctccctcgctgtatgatttaggcttctatgtccaacagagtggactcttccctctcgctcccctctgccggtcccccatgccaccacccaccccaaacttccaggttccatccaccaccttgccaatggtgtagctgtcctctcagaactcctgtgtgtggaaggcacccgccctttccttgccttctttactcggcgtgctccttttctctttgggtttcttgtttaccaaagaagagtttacagacaataaaatggaaaggtcctgctgtggaaactt

SEQ ID NO: 51272 - DNA, 1435 bp, Homo sapiens
ggcagcgtggcgcacaaccccgagcgcgagtgccagagcccagccggcgcggagcgggagcggtgcaggctgaggtctccgagcggctcgccatggctggcccgcagcagcagcccccttacctgcacctggccgagctgacggcgtcccagttcctggaaatatggaagcactttgacgcagacggaaatgggtatattgaaggtaaagagctagaaaactttttccaagagctggagaaggcaaggaaaggctctggcatgatgtcaaagagtgacaactttggagaaaagatgaaggagttcatgcagaagtatgataaaaactcagatgggaaaatcgagatggcagagctggcgcagatcctgccaaccgaagagaacttccttctgtgcttcaggcagcacgtgggctccagcgccgagtttatggaggcttggcggaagtacgacacagacaggagtggctacatcgaagccaatgagctcaagggattcctgtcagacctgctgaagaaggcgaaccggccgtacgatgagcccaagctccaggaatacacccaaaccatactacggatgtttgacttgaacggggatggcaaattgggcctctcagagatgtcccgggcatgaagctgacctcagaggagtttaacgcgatcttcacattttacgacaaggatagaagcggctacattgacgagcatgagctggatgcccttttgaaggatctgtacgagaaaaacaaaaaggaaatgaatattcaacagctcaccaactacagaaagagcgtcatgtccttggcagaggcagggaagctctaccgcaaggacctggagattgtgctctgcagcgagccccccatgtaaagtggggacgggggctgcttctccacctcccccaaaccctgcttctgctgccctgatgcgtctacccagactcagagaccgtgagcgccccgcccccacccctacagcctgcacacacctgcctgcagagcaggaaacgagagatagaggatgggcagctggggggctgtcctgagccccctgcacccacccctgcccaggcagtctttgctcagtggatcacacacatggaaggtgatgggggcatgggtggagggtccctaattctcttcgctgtgatgcatgagctccctcgctgtatgatttaggcttctatgtccaacagagtggactcttccctctcgctcccctctgccggtcccccatgccaccacccaccccaaacttccaggttccatccaccaccttgccaatggtgtagctgtcctctcagaactcctgtgtgtggaaggcacccgccctttccttgccttctttactcggcgtgctccttttctctttgggtttcttgtttaccaaagaagagtttacagacaataaaatggaaaggtcctgctgtggaaactt

SEQ ID NO: 51273 - DNA, 1403 bp, Homo sapiens
ggcagcgtggcgcacaaccccgagcgcgagtgccagagcccagccggcgcggagcgggagcggtgcaggctgaggtctccgagcggctcgccatggctggcccgcagcagcagcccccttacctgcacctggccgagctgacggcgtcccagttcctggaaatatggaagcactttgacgcagacggaaatgggtatattgaaggtaaagagctagaaaactttttccaagagctggagaaggcaaggaaaggctctggcatgatgtcaaagagtgacaactttggagaaaagatgaaggagttcatgcagaagtatgataaaaactcagatgggaaaatcgagatggcagagctggcgcagatcctgccaaccgaagagaacttccttctgtgcttcaggcagcacgtgggctccagcgccgagtttatggaggcttggcggaagtacgacacagacaggagtggctacatcgaagccaatgagctcaagggattcctgtcagacctgctgaagaaggcgaaccggccgtacgatgagcccaagctccaggaatacacccaaaccatactacggatgtttgacttgaacggggatggcaaattgggcctctcagagatgtcccgactcctgcctgtccaggaaaacttcctgcttaaatttcagggcatgaagctgacctcagaggagtttaacgcgatcttcacattttacgacaaggaaatgaatattcaacagctcaccaactacagaaagagcgtcatgtccttggcagaggcagggaagctctaccgcaaggacctggagattgtgctctgcagcgagccccccatgtaaagtggggacgggggctgcttctccacctcccccaaaccctgcttctgctgccctgatgcgtctacccagactcagagaccgtgagcgccccgcccccacccctacagcctgcacacacctgcctgcagagcaggaaacgagagatagaggatgggcagctggggggctgtcctgagccccctgcacccacccctgcccaggcagtctttgctcagtggatcacacacatggaaggtgatgggggcatgggtggagggtccctaattctcttcgctgtgatgcatgagctccctcgctgtatgatttaggcttctatgtccaacagagtggactcttccctctcgctcccctctgccggtcccccatgccaccacccaccccaaacttccaggttccatccaccaccttgccaatggtgtagctgtcctctcagaactcctgtgtgtggaaggcacccgccctttccttgccttctttactcggcgtgctccttttctctttgggtttcttgtttaccaaagaagagtttacagacaataaaatggaaaggtcctgctgtggaaactt

SEQ ID NO: 51274 - DNA, 905 bp, Homo sapiens
ttaagtcggacttaaaaggttttgccattatttataaggttcttgggggctttttttaaaccctccccaattgttgggctaattcactgtttccacagaatcattcccacttagaacagtaccctatttttctaggtttcttaggcatacaaaatgaacacaggtaaaggcatttaaacaaaagaaaaatagccgaagaatttgctaaagcaatattcacttttaaaatgcaatttttcccctaaggttcgaggcgtcttgttcgtagccgttgaaagtatttttccatcctaaaaatatctgtggaaatattgaccagaaataaacttttaaatgatctgtgatgtttacaaggatatgtctaaaacgtttattacattattttcctcttaatgtgaattctccacgtttgaaactgtaactcgttttctcattttttgttcttcttgttacttcctcatattgtgtacttggaaattacctttgtaaatacttgagaaattcgttcttatatataattaatataaaaagtttgcatttctcaaaaacatctctatcaaagcctgtgttctcacgagtttaatatcaaagtcttaataaaataatcacaactacccaaatgcttataaaatatgttcgattactggatttttattcattaaacagaattaattttatttgacatatttaaaggcgccatttagaaataaaattgcttattatgttgcaatactgtatctatttcagcctctacaccgttttcttttttgtttcacctgaaactagttttcccttccgttttttttcttgttctatcaagctaatatatatatcaacatacagtaatggggtgctggtttttgtaagttaaatatgtacctgcattaaataaatagtaaacatgt

SEQ ID NO: 51275 - DNA, 416 bp, Homo sapiens
aaacaaaatgagaaccagaagccccgcccatatattgagcaggactctactaggttgaccactgagccaggaagaatggtgaataaagaaagcaatctggtagaaacaaaagaggatggcacttagtgttaggacctgattttgtgttctggcccttggcttagtacacctcccaagccgtagtttcttaccaatagaatgcagttagcagttgtattaacatcatagatttattgtgagaaatgagatagtagatgtgaaaacactttgtaaaacaatatataaatgttagtttttaaaagatacagtacctgtcttttagaaacttatgataaactgtgtaaactgtgaatcataatacatggcagaatgagacgagcgctattataaatgtgaaccctgtatgctgtggaaat

SEQ ID NO: 51276 - DNA, 178 bp, Homo sapiens
ccatgaataggcaacatggaagggagaagggcatatcatcaagaggcaagatggaggagatgatgtgtacaatcaagagacaacatagacagaagaggttttgacatcaaaaggcaacatgagatagagcgtgtgccatcaagaagcaacctggaagggagaaaggtgtcccaattaa

SEQ ID NO: 51277 - DNA, 400 bp, Homo sapiens
tcttgcgttgctataaagaaatatctgagataagttaatttataaagaaaagatttgtattggctcattgttctgcgggcttcacaagaagcatggtgctggcatctgcttggcttctaaggcggcctaggaagcttacaatcatgagcaggcacatcacgtggccaaagcaggaacaagcaagagagagtcagtgggtgtggggagggacatgccacacacttttaaataaccagatctcacaagaactcactatctcaaagacagcagcaagccatgagggatctacccccatggtcaaaacaactcccaccatgccccaactccagcactggagactgcaatttaacttgaaatctgggtggagataaatatccaaattatatcagagggccttccc

SEQ ID NO: 51278 - DNA, 1793 bp, Homo sapiens
gcggccgcgtctcctccctcggcgttgtccgcggcgcgagccacagcgcgcggggcgagccagcgagagggcgcgagcggcggcgctgcctgcagcctgcagcctgcagcctccggccggccggcgagccagtgcgcgtgcgcggcggcggcctccgcagcgaccggggagcggactgaccggcgggagggctagcgagccagcggtgtgaggcgcgaggcgaggccgagccgcgagcgacatgggggaccgggagcagctgctgcagcgggcgcggctggccgagcaggcggagcgctacgacgacatggcctccgctatgaaggcggtgacagagctgaatgaacctctctccaatgaagatcgaaatctcctctctgtggcctacaagaatgtggttggtgccaggcgatcttcctggagggtcattagcagcattgagcagaaaaccatggctgatggaaacgaaaagaaattggagaaagttaaagcttaccgggagaagattgagaaggagctggagacagtttgcaatgatgtcctgtctctgcttgacaagttcctgatcaagaactgcaatgatttccagtatgagagcaaggtgttttacctgaaaatgaagggtgattactaccgctacttagcagaggtcgcttctggggagaagaaaaacagtgtggtcgaagcttctgaagctgcctacaaggaagcctttgaaatcagcaaagagcagatgcaacccacgcatcccatccggctgggcctggccctcaacttctccgtgttctactatgagatccagaatgcacctgagcaagcctgcctcttagccaaacaagccttcgatgatgccatagctgagctggacacactaaacgaggattcctataaggactccacgctgatcatgcagttgctgcgagacaacctcaccctctggacgagcgaccagcaggatgaagaagcaggagaaggcaactgaagatccttcaggtcccctggcccttccttcacccaccacccccatcatcaccgattcttccttgccacaatcactaaatatctagtgctaaacctatctgtattggcagcacagctactcagatctgcactcctgtctcttgggaagcagtttcagataaatcatgggcattgctggactgatggttgctttgagcccacaggagctccctttttgaattgtgtggagaagtgtgttctgatgaggcattttactatgcctgttgatctatgggaaatctaggcgaaagtaatggggaagattagaaagaattagccaaccaggctacagttgatatttaaaagatccatttaaaacaagctgatagtgtttcgttaagcagtacatcttgtgcatgcaaaaatgaattcacccctcccacctctttcttcaattaatggaaaactgttaagggaagctgatacagagagacaacttgctcctttccatcagctttataataaactgtttaacgtgaggtttcagtagctccttggttttgcctctttaaattatgacgtgcacaaaccttcttttcaatgcaatgcatctgaaagttttgatacttgtaacttttttttttttttggttgcaattgtttaagaatcatggatttattttttgtaactctttggctattgtccttgtgtatcctgacagcgccatgtgtgtcagcccatgtcaatcaagatgggtgattatgaaatgccagacttctaaaataaatgttttggaattcaatgggtaaataaatgctgctttggggatatta

SEQ ID NO: 51279 - DNA, 485 bp, Homo sapiens
  misc_feature (55)..(55): n is a, c, g, or t
agcagggatgcttgaaacagggtgaggaaggaacggaaaccaccaggcctggggntgagcttcaaaagaattccctactaattcacccctcccacctctttcttcaattaatggaaaactgttaagggaagctgatacagagagacaacttgctcctttccatcagctttataataaactgtttaacgtgaggtttcagtagctccttggttttgcctctttaaattatgacgtgcacaaaccttcttttcaatgcaatgcatctgaaagttttgatacttgtaacttttttttttttttggttgcaattgtttaagaatcatggatttattttttgtaactctttggctattgtccttgtgtatcctgacagcgccatgtgtgtcagcccatgtcaatcaagatgggtgattatgaaatgccagacttctaaaataaatgttttggaattcaatgggtaaataaatgctgctttggggatatta

SEQ ID NO: 51280 - DNA, 1578 bp, Homo sapiens
gagtggtgctgggattatgcaggctgaggctctccacacattttcatgaagtggttgctcaccctctaagtgagacgtaaagactgcagtgttcggagccctttgggaaataaatgtggtgaaaagaaaggagggacgaggtttaaaggaaggggaaatggaggttaaggaaaaatggctagaaggtgtgttctggaacaatcagaaacctgaggcaacttgaaatgggggaaaaaggcaagaatggagagatgttaccagaacgaaatctagtttgagcagagaaaaagactggctttctagtaggcttgtaaaatgctttcctgcagcaagctacttgtgtccatagatcttctctggagggttaaggtagccttttgtaaaccaaaggaatctataatatctatatttgaaataattaatgagttggaaaagccacccagcgtagaagagtcaatccaagctttaattctgccatctcagaatggtgataaaccatttctcccccatcatctaaatggaatatattgtgcttataggtattttctttaaaagaaaaaaaagaatatattggaagggactggcaggggtcactttccctgctaacttggtgtttgtagattaaattcttaatgttactgggatgactcagtctctatgttattaatctcatcagccttaactaaggcttttggaaagggtgtaagtttcagtaaccctctgggtttacctgggctttcttcagggctggggaagggcaggtaagtagcctgctgtagggaggatggagcaggacacatgtgttaaggatatattctgatgccaccagtctgtaaccttgaaacttacatcttggctttaggtcctctgaagtataaaactagtgatgttgctgttattaacaagtcagttttgccttcagtcttctaacttgttttctgtttccttcataattaaaatgctcacttgataatactgccttcctgtaatgattgatgttcctcattctaccagcgtcacctggaggacagtgttggtaagcttgaagaaaaatcgtgcatactggaaacaatggtcttgcctcaaacctgttgagaacttctcttccctgcttctctccataatttgaagaagcaagaaatgtttctgaagtgaagcataaaggagtatcttcaagctctatctcatacctaccagcttgcatagagtataatagtgggaagaaatattgtgaaagattctagaacctaagtcctttctaggctaggcaattctaggctacacaattcgtagtctctgtaaataccatttgataactgaaataaacctataaagtgggattaaatgttagtccagaagactaagtgatttaaggaaagagggaaaataaccagatagatttctggtggatattcatagacagacataatttcatcatgtattatggccctaagtcatctattttatattaaaacatagatggtaactgtaaagttatcaaatgtaaaaattactgggctagcattgtgttttaacactgatacaccagttgattacagtgttgacagaaaacgggca

SEQ ID NO: 51281 - DNA, 150 bp, Homo sapiens
gcggccgcctactactactactgctcgaattcaagcttctaacgatgtacggggacatgtcaatcaagatgggtgattatgaaatgccagacttctaaaataaatgttttggaattcaatgggtaaataaatgctgctttggggatatta

SEQ ID NO: 51282 - DNA, 1761 bp, Homo sapiens
gcggccgcgtctcctccctcggcgttgtccgcggcgcgagccacagcgcgcggggcgagccagcgagagggcgcgagcggcggcgctgcctgcagcctgcagcctgcagcctccggccggccggcgagccagtgcgcgtgcgcggcggcggcctccgcagcgaccggggagcggactgaccggcgggagggctagcgagccagcggtgtgaggcgcgaggcgaggccgagccgcgagcgacatgggggaccgggagcagctgctgcagcgggcgcggctggccgagcaggcggagcgctacgacgacatggcctccgctatgaaggcggtgacagagctgaatgaacctctctccaatgaagatcgaaatctcctctctgtggcctacaagaatgtggttggtgccaggcgatcttcctggagggtcattagcagcattgagcagaaaaccatggctgatggaaacgaaaagaaattggagaaagttaaagcttaccgggagaagattgagaaggagctggagacagtttgcaatgatgtcctgtctctgcttgacaagttcctgatcaagaactgcaatgatttccagtatgagagcaaggtgttttacctgaaaatgaagggtgattactaccgctacttagcagaggtcgcttctggggagaagaaaaacagtgtggtcgaagcttctgaagctgcctacaaggaagcctttgaaatcagcaaagagcagatgcaacccacgcatcccatccggctgggcctggccctcaacttctccgtgttctactatgagatccagaatgcacctgagcaagcctgcctcttagccaaacaagccttcgatgatgccatagctgagctggacacactaaacgaggattcctataaggactccacgctgatcatgcagttgctgcgagacaacctcaccctctggacgagcgaccagcaggatgaagaagcaggagaaggcaactgaagatccttcaggtcccctggcccttccttcacccaccacccccatcatcaccgattcttccttgccacaatcactaaatatctagtgctaaacctatctgtattggcagcacagctactcagatctgcactcctgtctcttgggaagcagtttcagataaatcatgggcattgctggactgatggttgctttgagcccacaggagctccctttttgaattgtgtggagaagtgtgttctgatgaggcattttactatgcctgttgatctatgggaaatctaggcgaaagtaatggggaagattagaaagaattagccaaccaggctacagttgatatttaaaagatccatttaaaacaagctgatagtgtttcgttaagcagtacatcttgtgcatgcaaaaatgaattcacccctcccacctctttcttcaattaatggaaaactgttaagggaagctgatacagagagacaacttgctcctttccatcagctttataataaactgtttaacgtgaggtttcagtagctccttggttttgcctctttaaattatgacgtgcacaaaccttcttttcaatgcaatgcatctgaaagttttgatacttgtaacttttttttttttttggttgcaattgtttaagaatcatggatttattttttgtaactctttggctattgtccttgtgtatcctgacagcgccatgtgtgtcagcccatgtcaatcaagatgggtgattatgaaatgccagacttctaaaataaatgttttggaattca

SEQ ID NO: 51283 - DNA, 2292 bp, Homo sapiens
gcggccgcgtctcctccctcggcgttgtccgcggcgcgagccacagcgcgcggggcgagccagcgagagggcgcgagcggcggcgctgcctgcagcctgcagcctgcagcctccggccggccggcgagccagtgcgcgtgcgcggcggcggcctccgcagcgaccggggagcggactgaccggcgggagggctagcgagccagcggtgtgaggcgcgaggcgaggccgagccgcgagcgacatgggggaccgggagcagctgctgcagcgggcgcggctggccgagcaggcggagcgctacgacgacatggcctccgctatgaaggcggtgacagagctgaatgaacctctctccaatgaagatcgaaatctcctctctgtggcctacaagaatgtggttggtgccaggcgatcttcctggagggtcattagcagcattgagcagaaaaccatggctgatggaaacgaaaagaaattggagaaagttaaagcttaccgggagaagattgagaaggagctggagacagtttgcaatgatgtcctgtctctgcttgacaagttcctgatcaagaactgcaatgatttccagtatgagagcaaggtgttttacctgaaaatgaagggtgattactaccgctacttagcagaggtcgcttctggggagaagaaaaacagtgtggtcgaagcttctgaagctgcctacaaggaagcctttgaaatcagcaaagagcagatgcaacccacgcatcccatccggctgggcctggccctcaacttctccgtgttctactatgagatccagaatgcacctgagcaagcctgcctcttagccaaacaagccttcgatgatgccatagctgagctggacacactaaacgaggattcctataaggactccacgctgatcatgcagttgctgcgagacaacctcaccctctggacgagcgaccagcaggatgaagaagcaggagaaggcaactgaagatccttcaggtcccctggcccttccttcacccaccacccccatcatcaccgattcttccttgccacaatcactaaatatctagtgctaaacctatctgtattggcagcacagctactcagatctgcactcctgtctcttgggaagcagtttcagataaatcatgggcattgctggactgatggttgctttgagcccacaggagctccctttttgaattgtgtggagaagtgtgttctgatgaggcattttactatgcctgttgatctatgggaaatctaggcgaaagtaatggggaagattagaaagaattagccaaccaggctacagttgatatttaaaagatccatttaaaacaagctgatagtgtttcgttaagcagtacatcttgtgcatgcaaaaatgaattcacccctcccacctctttcttcaattaatggaaaactgttaagggaagctgatacagagagacaacttgctcctttccatcagctttataataaactgtttaacgtgaggtttcagtagctccttggttttgcctctttaaattatgacgtgcacaaaccttcttttcaatgcaatgcatctgaaagttttgatacttgtaacttttttttttttttggttgcaattgtttaagaatcatggatttattttttgtaactctttggctattgtccttgtgtatcctgacagcgccatgtgtgtcagcccatgtcaatcaagatgggtgattatgaaatgccagacttctaaaataaatgttttggaattcaatgggtaaataaatgctgctttggggatattaacacaaaaaacaaaaaaaaaaaaaaaaaaaaaaaaaaaaaaaaagaaaacaacaaaacagacaagaaaacagcacaaaaaacacgcaaaaggcaacaaacaaaccgacaaagcagaacacgtcaccccaaaaaagagcaaaagaatcgtaaggagagccacgcgcaaggctgaacctactatcacgactgtaaaaggaccccacggacacatgacaaggacacaccaggcgaaacaccaatatggagagaaacaaatggacccacaggcaatcacagctagaccacctgcacggaagaggcagaatgaaaaaacaaacaaacaacggcaccacgacatcccgtatcgttacataatacaaacaaaaccagatgacaaacagagcctccaaccgacgaaccaaacaacaaggacacgactacagacgcggagtcaaaccaagccctgactaaacagaagcgaggacccacagtaaggcaggacagagcatgaaaccacag

SEQ ID NO: 51284 - DNA, 2501 bp, Homo sapiens
gagtggtgctgggattatgcaggctgaggctctccacacattttcatgaagtggttgctcaccctctaagtgagacgtaaagactgcagtgttcggagccctttgggaaataaatgtggtgaaaagaaaggagggacgaggtttaaaggaaggggaaatggaggttaaggaaaaatggctagaaggtgtgttctggaacaatcagaaacctgaggcaacttgaaatgggggaaaaaggcaagaatggagagatgttaccagaacgaaatctagtttgagcagagaaaaagactggctttctagtaggcttgtaaaatgctttcctgcagcaagctacttgtgtccatagatcttctctggagggttaaggtagccttttgtaaaccaaaggaatctataatatctatatttgaaataattaatgagttggaaaagccacccagcgtagaagagtcaatccaagctttaattctgccatctcagaatggtgataaaccatttctcccccatcatctaaatggaatatattgtgcttataggtattttctttaaaagaaaaaaaagaatatattggaagggactggcaggggtcactttccctgctaacttggtgtttgtagattaaattcttaatgttactgggatgactcagtctctatgttattaatctcatcagccttaactaaggcttttggaaagggtgtaagtttcagtaaccctctgggtttacctgggctttcttcagggctggggaagggcaggtaagtagcctgctgtagggaggatggagcaggacacatgtgttaaggatatattctgatgccaccagtctgtaaccttgaaacttacatcttggctttaggtcctctgaagtataaaactagtgatgttgctgttattaacaagtcagttttgccttcagtcttctaacttgttttctgtttccttcataattaaaatgctcacttgataatactgccttcctgtaatgattgatgttcctcattctaccagcgtcacctggaggacagtgttggtgacagagctgaatgaacctctctccaatgaagatcgaaatctcctctctgtggcctacaagaatgtggttggtgccaggcgatcttcctggagggtcattagcagcattgagcagaaaaccatggctgatggaaacgaaaagaaattggagaaagttaaagcttaccgggagaagattgagaaggagctggagacagtttgcaatgatgtcctgtctctgcttgacaagttcctgatcaagaactgcaatgatttccagtatgagagcaaggtgttttacctgaaaatgaagggtgattactaccgctacttagcagaggtcgcttctggggagaagaaaaacagtgtggtcgaagcttctgaagctgcctacaaggaagcctttgaaatcagcaaagagcagatgcaacccacgcatcccatccggctgggcctggccctcaacttctccgtgttctactatgagatccagaatgcacctgagcaagcctgcctcttagccaaacaagccttcgatgatgccatagctgagctggacacactaaacgaggattcctataaggactccacgctgatcatgcagttgctgcgagacaacctcaccctctggacgagcgaccagcaggatgaagaagcaggagaaggcaactgaagatccttcaggtcccctggcccttccttcacccaccacccccatcatcaccgattcttccttgccacaatcactaaatatctagtgctaaacctatctgtattggcagcacagctactcagatctgcactcctgtctcttgggaagcagtttcagataaatcatgggcattgctggactgatggttgctttgagcccacaggagctccctttttgaattgtgtggagaagtgtgttctgatgaggcattttactatgcctgttgatctatgggaaatctaggcgaaagtaatggggaagattagaaagaattagccaaccaggctacagttgatatttaaaagatccatttaaaacaagctgatagtgtttcgttaagcagtacatcttgtgcatgcaaaaatgaattcacccctcccacctctttcttcaattaatggaaaactgttaagggaagctgatacagagagacaacttgctcctttccatcagctttataataaactgtttaacgtgaggtttcagtagctccttggttttgcctctttaaattatgacgtgcacaaaccttcttttcaatgcaatgcatctgaaagttttgatacttgtaacttttttttttttttggttgcaattgtttaagaatcatggatttattttttgtaactctttggctattgtccttgtgtatcctgacagcgccatgtgtgtcagcccatgtcaatcaagatgggtgattatgaaatgccagacttctaaaataaatgttttggaattcaatgggtaaataaatgctgctttggggatatta

SEQ ID NO: 51285 - DNA, 1926 bp, Homo sapiens
tgatctgcccgcccttggcctcctgaagtgctgggattacaggcataagccatcgcgcccggcctgttcagagtatcttttgcagaatggctgaagctcgaggttttcttcttcaccattatgtactgctgctgtacaaccttttcataattatccttagtcccattcctctaccaaggtgaaagcaacatcttatcagacccgaattatgaatttctcaagcccctatgattttctgttttgggtgccaagtatttatctcttctgttagactatagtctttcttcacatagggttcatgtctatattggttttatccatgggtggtttttattctccagagtgactgacctgttcgtaattccgttcttgagaaggattgttgattatgttgaagggaaggcttcttaccaagattttcagattttgctttcaatgtttatctttttggggttttgcaggtgacagagctgaatgaacctctctccaatgaagatcgaaatctcctctctgtggcctacaagaatgtggttggtgccaggcgatcttcctggagggtcattagcagcattgagcagaaaaccatggctgatggaaacgaaaagaaattggagaaagttaaagcttaccgggagaagattgagaaggagctggagacagtttgcaatgatgtcctgtctctgcttgacaagttcctgatcaagaactgcaatgatttccagtatgagagcaaggtgttttacctgaaaatgaagggtgattactaccgctacttagcagaggtcgcttctggggagaagaaaaacagtgtggtcgaagcttctgaagctgcctacaaggaagcctttgaaatcagcaaagagcagatgcaacccacgcatcccatccggctgggcctggccctcaacttctccgtgttctactatgagatccagaatgcacctgagcaagcctgcctcttagccaaacaagccttcgatgatgccatagctgagctggacacactaaacgaggattcctataaggactccacgctgatcatgcagttgctgcgagacaacctcaccctctggacgagcgaccagcaggatgaagaagcaggagaaggcaactgaagatccttcaggtcccctggcccttccttcacccaccacccccatcatcaccgattcttccttgccacaatcactaaatatctagtgctaaacctatctgtattggcagcacagctactcagatctgcactcctgtctcttgggaagcagtttcagataaatcatgggcattgctggactgatggttgctttgagcccacaggagctccctttttgaattgtgtggagaagtgtgttctgatgaggcattttactatgcctgttgatctatgggaaatctaggcgaaagtaatggggaagattagaaagaattagccaaccaggctacagttgatatttaaaagatccatttaaaacaagctgatagtgtttcgttaagcagtacatcttgtgcatgcaaaaatgaattcacccctcccacctctttcttcaattaatggaaaactgttaagggaagctgatacagagagacaacttgctcctttccatcagctttataataaactgtttaacgtgaggtttcagtagctccttggttttgcctctttaaattatgacgtgcacaaaccttcttttcaatgcaatgcatctgaaagttttgatacttgtaacttttttttttttttggttgcaattgtttaagaatcatggatttattttttgtaactctttggctattgtccttgtgtatcctgacagcgccatgtgtgtcagcccatgtcaatcaagatgggtgattatgaaatgccagacttctaaaataaatgttttggaattcaatgggtaaataaatgctgctttggggatatta

SEQ ID NO: 51286 - DNA, 2350 bp, Homo sapiens
gcggccgcgtctcctccctcggcgttgtccgcggcgcgagccacagcgcgcggggcgagccagcgagagggcgcgagcggcggcgctgcctgcagcctgcagcctgcagcctccggccggccggcgagccagtgcgcgtgcgcggcggcggcctccgcagcgaccggggagcggactgaccggcgggagggctagcgagccagcggtgtgaggcgcgaggcgaggccgagccgcgagcgacatgggggaccgggagcagctgctgcagcgggcgcggctggccgagcaggcggagcgctacgacgacatggcctccgctatgaaggcggtgacagagctgaatgaacctctctccaatgaagatcgaaatctcctctctgtggcctacaagaatgtggttggtgccaggcgatcttcctggagggtcattagcagcattgagcagaaaaccatggctgatggaaacgaaaagaaattggagaaagttaaagcttaccgggagaagattgagaaggagctggagacagtttgcaatgatgtcctgtctctgcttgacaagttcctgatcaagaactgcaatgatttccagtatgagagcaaggtgttttacctgaaaatgaagggtgattactaccgctacttagcagaggtcgcttctggggagaagaaaaacagtgtggtcgaagcttctgaagctgcctacaaggaagcctttgaaatcagcaaagagcagatgcaacccacgcatcccatccggctgggcctggccctcaacttctccgtgttctactatgagatccagaatgcacctgagcaagcctgcctcttagccaaacaagccttcgatgatgccatagctgagctggacacactaaacgaggattcctataaggactccacgctgatcatgcagttgctgcgagacaacctcaccctctggacgagcgaccagcaggatgaagaagcaggagaaggcaactgaagatccttcaggtcccctggcccttccttcacccaccacccccatcatcaccgattcttccttgccacaatcactaaatatctagtgctaaacctatctgtattggcagcacagctactcagatctgcactcctgtctcttgggaagcagtttcagataaatcatgggcattgctggactgatggttgctttgagcccacaggagctccctttttgaattgtgtggagaagtgtgttctgatgaggcattttactatgcctgttgatctatgggaaatctaggcgaaagtaatggggaagattagaaagaattagccaaccaggctacagttgatatttaaaagatccatttaaaacaagctgatagtgtttcgttaagcagtacatcttgtgcatgcaaaaatgaattcacccctcccacctctttcttcaattaatggaaaactgttaagggaagctgatacagagagacaacttgctcctttccatcagctttataataaactgtttaacgtgaggtttcagtagctccttggttttgcctctttaaattatgacgtgcacaaaccttcttttcaatgcaatgcatctgaaagagaacccacgcgtccggtgcaaaggatgagttgcacattgttgaagcagaggcaatgaattacgaaggcagtccaattaaagtaacactggcaactttgaaaatgtctgtacagccaacggtttcccttgggggctttgaaataacaccaccagtggtcttaaggttgaagtgtggttcagggccagtgcatattagtggacagcacttagtagctgtggaggaagatgcagagtcagaagatgaagaggaggaggatgtgaaactcttaagtatatctggaaagcggtctgcccctggaggtggtagcaaggttccacagaaaaaagtaaaacttgctgctgatgaagatgatgacgatgatgatgaagaggatgatgatgaagatgatgatgatgatgattttgatgatgagggagtgaagaaaaagggcagtgaagaaattatgagatatccagcaaaatggcaagtcaatcgatggaaagaatcaaacatcatcaaaccaagatcaaaggcagaatccttcagaaacggaaaaatcctaaaaacaaggacttgtcggtggagaaatatagcaaagggcagtttaaaaggctgtagctggcaatgtattagcccgatgggaagaagaggaacattccctgtggtctacccacagtctttttatttccctctttgcccccttgtgaaaacgttcccttctggtgaaaccttttgttgcgcacaagtctgatataaaagggcccactctaattgcctccgcctcacatcta

SEQ ID NO: 51287 - DNA, 1646 bp, Homo sapiens
gcggccgcgtctcctccctcggcgttgtccgcggcgcgagccacagcgcgcggggcgagccagcgagagggcgcgagcggcggcgctgcctgcagcctgcagcctgcagcctccggccggccggcgagccagtgcgcgtgcgcggcggcggcctccgcagcgaccggggagcggactgaccggcgggagggctagcgagccagcggtgtgaggcgcgaggcgaggccgagccgcgagcgacatgggggaccgggagcagctgctgcagcgggcgcggctggccgagcaggcggagcgctacgacgacatggcctccgctatgaaggcggtgacagagctgaatgaacctctctccaatgaagatcgaaatctcctctctgtggcctacaagaatgtggttggtgccaggcgatcttcctggagggtcattagcagcattgagcagaaaaccatggctgatggaaacgaaaagaaattggagaaagttaaagcttaccgggagaagattgagaaggagctggagacagtttgcaatgatgtcctgtctctgcttgacaagttcctgatcaagaactgcaatgatttccagtatgagagcaaggtgttttacctgaaaatgaagggtgattactaccgctacttagcagaggtcgcttctggggagaagaaaaacagtgtggtcgaagcttctgaagctgcctacaaggaagcctttgaaatcagcaaagagcagatgcaacccacgcatcccatccggctgggcctggccctcaacttctccgtgttctactatgagatccagaatgcacctgagcaagcctgcctcttagccaaacaagccttcgatgatgccatagctgagctggacacactaaacgaggattcctataaggactccacgctgatcatgcagttgctgcgagacaacctcaccctctggacgagcgaccagcaggatgaagaagcaggagaaggcaactgaagatccttcaggtcccctggcccttccttcacccaccacccccatcatcaccgattcttccttgccacaatcactaaatatctagtgctaaacctatctgtattggcagcacagctactcagatctgcactcctgtctcttgggaagcagtttcagataaatcatgggcattgctggactgatggttgctttgagcccacaggagctccctttttgaattgtgtggagaagtgtgttctgatgaggcattttactatgcctgttgatctatgggaaatctaggcgaaagtaatggggaagattagaaagaattagccaaccaggctacagttgatatttaaaagatccatttaaaacaagctgatagtgtttcgttaagcagtacatcttgtgcatgcaaaaatgaattcacccctcccacctctttcttcaattaatggaaaactgttaagggaagctgatacagagagacaacttgctcctttccatcagctttataataaactgtttaacgtgaggtttcagtagctccttggttttgcctctttaaattatgacgtgcacaaaccttcttttcaatgcaatgcatctgaaagacaagtatcaaaactttcagtcgagcggccgcgaatttagtagtagtaggctagtagtagtaggccgc

SEQ ID NO: 51288 - DNA, 1747 bp, Homo sapiens
gcggccgcgtctcctccctcggcgttgtccgcggcgcgagccacagcgcgcggggcgagccagcgagagggcgcgagcggcggcgctgcctgcagcctgcagcctgcagcctccggccggccggcgagccagtgcgcgtgcgcggcggcggcctccgcagcgaccggggagcggactgaccggcgggagggctagcgagccagcggtgtgaggcgcgaggcgaggccgagccgcgagcgacatgggggaccgggagcagctgctgcagcgggcgcggctggccgagcaggcggagcgctacgacgacatggcctccgctatgaaggcggtgacagagctgaatgaacctctctccaatgaagatcgaaatctcctctctgtggcctacaagaatgtggttggtgccaggcgatcttcctggagggtcattagcagcattgagcagaaaaccatggctgatggaaacgaaaagaaattggagaaagttaaagcttaccgggagaagattgagaaggagctggagacagtttgcaatgatgtcctgtctctgcttgacaagttcctgatcaagaactgcaatgatttccagtatgagagcaaggtgttttacctgaaaatgaagggtgattactaccgctacttagcagaggtcgcttctggggagaagaaaaacagtgtggtcgaagcttctgaagctgcctacaaggaagcctttgaaatcagcaaagagcagatgcaacccacgcatcccatccggctgggcctggccctcaacttctccgtgttctactatgagatccagaatgcacctgagcaagcctgcctcttagccaaacaagccttcgatgatgccatagctgagctggacacactaaacgaggattcctataaggactccacgctgatcatgcagttgctgcgagacaacctcaccctctggacgagcgaccagcaggatgaagaagcaggagaaggcaactgaagatccttcaggtcccctggcccttccttcacccaccacccccatcatcaccgattcttccttgccacaatcactaaatatctagtgctaaacctatctgtattggcagcacagctactcagatctgcactcctgtctcttgggaagcagtttcagataaatcatgggcattgctggactgatggttgctttgagcccacaggagctccctttttgaattgtgtggagaagtgtgttctgatgaggcattttactatgcctgttgatctatgggaaatctaggcgaaagtaatggggaagattagaaagaattagccaaccaggctacagttgatatttaaaagatccatttaaaacaagctgatagtgtttcgttaagcagtacatcttgtgcatgcaaaaatgaggaagctgatacagagagacaacttgctcctttccatcagctttataataaactgtttaacgtgaggtttcagtagctccttggttttgcctctttaaattatgacgtgcacaaaccttcttttcaatgcaatgcatctgaaagttttgatacttgtaacttttttttttttttggttgcaattgtttaagaatcatggatttattttttgtaactctttggctattgtccttgtgtatcctgacagcgccatgtgtgtcagcccatgtcaatcaagatgggtgattatgaaatgccagacttctaaaataaatgttttggaattcaatgggtaaataaatgctgctttggggatatta

SEQ ID NO: 51289 - DNA, 1853 bp, Homo sapiens
gcggccgcgtctcctccctcggcgttgtccgcggcgcgagccacagcgcgcggggcgagccagcgagagggcgcgagcggcggcgctgcctgcagcctgcagcctgcagcctccggccggccggcgagccagtgcgcgtgcgcggcggcggcctccgcagcgaccggggagcggactgaccggcgggagggctagcgagccagcggtgtgaggcgcgaggcgaggccgagccgcgagcgacatgggggaccgggagcagctgctgcagcgggcgcggctggccgagcaggcggagcgctacgacgacatggcctccgctatgaaggcggtgacagagctgaatgaacctctctccaatgaagatcgaaatctcctctctgtggcctacaagaatgtggttggtgccaggcgatcttcctggagggtcattagcagcattgagcagaaaaccatggctgatggaaacgaaaagaaattggagaaagttaaagcttaccgggagaagattgagaaggagctggagacagtttgcaatgatgggtcccctttgggcggttttcccctttttccctttgggggctttttggtgaaccaaagggcttttccctggatcaaggaaaaccttgtcaagaactgcaatgatttccagtatgagagcaaggtgttttacctgaaaatgaagggtgattactaccgctacttagcagaggtcgcttctggggagaagaaaaacagtgtggtcgaagcttctgaagctgcctacaaggaagcctttgaaatcagcaaagagcagatgcaacccacgcatcccatccggctgggcctggccctcaacttctccgtgttctactatgagatccagaatgcacctgagcaagcctgcctcttagccaaacaagccttcgatgatgccatagctgagctggacacactaaacgaggattcctataaggactccacgctgatcatgcagttgctgcgagacaacctcaccctctggacgagcgaccagcaggatgaagaagcaggagaaggcaactgaagatccttcaggtcccctggcccttccttcacccaccacccccatcatcaccgattcttccttgccacaatcactaaatatctagtgctaaacctatctgtattggcagcacagctactcagatctgcactcctgtctcttgggaagcagtttcagataaatcatgggcattgctggactgatggttgctttgagcccacaggagctccctttttgaattgtgtggagaagtgtgttctgatgaggcattttactatgcctgttgatctatgggaaatctaggcgaaagtaatggggaagattagaaagaattagccaaccaggctacagttgatatttaaaagatccatttaaaacaagctgatagtgtttcgttaagcagtacatcttgtgcatgcaaaaatgaattcacccctcccacctctttcttcaattaatggaaaactgttaagggaagctgatacagagagacaacttgctcctttccatcagctttataataaactgtttaacgtgaggtttcagtagctccttggttttgcctctttaaattatgacgtgcacaaaccttcttttcaatgcaatgcatctgaaagttttgatacttgtaacttttttttttttttggttgcaattgtttaagaatcatggatttattttttgtaactctttggctattgtccttgtgtatcctgacagcgccatgtgtgtcagcccatgtcaatcaagatgggtgattatgaaatgccagacttctaaaataaatgttttggaattcaatgggtaaataaatgctgctttggggatatta

SEQ ID NO: 51290 - DNA, 1302 bp, Homo sapiens
agcgtagcaaggactatacaagcgtatgcggactgagccgtcgtaattgcatagtgtcgtgactggttgaaaccctcaagaactgcaatgatttccagtatgagagcaaggtgttttacctgaaaatgaagggtgattactaccgctacttagcagaggtcgcttctggggagaagaaaaacagtgtggtcgaagcttctgaagctgcctacaaggaagcctttgaaatcagcaaagagcagatgcaacccacgcatcccatccggctgggcctggccctcaacttctccgtgttctactatgagatccagaatgcacctgagcaagcctgcctcttagccaaacaagccttcgatgatgccatagctgagctggacacactaaacgaggattcctataaggactccacgctgatcatgcagttgctgcgagacaacctcaccctctggacgagcgaccagcaggatgaagaagcaggagaaggcaactgaagatccttcaggtcccctggcccttccttcacccaccacccccatcatcaccgattcttccttgccacaatcactaaatatctagtgctaaacctatctgtattggcagcacagctactcagatctgcactcctgtctcttgggaagcagtttcagataaatcatgggcattgctggactgatggttgctttgagcccacaggagctccctttttgaattgtgtggagaagtgtgttctgatgaggcattttactatgcctgttgatctatgggaaatctaggcgaaagtaatggggaagattagaaagaattagccaaccaggctacagttgatatttaaaagatccatttaaaacaagctgatagtgtttcgttaagcagtacatcttgtgcatgcaaaaatgaattcacccctcccacctctttcttcaattaatggaaaactgttaagggaagctgatacagagagacaacttgctcctttccatcagctttataataaactgtttaacgtgaggtttcagtagctccttggttttgcctctttaaattatgacgtgcacaaaccttcttttcaatgcaatgcatctgaaagttttgatacttgtaacttttttttttttttggttgcaattgtttaagaatcatggatttattttttgtaactctttggctattgtccttgtgtatcctgacagcgccatgtgtgtcagcccatgtcaatcaagatgggtgattatgaaatgccagacttctaaaataaatgttttggaattcaatgggtaaataaatgctgctttggggatatta

SEQ ID NO: 51291 - DNA, 1745 bp, Homo sapiens
gcggccgcgtctcctccctcggcgttgtccgcggcgcgagccacagcgcgcggggcgagccagcgagagggcgcgagcggcggcgctgcctgcagcctgcagcctgcagcctccggccggccggcgagccagtgcgcgtgcgcggcggcggcctccgcagcgaccggggagcggactgaccggcgggagggctagcgagccagcggtgtgaggcgcgaggcgaggccgagccgcgagcgacatgggggaccgggagcagctgctgcagcgggcgcggctggccgagcaggcggagcgctacgacgacatggcctccgctatgaaggcggtgacagagctgaatgaacctctctccaatgaagatcgaaatctcctctctgtggcctacaagaatgtggttggtgccaggcgatcttcctggagggtcattagcagcattgagcagaaaaccatggctgatggaaacgaaaagaaattggagaaagttaaagcttaccgggagaagattgagaaggagctggagacagtttgcaatgatgtcctgtctctgcttgacaagttcctgatcaagaactgcaatgatttccagtatgagagcaaggtgttttacctgaaaatgaagggtgattactaccgctacttagcagaggtcgcttctggggagaagaaaaacagtgtggtcgaagcttctgaagctgcctacaaggaagcctttgaaatcagcaaattctccgtgttctactatgagatccagaatgcacctgagcaagcctgcctcttagccaaacaagccttcgatgatgccatagctgagctggacacactaaacgaggattcctataaggactccacgctgatcatgcagttgctgcgagacaacctcaccctctggacgagcgaccagcaggatgaagaagcaggagaaggcaactgaagatccttcaggtcccctggcccttccttcacccaccacccccatcatcaccgattcttccttgccacaatcactaaatatctagtgctaaacctatctgtattggcagcacagctactcagatctgcactcctgtctcttgggaagcagtttcagataaatcatgggcattgctggactgatggttgctttgagcccacaggagctccctttttgaattgtgtggagaagtgtgttctgatgaggcattttactatgcctgttgatctatgggaaatctaggcgaaagtaatggggaagattagaaagaattagccaaccaggctacagttgatatttaaaagatccatttaaaacaagctgatagtgtttcgttaagcagtacatcttgtgcatgcaaaaatgaattcacccctcccacctctttcttcaattaatggaaaactgttaagggaagctgatacagagagacaacttgctcctttccatcagctttataataaactgtttaacgtgaggtttcagtagctccttggttttgcctctttaaattatgacgtgcacaaaccttcttttcaatgcaatgcatctgaaagttttgatacttgtaacttttttttttttttggttgcaattgtttaagaatcatggatttattttttgtaactctttggctattgtccttgtgtatcctgacagcgccatgtgtgtcagcccatgtcaatcaagatgggtgattatgaaatgccagacttctaaaataaatgttttggaattcaatgggtaaataaatgctgctttggggatatta

SEQ ID NO: 51292 - DNA, 340 bp, Homo sapiens
ctttataataaactgtttaacgtgaggtttcagtagctccttggttttgcctctttaaattatgacgtgcacaaaccttcttttcaatgcaatgcatctgaaagttttgatacttgtaacttttttttttttttggttgcaattgtttaagaatcatggatttattttttgtaactctttggctattgtccttgtgtatcctgacagcgccatgtgtgtcagcccatgtcaatcaagatgggtgattatgaaatgccagacttctaaaataaatgttttggaattcaatgggtaaataaatgctgctttggggatattattatctctgtttggtcttgat

SEQ ID NO: 51293 - DNA, 1178 bp, Homo sapiens
gcggccgcgtctcctccctcggcgttgtccgcggcgcgagccacagcgcgcggggcgagccagcgagagggcgcgagcggcggcgctgcctgcagcctgcagcctgcagcctccggccggccggcgagccagtgcgcgtgcgcggcggcggcctccgcagcgaccggggagcggactgaccggcgggagggctagcgagccagcggtgtgaggcgcgaggcgaggccgagccgcgagcgacatgggggaccgggagcagctgctgcagcgggcgcggctggccgagcaggcggagcgctacgacgacatggcctccgctatgaaggcggtgacagagctgaatgaacctctctccaatgaagatcgaaatctcctctctgtggcctacaagaatgtggttggtgccaggcgatcttcctggagggtcattagcagcattgagcagaaaaccatggctgatggaaacgaaaagaaattggagaaagttaaagcttaccgggagaagattgagaaggagctggagacagtttgcaatgatgtcctgtctctgcttgacaagttcctgatcaagaactgcaatgatttccagtatgagagcaaggtgttttacctgaaaatgaagggtgattactaccgctacttagcagaggtcgcttctggggagaagaaaaacagtgtggtcgaagcttctgaagctgcctacaaggaagcctttgaaatcagcaaagagcagatgcaacccacgcatcccatccggctgggcctggccctcaacttctccgtgttctactatgagatccagaatgcacctgagcaagcctgcctcttagccaaacaagccttcgatgatgccatagctgagctggacacactaaacgaggattcctataaggactccacgctgatcatgcagttgctgcgagacaacctcaccctctggacgagcgaccagcaggatgaagaagcaggagaaggcaactgaagatccttcaggtcccctggcccttccttcacccaccacccccatcatcaccgattcttccttgccacaatcactaaatatctagtgctaaacctatctgtattggcatcatcgaaggcttgtttggctaagaggcaggcttgctcaggtgcattctggatctcatagtagaacacggagaacgctgtggcggccg

SEQ ID NO: 51294 - DNA, 3274 bp, Homo sapiens
agctgaaactttgcaacccgagcgcgcacgctctgcgctcggccctgccagggcggcacgggagggcggcgcaggaggtgggacctgcgccgggaaggctccgggacgccagcgcacgcggagcggggaccccggagagccagcaggcgagaagaccggccgagggagagccgatcgcgcctcgagagatccgaggaagtggtcgcgggccgggaggctcccgtgccgagccgaggccaggggtctggggtcgcagcccggcgtgcctgcagctgccgtcgctcgggagcagcagctgtgcccgggatcccggcggcggcgggggaaggaggagctgcagctggactgtggcagctggagggagagggccgggctcccctggcggagccgcgctgggacgactggctgaccgcggccatgcagtcttgacggagtcgctcgggcgcaggggagcagccgcgggcgcgccctcccgggaaggggcaccggagcgcaggcagcagcactttatctgcgactctccagcccagcgagaggcgaagcggtttaccatggaacccgtgaccaagtggagccccaaacaagtggtggactggactagagggttggatgactgcctgcaacaatatgtccacaagtttgaacgagagaagatcaacggcgagcagctgctgcagatttcccatcaggacctggaggagctgggggtcacacggatcggacaccaggagcttgtgttggaggctgtggaccttctctgtgcactgaattatggcctcgaaactgataacatgaagaacttggttctgaaactgagagcatcttcccacaatttacagaattacataagtagccgacggaaaagtcccgcttacgatggcaacacctcccgcaaggcccccaatgagttcctgacctcggtggtggagctcatcggcgccgccaaggccctgctggcgtggctggaccgggctccgtttacagggatcactgatttctcagtcacgaagaacaaaattatccagctttgcttggacctgaccactacagtccagaaggattgctttgtagcggaaatggaggataaagttttaactgtggtcaaggttttaaatggcatctgtgacaaaacaatccgatctaccacagatcctgtgatgagccagtgtgcatgtctggaggaagttcacttaccaaacattaaacctggggaaggcctgggcatgtacatcaaatcaacctatgatgggttacacgtgattactggaaccacagaaaattctcctgcagacagatctcagaagattcatgctggtgacgaagtcattcaagttaatcagcaaactgtggtgggatggcagctgaaaaatctggtgaagaaattgagagagaatcccaccggagttgtgttactgcttaagaagcgccccaccgggtctttcaactttactcctgctcccctgaaaaacctacggtggaagccacctcttgtacagacctcacctccacccgcgacaacccagtcccctgaaagcactatggatacctcactgaagaaggagaagtcagccatcctggatctttatattcctcctccgcctgctgttccctactctccccgggatgagaatggcagttttgtttatggagggtccagtaagtgcaaacaaccattgcctggtcctaagggttcagagtccccgaattccttcttggaccaggaaagccggagacgaagattcaccattgcagactcggatcagttgcctgggtactcggtggaaaccaacattctgcccacaaaaatgagagagaaaacaccatcttatggcaagccacggcctttgtccatgcctgctgatgggaactggatggggattgtggacccttttgccagacctcgaggtcatggcaggaaaggggaggatgccctttgccggtatttcagtaacgagcggattcctccgatcattgaagagagctcctctcccccataccggttctccagacccacgaccgagcggcatctggtccggggtgcggactacatccgaggaagcaggtgctacatcaactcagatctccacagcagcgccacgattccattccaggaggaagggaccaaaaagaaatctggctcctcagctacgaagtcctcgtccacagaaccgtccctcctggtcagctggtttacgcgcctcaaactgttgactcactgagagggaccctgctcaggccacctgcctggctcctgccccaagtgccttgcttttacagtggacagcctcttctcgtttcagcctcagtattatgtagggaccttatgcaatttctttttcttttgaaaagttatctactgcccttcttggaagtttgcaggattggatgggaacaaattcagaggatcttaggtgctggcttgtggagacaaaaggagggaaatgggtagagcctgtttgtcttgcttccccagagatagaatgtgaagacacgcgctagaaatcgcagtcctggccagagacgttatggtcattgtgagggactggtggcattgttcctttttgaggggctggggggactcaaattggtggctgttttcacacagatgtgttggtttgtggtccaacttctttatctgaaaaagccagtgagaaaacatttttgatttgatttttctaaactatctaccatattttaagtgtagcagctttgactttgcaataacgtggcaagtatctgatttctcctttgaggcagaggtttaagtgtaggcctgttacacttgtttgatacctttttcatgacagtctcagtatagatcagttggtacagaaatacatgaacacattttgatagggcttatttcacacaaagaagtttatggttatttgtgtggggtggtgttgttatatattattgtctttaagggaaaagaagctataagattcgctgacagccaaagtatcatttagaaaagtgaagcaacaagatttaggttgatgaaagatacatgagtttgcattttgacctgttcagtgtctgtcttccagcacggtgtgtacacttcttcaaaattgtacacagtttgctaattagaaatatcttggaaagcctcatggtcactaattttcaactagcatcaggtattttgaaaacgtgtgtctggatattaactcttgtttaaactgaatgtatgatattttgttagaatggaaaagtactatcttgttaatttaagtattttaaatatagttgtatatttttcttactctta

SEQ ID NO: 51295 - DNA, 3205 bp, Homo sapiens
agctgaaactttgcaacccgagcgcgcacgctctgcgctcggccctgccagggcggcacgggagggcggcgcaggaggtgggacctgcgccgggaaggctccgggacgccagcgcacgcggagcggggaccccggagagccagcaggcgagaagaccggccgagggagagccgatcgcgcctcgagagatccgaggaagtggtcgcgggccgggaggctcccgtgccgagccgaggccaggggtctggggtcgcagcccggcgtgcctgcagctgccgtcgctcgggagcagcagctgtgcccgggatcccggcggcggcgggggaaggaggagctgcagctggactgtggcagctggagggagagggccgggctcccctggcggagccgcgctgggacgactggctgaccgcggccatgcagtcttgacggagtcgctcgggcgcaggggagcagccgcgggcgcgccctcccgggaaggggcaccggagcgcaggcagcagcactttatctgcgactctccagcccagcgagaggcgaagcggtttaccatggaacccgtgaccaagtggagccccaaacaagtggtggactggactagagggttggatgactgcctgcaacaatatgtccacaagtttgaacgagagaagatcaacggcgagcagctgctgcagatttcccatcaggacctggaggagctgggggtcacacggatcggacaccaggagcttgtgttggaggctgtggaccttctctgtgcactgaattatggcctcgaaactgataacatgaagaacttggttctgaaactgagagcatcttcccacaatttacagaattacataagtagccgacggaaaagtcccgcttacgatggcaacacctcccgcaaggcccccaatgagttcctgacctcggtggtggagctcatcggcgccgccaaggccctgctggcgtggctggaccgggctccgtttacagggatcactgatttctcagtcacgaagaacaaaattatccagctttgcttggacctgaccactacagtccagaaggattgctttgtagcggaaatggaggataaagttttaactgtggtcaaggttttaaatggcatctgtgacaaaacaatccgatctaccacagatcctgtgatgagccagtgtgcatgtctggaggaagttcacttaccaaacattaaacctggggaaggcctgggcatgtacatcaaatcaacctatgatgggttacacgtgattactggaaccacagaaaatgtgggatggcagctgaaaaatctggtgaagaaattgagagagaatcccaccggagttgtgttactgcttaagaagcgccccaccgggtctttcaactttactcctgctcccctgaaaaacctacggtggaagccacctcttgtacagacctcacctccacccgcgacaacccagtcccctgaaagcactatggatacctcactgaagaaggagaagtcagccatcctggatctttatattcctcctccgcctgctgttccctactctccccgggatgagaatggcagttttgtttatggagggtccagtaagtgcaaacaaccattgcctggtcctaagggttcagagtccccgaattccttcttggaccaggaaagccggagacgaagattcaccattgcagactcggatcagttgcctgggtactcggtggaaaccaacattctgcccacaaaaatgagagagaaaacaccatcttatggcaagccacggcctttgtccatgcctgctgatgggaactggatggggattgtggacccttttgccagacctcgaggtcatggcaggaaaggggaggatgccctttgccggtatttcagtaacgagcggattcctccgatcattgaagagagctcctctcccccataccggttctccagacccacgaccgagcggcatctggtccggggtgcggactacatccgaggaagcaggtgctacatcaactcagatctccacagcagcgccacgattccattccaggaggaagggaccaaaaagaaatctggctcctcagctacgaagtcctcgtccacagaaccgtccctcctggtcagctggtttacgcgcctcaaactgttgactcactgagagggaccctgctcaggccacctgcctggctcctgccccaagtgccttgcttttacagtggacagcctcttctcgtttcagcctcagtattatgtagggaccttatgcaatttctttttcttttgaaaagttatctactgcccttcttggaagtttgcaggattggatgggaacaaattcagaggatcttaggtgctggcttgtggagacaaaaggagggaaatgggtagagcctgtttgtcttgcttccccagagatagaatgtgaagacacgcgctagaaatcgcagtcctggccagagacgttatggtcattgtgagggactggtggcattgttcctttttgaggggctggggggactcaaattggtggctgttttcacacagatgtgttggtttgtggtccaacttctttatctgaaaaagccagtgagaaaacatttttgatttgatttttctaaactatctaccatattttaagtgtagcagctttgactttgcaataacgtggcaagtatctgatttctcctttgaggcagaggtttaagtgtaggcctgttacacttgtttgatacctttttcatgacagtctcagtatagatcagttggtacagaaatacatgaacacattttgatagggcttatttcacacaaagaagtttatggttatttgtgtggggtggtgttgttatatattattgtctttaagggaaaagaagctataagattcgctgacagccaaagtatcatttagaaaagtgaagcaacaagatttaggttgatgaaagatacatgagtttgcattttgacctgttcagtgtctgtcttccagcacggtgtgtacacttcttcaaaattgtacacagtttgctaattagaaatatcttggaaagcctcatggtcactaattttcaactagcatcaggtattttgaaaacgtgtgtctggatattaactcttgtttaaactgaatgtatgatattttgttagaatggaaaagtactatcttgttaatttaagtattttaaatatagttgtatatttttcttactctta

SEQ ID NO: 51296 - DNA, 3236 bp, Homo sapiens
agctgaaactttgcaacccgagcgcgcacgctctgcgctcggccctgccagggcggcacgggagggcggcgcaggaggtgggacctgcgccgggaaggctccgggacgccagcgcacgcggagcggggaccccggagagccagcaggcgagaagaccggccgagggagagccgatcgcgcctcgagagatccgaggaagtggtcgcgggccgggaggctcccgtgccgagccgaggccaggggtctggggtcgcagcccggcgtgcctgcagctgccgtcgctcgggagcagcagctgtgcccgggatcccggcggcggcgggggaaggaggagctgcagctggactgtggcagctggagggagagggccgggctcccctggcggagccgcgctgggacgactggctgaccgcggccatgcagtcttgacggagtcgctcgggcgcaggggagcagccgcgggcgcgccctcccgggaaggggcaccggagcgcaggcagcagcactttatctgcgactctccagcccagcgagaggcgaagcggtttaccatggaacccgtgaccaagtggagccccaaacaagtggtggactggactagagggttggatgactgcctgcaacaatatgtccacaagtttgaacgagagaagatcaacggcgagcagctgctgcagatttcccatcaggacctggaggagctgggggtcacacggatcggacaccaggagcttgtgttggaggctgtggaccttctctgtgcactgaattatggcctcgaaactgataacatgaagaacttggttctgaaactgagagcatcttcccacaatttacagaattacataagtagccgacggaaaagtcccgcttacgatggcaacacctcccgcaaggcccccaatgagttcctgacctcggtggtggagctcatcggcgccgccaaggccctgctggcgtggctggaccgggctccgtttacagggatcactgatttctcagtcacgaagaacaaaattatccagctttgcttggacctgaccactacagtccagaaggattgctttgtagcggaaatggaggataaagttttaactgtggtcaaggttttaaatggcatctgtgacaaaacaatccgatctaccacagatcctgtgatgagccagtgtgcatgtctggaggaagttcacttaccaaacattaaacctggggaaggcctgggcatgtacatcaaatcaacctatgatgggttacacgtgattactggaaccacagaaaattctcctgcagacagatctcagaagattcatgctggtgacgaagtcattcaagttaatcagcaaactgtggtgggatggcagctgaaaaatctggtgaagaaattgagagagaatcccaccggagttgtgttactgcttaagaagcgccccaccgggtctttcaactttactcctgctcccctgaaaaacctacggtggaagccacctcttgtacagacctcacctccacccgcgacaacccagtcccctgaaagcactatggatacctcactgaagaaggagaagtcagccatcctggatctttatattcctcctccgcctgctgttccctactctccccgggatgagaatggcagttttgtttatggagggtccagtaagtgcaaacaaccattgcctggtcctaagggttcagagtccccgaattccttcttggaccaggaaagccggagacgaagattcaccattgcagactcggatcagttgcctgggtactcggtggaaaccaacattctgcccacaaaaatgagagagaaaacaccatcttatgtggatggggattgtggacccttttgccagacctcgaggtcatggcaggaaaggggaggatgccctttgccggtatttcagtaacgagcggattcctccgatcattgaagagagctcctctcccccataccggttctccagacccacgaccgagcggcatctggtccggggtgcggactacatccgaggaagcaggtgctacatcaactcagatctccacagcagcgccacgattccattccaggaggaagggaccaaaaagaaatctggctcctcagctacgaagtcctcgtccacagaaccgtccctcctggtcagctggtttacgcgcctcaaactgttgactcactgagagggaccctgctcaggccacctgcctggctcctgccccaagtgccttgcttttacagtggacagcctcttctcgtttcagcctcagtattatgtagggaccttatgcaatttctttttcttttgaaaagttatctactgcccttcttggaagtttgcaggattggatgggaacaaattcagaggatcttaggtgctggcttgtggagacaaaaggagggaaatgggtagagcctgtttgtcttgcttccccagagatagaatgtgaagacacgcgctagaaatcgcagtcctggccagagacgttatggtcattgtgagggactggtggcattgttcctttttgaggggctggggggactcaaattggtggctgttttcacacagatgtgttggtttgtggtccaacttctttatctgaaaaagccagtgagaaaacatttttgatttgatttttctaaactatctaccatattttaagtgtagcagctttgactttgcaataacgtggcaagtatctgatttctcctttgaggcagaggtttaagtgtaggcctgttacacttgtttgatacctttttcatgacagtctcagtatagatcagttggtacagaaatacatgaacacattttgatagggcttatttcacacaaagaagtttatggttatttgtgtggggtggtgttgttatatattattgtctttaagggaaaagaagctataagattcgctgacagccaaagtatcatttagaaaagtgaagcaacaagatttaggttgatgaaagatacatgagtttgcattttgacctgttcagtgtctgtcttccagcacggtgtgtacacttcttcaaaattgtacacagtttgctaattagaaatatcttggaaagcctcatggtcactaattttcaactagcatcaggtattttgaaaacgtgtgtctggatattaactcttgtttaaactgaatgtatgatattttgttagaatggaaaagtactatcttgttaatttaagtattttaaatatagttgtatatttttcttactctta

SEQ ID NO: 51297 - DNA, 2516 bp, Homo sapiens
tttttgtcagtgtgttaatgaatgttttgttgaacccttttcatctatcaaggactgaaatatctgatttaatctcagtggtgcttaaaataaacttttgtggctgagtttactcaagcccttatttgaaagctattcttataggcaggcccagagctaaagactgccagcttgttggcccactgctgtctgttcctgggggcacattgggagccgtcgtcaggtttcttgacttggacttctgacttactactctctggacagtctggagagtaggtggatttcagttcagttatttttgattgctttgtagcggaaatggaggataaagttttaactgtggtcaaggttttaaatggcatctgtgacaaaacaatccgatctaccacagatcctgtgatgagccagtgtgcatgtctggaggaagttcacttaccaaacattaaacctggggaaggcctgggcatgtacatcaaatcaacctatgatgggttacacgtgattactggaaccacagaaaattctcctgcagacagatctcagaagattcatgctggtgacgaagtcattcaagttaatcagcaaactgtggtgggatggcagctgaaaaatctggtgaagaaattgagagagaatcccaccggagttgtgttactgcttaagaagcgccccaccgggtctttcaactttactcctgctcccctgaaaaacctacggtggaagccacctcttgtacagacctcacctccacccgcgacaacccagtcccctgaaagcactatggatacctcactgaagaaggagaagtcagccatcctggatctttatattcctcctccgcctgctgttccctactctccccgggatgagaatggcagttttgtttatggagggtccagtaagtgcaaacaaccattgcctggtcctaagggttcagagtccccgaattccttcttggaccaggaaagccggagacgaagattcaccattgcagactcggatcagttgcctgggtactcggtggaaaccaacattctgcccacaaaaatgagagagaaaacaccatcttatggcaagccacggcctttgtccatgcctgctgatgggaactggatggggattgtggacccttttgccagacctcgaggtcatggcaggaaaggggaggatgccctttgccggtatttcagtaacgagcggattcctccgatcattgaagagagctcctctcccccataccggttctccagacccacgaccgagcggcatctggtccggggtgcggactacatccgaggaagcaggtgctacatcaactcagatctccacagcagcgccacgattccattccaggaggaagggaccaaaaagaaatctggctcctcagctacgaagtcctcgtccacagaaccgtccctcctggtcagctggtttacgcgcctcaaactgttgactcactgagagggaccctgctcaggccacctgcctggctcctgccccaagtgccttgcttttacagtggacagcctcttctcgtttcagcctcagtattatgtagggaccttatgcaatttctttttcttttgaaaagttatctactgcccttcttggaagtttgcaggattggatgggaacaaattcagaggatcttaggtgctggcttgtggagacaaaaggagggaaatgggtagagcctgtttgtcttgcttccccagagatagaatgtgaagacacgcgctagaaatcgcagtcctggccagagacgttatggtcattgtgagggactggtggcattgttcctttttgaggggctggggggactcaaattggtggctgttttcacacagatgtgttggtttgtggtccaacttctttatctgaaaaagccagtgagaaaacatttttgatttgatttttctaaactatctaccatattttaagtgtagcagctttgactttgcaataacgtggcaagtatctgatttctcctttgaggcagaggtttaagtgtaggcctgttacacttgtttgatacctttttcatgacagtctcagtatagatcagttggtacagaaatacatgaacacattttgatagggcttatttcacacaaagaagtttatggttatttgtgtggggtggtgttgttatatattattgtctttaagggaaaagaagctataagattcgctgacagccaaagtatcatttagaaaagtgaagcaacaagatttaggttgatgaaagatacatgagtttgcattttgacctgttcagtgtctgtcttccagcacggtgtgtacacttcttcaaaattgtacacagtttgctaattagaaatatcttggaaagcctcatggtcactaattttcaactagcatcaggtattttgaaaacgtgtgtctggatattaactcttgtttaaactgaatgtatgatattttgttagaatggaaaagtactatcttgttaatttaagtattttaaatatagttgtatatttttcttactctta

SEQ ID NO: 51298 - DNA, 3428 bp, Homo sapiens
agctgaaactttgcaacccgagcgcgcacgctctgcgctcggccctgccagggcggcacgggagggcggcgcaggaggtgggacctgcgccgggaaggctccgggacgccagcgcacgcggagcggggaccccggagagccagcaggcgagaagaccggccgagggagagccgatcgcgcctcgagagatccgaggaagtggtcgcgggccgggaggctcccgtgccgagccgaggccaggggtctggggtcgcagcccggcgtgcctgcagctgccgtcgctcgggagcagcagctgtgcccgggatcccggcggcggcgggggaaggaggagctgcagctggactgtggcagctggagggagagggccgggctcccctggcggagccgcgctgggacgactggctgaccgcggccatgcagtcttgacggagtcgctcgggcgcaggggagcagccgcgggcgcgccctcccgggaaggggcaccggagcgcaggcagcagcactttatctgcgactctccagcccagcgagaggcgaagcggtttaccatggaacccgtgaccaagtggagccccaaacaagtggtggactggactagagggttggatgactgcctgcaacaatatgtccacaagtttgaacgagagaagatcaacggcgagcagctgctgcagatttcccatcaggacctggaggagctgggggtcacacggatcggacaccaggagcttgtgttggaggctgtggaccttctctgtgcactgaattatggcctcgaaactgataacatgaagaacttggttctgaaactgagagcatcttcccacaatttacagaattacataagtagccgacggaaaagtcccgcttacgatggcaacacctcccgcaaggcccccaatgagttcctgacctcggtggtggagctcatcggcgccgccaaggccctgctggcgtggctggaccgggctccgtttacagggatcactgatttctcagtcacgaagaacaaaattatccagctttgcttggacctgaccactacagtccagaaggattgctttgtagcggaaatggaggataaagttttaactgtggtcaaggttttaaatggcatctgtgacaaaacaatccgatctaccacagatcctgtgatgagccagtgtgcatgtctggaggaagttcacttaccaaacattaaacctggggaaggcctgggcatgtacatcaaatcaacctatgatgggttacacgtgattactggaaccacagaaaattctcctgcagacagatctcagaagattcatgctggtgacgaagtcattcaagttaatcagcaaactgtggtgggatggcagctgaaaaatctggtgaagaaattgagagagaatcccaccggagttgtgttactgcttaagaagcgccccaccgggtctttcaactttactcctgctcccctgaaaaacctacggtggaagccacctcttgtacagacctcacctccacccgcgacaacccagtcccctgaaagcactatggatacctcactgaagaaggagaagtcagccatcctggatctttatattcctcctccgcctgctgttccctactctccccgggatgagaatggcagttttgtttatggagggtccagtaagtgcaaacaaccattgcctggtcctaagggttcagagtccccgaattccttcttggaccaggaaagccggagacgaagattcaccattgcagactcggatcagttgcctgggtactcggtggaaaccaacattctgcccacaaaaatgagagagaaaacaccatcttatggcaagccacggcctttgtccatgcctgctgatgggaactggatggggattgtggacccttttgccagacctcgaggtcatggcaggaaaggggaggatgccctttgccggtatttcagtaacgagcggattcctccgatcattgaagagagctcctctcccccataccggttctccagacccacgaccgagcggcatctggtccggggtgcggactacatccgaggaagcaggtgctacatcaactcagatctccacagcagcgccacgattccattccaggaggaagggaccaaaaagaaatctggctcctcagctacgaagtcctcgtccacagaaccgtccctcctggtcagctggtttacgcgcctcaaactgttgactcactgagagggaccctgctcaggccacctgcctggctcctgccccaagtgccttgcttttacagtggacagcctcttctcgtttcagcctcagtattatgtagggaccttatgcaatttctttttcttttgaaaagttatctactgcccttcttggaagtttgcaggattggatgggaacaaattcagaggatcttaggtgctggcttgtggagacaaaaggagggaaatgggtagagcctgtttgtcttgcttccccagagatagaatgtgaagacacgcgctagaaatcgcagtcctggccagagacgttatggtcattgtgagggactggtggcattgttcctttttgaggggctggggggactcaaattggtggctgttttcacacagatgtgttggtttgtggtccaacttctttatctgaaaaagccagtgagaaaacatttttgatttgatttttctaaactatctaccatattttaagtgtagcagctttgactttgcaataacgtggcaagtatctgatttctcctttgaggcagaggtttaagtgtaggcctgttacacttgtttgatacctttttcatgacagtctcagtatagatcagttggtacagaaatacatgaacacattttgatagggcttatttcacacaaagaagtttatggttatttgtgtggggtggtgttgttatatattattgtctttaagggaaaagaagctataagattcgctgacagccaaagtatcatttagaaaagtgaagcaacaagatttaggttgatgaaagatacatgagtttgcattttgacctgttcagtgtctgtcttccagcacggtgtgtacacttcttcaaaattgtacacagtttgctaattagaaatatcttggaaagcctcatggtcactaattttcaactagcatcaggtattttgaaaacgtgtgtctggatattaactcttgtttaaactgaatgtatgatattttgttagaatggaaaagtactatcttgttaatttaagtattttaaatatagttgtatatttttcttactcttagtcacctgtaattgaaatatttctgttttgcgtcatacacgaagctagtgaaaaagaaagtgcaaggcattttcagatgagcaagtgactatcgtggctgttgccagcagggcagtattgttaaaaaaaatcaaaataaaccctcccaagcatt

SEQ ID NO: 51299 - DNA, 2331 bp, Homo sapiens
  misc_feature (1502)..(1502): n is a, c, g, or t
agctgaaactttgcaacccgagcgcgcacgctctgcgctcggccctgccagggcggcacgggagggcggcgcaggaggtgggacctgcgccgggaaggctccgggacgccagcgcacgcggagcggggaccccggagagccagcaggcgagaagaccggccgagggagagccgatcgcgcctcgagagatccgaggaagtggtcgcgggccgggaggctcccgtgccgagccgaggccaggggtctggggtcgcagcccggcgtgcctgcagctgccgtcgctcgggagcagcagctgtgcccgggatcccggcggcggcgggggaaggaggagctgcagctggactgtggcagctggagggagagggccgggctcccctggcggagccgcgctgggacgactggctgaccgcggccatgcagtcttgacggagtcgctcgggcgcaggggagcagccgcgggcgcgccctcccgggaaggggcaccggagcgcaggcagcagcactttatctgcgactctccagcccagcgagaggcgaagcggtttaccatggaacccgtgaccaagtggagccccaaacaagtggtggactggactagagggttggatgactgcctgcaacaatatgtccacaagtttgaacgagagaagatcaacggcgagcagctgctgcagatttcccatcaggacctggaggagctgggggtcacacggatcggacaccaggagcttgtgttggaggctgtggaccttctctgtgcactgaattatggcctcgaaactgataacatgaagaacttggttctgaaactgagagcatcttcccacaatttacagaattacataagtagccgacggaaaagtcccgcttacgatggcaacacctcccgcaaggcccccaatgagttcctgacctcggtggtggagctcatcggcgccgccaaggccctgctggcgtggctggaccgggctccgtttacagggatcactgatttctcagtcacgaagaacaaaattatccagctttgcttggacctgaccactacagtccagaaggattgctttgtagcggaaatggaggataaagttttaactgtggtcaaggttttaaatggcatctgtgacaaaacaatccgatctaccacagatcctgtgatgagccagtgtgcatgtctggaggaagttcacttaccaaacattaaacctggggaaggcctgggcatgtacatcaaatcaacctatgatgggttacacgtgattactggaaccacagaaaattctcctgcagacagatctcagaagattcatgctggtgacgaagtcattcaagttaatcagcaaactgtggtgggatggcagctgaaaaatctggtgaagaaattgagagagaatcccaccggagttgtgttactgcttaagaagcgccccaccgggtctttcaactttactcctgctcccctgaaaaacctacggtggaagccacctcttgtacagaccttnacctccacccggacaacccattccccagagatagaatgtgaagacacgcgctagaaatcgcagtcctggccagagacgttatggtcattgtgagggactggtggcattgttcctttttgaggggctggggggactcaaattggtggctgttttcacacagatgtgttggtttgtggtccaacttctttatctgaaaaagccagtgagaaaacatttttgatttgatttttctaaactatctaccatattttaagtgtagcagctttgactttgcaataacgtggcaagtatctgatttctcctttgaggcagaggtttaagtgtaggcctgttacacttgtttgatacctttttcatgacagtctcagtatagatcagttggtacagaaatacatgaacacattttgatagggcttatttcacacaaagaagtttatggttatttgtgtggggtggtgttgttatatattattgtctttaagggaaaagaagctataagattcgctgacagccaaagtatcatttagaaaagtgaagcaacaagatttaggttgatgaaagatacatgagtttgcattttgacctgttcagtgtctgtcttccagcacggtgtgtacacttcttcaaaattgtacacagtttgctaattagaaatatcttggaaagcctcatggtcactaattttcaactagcatcaggtattttgaaaacgtgtgtctggatattaactcttgtttaaactgaatgtatgatattttgttagaatggaaaagtactatcttgttaatttaagtattttaaatatagttgtatatttttcttactctta

SEQ ID NO: 51300 - DNA, 1206 bp, Homo sapiens
ccttctttctcgtccctctgaaggcgccacgattccattccaggaggaagggaccaaaaagaaatctggctcctcagctacgaagtcctcgtccacagaaccgtccctcctggtcagctggtttacgcgcctcaaactgttgactcactgagagggaccctgctcaggccacctgcctggctcctgccccaagtgccttgcttttacagtggacagcctcttctcgtttcagcctcagtattatgtagggaccttatgcaatttctttttcttttgaaaagttatctactgcccttcttggaagtttgcaggattggatgggaacaaattcagaggatcttaggtgctggcttgtggagacaaaaggagggaaatgggtagagcctgtttgtcttgcttccccagagatagaatgtgaagacacgcgctagaaatcgcagtcctggccagagacgttatggtcattgtgagggactggtggcattgttcctttttgaggggctggggggactcaaattggtggctgttttcacacagatgtgttggtttgtggtccaacttctttatctgaaaaagccagtgagaaaacatttttgatttgatttttctaaactatctaccatattttaagtgtagcagctttgactttgcaataacgtggcaagtatctgatttctcctttgaggcagaggtttaagtgtaggcctgttacacttgtttgatacctttttcatgacagtctcagtatagatcagttggtacagaaatacatgaacacattttgatagggcttatttcacacaaagaagtttatggttatttgtgtggggtggtgttgttatatattattgtctttaagggaaaagaagctataagattcgctgacagccaaagtatcatttagaaaagtgaagcaacaagatttaggttgatgaaagatacatgagtttgcattttgacctgttcagtgtctgtcttccagcacggtgtgtacacttcttcaaaattgtacacagtttgctaattagaaatatcttggaaagcctcatggtcactaattttcaactagcatcaggtattttgaaaacgtgtgtctggatattaactcttgtttaaactgaatgtatgatattttgttagaatggaaaagtactatcttgttaatttaagtattttaaatatagttgtatatttttcttactctta

SEQ ID NO: 51301 - DNA, 2774 bp, Homo sapiens
agctgaaactttgcaacccgagcgcgcacgctctgcgctcggccctgccagggcggcacgggagggcggcgcaggaggtgggacctgcgccgggaaggctccgggacgccagcgcacgcggagcggggaccccggagagccagcaggcgagaagaccggccgagggagagccgatcgcgcctcgagagatccgaggaagtggtcgcgggccgggaggctcccgtgccgagccgaggccaggggtctggggtcgcagcccggcgtgcctgcagctgccgtcgctcgggagcagcagctgtgcccgggatcccggcggcggcgggggaaggaggagctgcagctggactgtggcagctggagggagagggccgggctcccctggcggagccgcgctgggacgactggctgaccgcggccatgcagtcttgacggagtcgctcgggcgcaggggagcagccgcgggcgcgccctcccgggaaggggcaccggagcgcaggcagcagcactttatctgcgactctccagcccagcgagaggcgaagcggtttaccatggaacccgtgaccaagtggagccccaaacaagtggtggactggactagagggttggatgactgcctgcaacaatatgtccacaagtttgaacgagagaagatcaacggcgagcagctgctgcagatttcccatcaggacctggaggagctgggggtcacacggatcggacaccaggagcttgtgttggaggctgtggaccttctctgtgcactgaattatggcctcgaaactgataacatgaagaacttggttctgaaactgagagcatcttcccacaatttacagaattacataagtagccgacggaaaagtcccgcttacgatggcaacacctcccgcaaggcccccaatgagttcctgacctcggtggtggagctcatcggcgccgccaaggccctgctggcgtggctggaccgggctccgtttacagggatcactgatttctcagtcacgaagaacaaaattatccagctttgcttggacctgaccactacagtccagaaggattgctttgtagcggaaatggaggataaagttttaactgtggtcaaggttttaaatggcatctgtgacaaaacaatccgatctaccacagatcctgtgatgagccagtgtgcatgtctggaggaagttcacttaccaaacattaaacctggggaaggcctgggcatgtacatcaaatcaacctatgatgggttacacgtgattactggaaccacagaaaattctcctgcagacagatctcagaagattcatgctggtgacgaagtcattcaagttaatcagcaaactgtggtgggatggcagctgaaaaatctggtgaagaaattgagagagaatcccaccggagttgtgttactgcttaagaagcgccccaccgggtctttcaactttactcctgctcccctgaaaaacctacggtggaagccacctcttgtacagacctcacctccacccgcgacaacccagtcccctgaaagcactatggatacctcactgaagaaggagaagtcagccatcctggatctttatattcctcctccgcctgctgttccctactctccccgggatgagaatggcagttttgtttatggagggtccagtaagtgcaaacaaccattgcctggtcctaagggttcagagtccccgaattccttcttggaccaggaaagccggagacgaagattcaccattgcagactcggatcagttgcctgggtactcggtggaaaccaacattctgcccacaaaaatgagagagaaaacaccatcttatggcaagccacggcctttgtccatgcctgctgatgggaactggatggggattgtggacccttttgccagacctcgaggtcatggcaggaaaggggaggatgccctttgccggtatttcagtaacgagcggattcctccgatcattgaagagagctcctctcccccataccggttctccagacccacgaccgagcggcatctggtccggggtgcggactacatccgaggaagcaggtgctacatcaactcagatctccacagcagcgccacgattccattccaggaggaagggaccaaaaagaaatctggctcctcagctacgaagtcctcgtccacagaaccgtccctcctggtcagctggtttacgcgcctcaaactgttgactcactgagagggaccctgctcaggccacctgcctggctcctgccccaagtgccttgcttttacagtggacagcctcttctcgtttcagcctcagtattatgtagggaccttatgcaatttctttttcttttgaaaagttatctactgcccttcttggaagtttgcaggattggatgggaacaaattcagaggatcttaggtgctggcttgtggagacaaaaggagggaaatgggtagagcctgtttgtcttgcttccccagagatagaatgtgaagacacgcgctagaaatcgcagtcctggccagagacgttatggtcattgtgagggactggtggcattgttcctttttgaggggctggggggactcaaattggtggctgttttcacacagatgtgttggtttgtggtccaacttctttatctgaaaaagccagtgagaaaacatttttgatttgatttttctaaactactttatcacaggggaaacacgatgtgaatgtgcaacgaacgtggcaagctatatgatttctcctatgaggcagagatcaaagtgtgaggca

SEQ ID NO: 51302 - DNA, 1029 bp, Homo sapiens
agctgaaactttgcaacccgagcgcgcacgctctgcgctcggccctgccagggcggcacgggagggcggcgcaggaggtgggacctgcgccgggaaggctccgggacgccagcgcacgcggagcggggaccccggagagccagcaggcgagaagaccggccgagggagagccgatcgcgcctcgagagatccgaggaagtggtcgcgggccgggaggctcccgtgccgagccgaggccaggggtctggggtcgcagcccggcgtgcctgcagctgccgtcgctcgggagcagcagctgtgcccgggatcccggcggcggcgggggaaggaggagctgcagctggactgtggcagctggagggagagggccgggctcccctggcggagccgcgctgggacgactggctgaccgcggccatgcagtcttgacggagtcgctcgggcgcaggggagcagccgcgggcgcgccctcccgggaaggggcaccggagcgcaggcagcagcactttatctgcgactctccagcccagcgagaggcgaagcggtttaccatggaacccgtgaccaagtggagccccaaacaagtggtggactggactagagggttggatgactgcctgcaacaatatgtccacaagtttgaacgagagaagatcaacggcgagcagctgctgcagatttcccatcaggacctggaggagctgggggtcacacggatcggacaccaggagcttgtgttggaggctgtggaccttctctgtgcactggttagttcaggaaaagacggtctgtaccgtgatgacgttctttagagccttgctctcttaagccgtcattgtttgtgatttagcatatcactctttccttaatgctccatcaaaataaaacatgagctgaagatactataggaaggggaaaaataagttattttctacattaaaggttggcaaactatggcctgcgagttaaatctggcccactatctatttttgtaaataaagttttataggaacacaaccatgtccattc

SEQ ID NO: 51303 - DNA, 218 bp, Homo sapiens
ggaatatgaagtaagcccgtcaaaattgagtagaaaaagtgtgagaagcagtccctgacatctggtaggggccttggcacttgcaggaaggccttggcattctgttgcacataaacaattgcacagcatgtcaacagcagataagactgctctgactgtggtaatttctcctaccttacagataggtttactaagattcctggtcatagaattgcacc

SEQ ID NO: 51304 - DNA, 381 bp, Homo sapiens
tggggaatcattattttaagaactcttgttaaaaatgttatattgaggaaaaatggctttcatttggcattcccacatatgtagaaaagatgaaaatatgtctataaaggtatatattatacaaaacttcgtgacaaaaaaattgaaaggctggaggaaatgaatattattttcatacataacaaattctcagtaaattaaatcttttatctcatctcaagaaaacaaatgtgaatgcaagagagcaagagacaagttattataaggataaacttcaatctaatctactattatttctttctttaataagtctatcgcagatattagaacttgaattcttgtttatatactgagtattctaaccatggtgcaattactttg

SEQ ID NO: 51305 - DNA, 159 bp, Homo sapiens
  misc_feature (4)..(4): n is a, c, g, or t
  misc_feature (7)..(9): n is a, c, g, or t
  misc_feature (11)..(12): n is a, c, g, or t
  misc_feature (148)..(148): n is a, c, g, or t
  misc_feature (150)..(151): n is a, c, g, or t
  misc_feature (155)..(158): n is a, c, g, or t
tatntannntnnaggaccagaccagctttcaaaaagaaaattgttaaagagagcatgaaaatggttctatgactttgcctgatacagatgctacttgacttacgatggtgttacttcctgataaactcgtcgtaagttgaaaatattntnngtgnnnnt

SEQ ID NO: 51306 - DNA, 181 bp, Homo sapiens
gtggcttcactcttgtcctcacccctagacatttactcatgggtgagggcaacggggccaccttggtgcaggaagtgagtgttgatggatggcagggagtgagcccttcaaggaagagtagagctcctgggggctccaggcagggtcatgagggctcatggaatctgtatcaaggacccct

SEQ ID NO: 51307 - DNA, 305 bp, Homo sapiens
ggggctactctccccaactcagacaaaagtccttgaaactctccatttcctttaacagcaatttcccacactggaccgctgaagtcacatcttggcttcatcctaacaattttcaattcttcagattcttttgtctctttcactttttttcccccatatccttagacttgccatttaaaagttgtctttgcttcaagatttttccataccgttcctccctgttagcttcctctccctttctcctttcactaggctctcacagacataaaatggacactaaaactctttttattcaagttttttac

SEQ ID NO: 51308 - DNA, 312 bp, Homo sapiens
taccaaggtgatgatagtgagaagtagagagcctaagtattcatatcagagagtgaggtgaaaactcctgagcgtgcccctaacgaagtactcagcctgtccttagcccagtgaggtttctaaaatgctaatgcggtagtaattctcctgttacagggccatttctaatcatgggaaaggaaggggagccacctatttgtgctcttaggcgactgtggctcaatttccagccctgaagtcaagaacagccaggaaaagggagcagtctcacaccgagggtggtgtgcactgaaatacactgtggccagtcag

SEQ ID NO: 51309 - DNA, 446 bp, Homo sapiens
ttgcatcaaataaataccaaatttgaaaatagaaaagcattaaaccaattacataggtgtccactttaggttttcttgaatgtcctgagaatggaaatcatatcaaacaaattgtagtgaaactttatagggtcattttctttacatatcctttccttttcctaaagaaccactcctgtttttccccttcccaaatctttagttctctagccctcatttcccattctcttttgctgcaatccacctgtctgaaccatttgcccaggtctaagcctctgtctttgcatctcagccctgcctggtacctgtccagcaagggactggaagctgctggtaagaaaggttgcttctccatcagcagtcatggaggagaaggcggatctaaaacattaagacatgccccctcttatctgtcacatcatgcctcatatatctattttataaca

SEQ ID NO: 51310 - DNA, 406 bp, Homo sapiens
aacttgggaggcagaggttgcagtgagctgagattgcacagctgcactccagcctgggtgacagagcgagactctgtctcaaaacaattggacttaagatggcatgtctttgttttagggccaaaaatgaggcccccttgcttaaggcatggggtccgtggccaggcaacggggtgggactgctgccccagatgtggccatgggggtcgtggtcctttcaacaccaagctatgagctgtcgccatggagaccagggccacctgtggaaaggcggattttgtctgcttttgacttttcttttttaatatgtaaaactccacatcagcggaaacccccccctacttctggcctggagcttcagggttttggtgctgggacgagtttgttgttctccttagcggggtgg

SEQ ID NO: 51311 - DNA, 616 bp, Homo sapiens
cttttgatttaaaggatccatgtatgaaaaccaggggatgacctgtggtattatgtttttgcccacaattcctggcttgtaacttccatagcccttgttacagtcttttgttgtaatgttgagtgtgtcaggcctcaggagcaggcctcaagaaaaacaatttctctgaccttctcctgccctcctttcacctgccccaaggcaggactctaatgtctgcccacttttctgattgtgggtcctaagaccttccccagagagagtcttgccctataccttgggggaaggaatgctgacattatgaagcttccataaaaacccaagaggaccgcattcagggagcctccacatagctgaacacctgcaggttcctggagagtggtgcacctacggagggcatggaagctctgcaccccttcccccataccttgccctatacatccctttatctgtttccttgaaataccctttatcataagccagcaaaattttaaaaataaacaatcctggaggagtaaaataattcagtttccagagcttccccagtgtaaaacttggaatgttcagtttccaacaaaaaaatacaaaacatacaggaaaatatagcccacaggaa

SEQ ID NO: 51312 - DNA, 1252 bp, Homo sapiens
tgataaaattcattaaaagcaggaagccatagggacttcacatatagcttcctgcctctcacttgcatagttacttacctgtgatggccagctgagtcacaaagaaggtcattcttgacttcttctttctcctccatgtggaaaaaagcacaacggagtttccaacaatggtaaaaacaaagaggacccacagagttatcaattgctcagtctgcaagaaacagagaaaaataaaaccagtgtaccagtgagaactggagttctttacagaatgcctgccccaggctggatttcttcctcctagccacatatccctacttttggaagctctactctcaagaaaacaatgacaaaatggtcttcatttacaccagctgcagagtaaattaatgcaccttttaaaaatcttttggaaatatacgtcaagagacaaaaagtttgtattctttggtcaggtaattgtaacactatgtgaaaagtaggtcaagatgtgaaaaagaacacccctgtcagaaatatgtccatgtttattataaaaagaaattagaaattgtttaaagataatagggtagctaagtaaataaagcacttcaattcagtgaactattacagcatagctattaacaatgacaaccatgaagactatgtagcaatattaaaaatacctataatggtaagtgggaaaacatgataaaatcatatactgggtatgattacaactctgtaaaattatatacatagcaaaaaggctgaaatacagtaaaatgttaaaagcagtcatattagggtgtaattatgggttatcttttgttcatttgacagaattttataagacagtaatattaaagttctactgaagaatgtttctgtggtttgaatgtgtcctccaagggtttatatgttgaaatttaatcccccaaagcaatggagttaaggtagaacctttaagaagtgactaggtcatgaaaggctctgccctcatgaatagattaatgttgttattgtgggagtggattagttattgcaggagtgggttactgataaaggaatgagttcagttcccctcccttgtccctctctcaccctctcactttctgccatggaatgatgcagcaagaaagccctcaccagataccagcaccttcccagaccctggcactgtagaaataaattacttttctttataaattactcagtcttgggtattctgtcatagcagcatgaaacagattaagataaatgattaattagt

SEQ ID NO: 51313 - DNA, 233 bp, Homo sapiens
ccaaaaatgctgttattaaggcagatggcaagaaacgcatgctaatcctaaagaaagccttgaaatcagatattggacagtacacctgtgactgtgggacagataagacctcaggaaaacttgacattgaggatcgggaaattaaactggtgcgacccctgcacagtgtggaggtgatggagactgagacagcacgctttgaaaccgaaatctctgaagatgatatccacgcc

SEQ ID NO: 51314 - DNA, 239 bp, Homo sapiens
gggcctctccacagagctgcttgaatgtcctcgaggcatggcagctaattttcgacctagcctcagaaactatacaccattactactgctgcattctgttggtcaaaaggcaggaaaaatgcatctcaccttttgataaaggaatgtcaacatttcattgtaaaattggaaaataaattcccaaagtgcccaacacttgtatagcactgtacggcttttttaaaatgccctatttttca

SEQ ID NO: 51315 - DNA, 651 bp, Homo sapiens
  misc_feature (490)..(490): n is a, c, g, or t
  misc_feature (512)..(512): n is a, c, g, or t
tgtagaaatggcatcttgctgtgttgcccaggctggtctttaactcctggccccaagcaatccctgactttatggcacttgctcagcctggtgtgacagtgtctgtctcctggaggccaggagcccctggcatgcagccagcatgccccatttataatcgtagcccagcacatggaagggacccaagagaatgacagcaacgttggctttgccatttcaaccctgaacctcattttactgttctattcatattatctgggggacaaaattttcccacattcctttctgttggtgccaccatctctgtgcctccgtgtgctgctgacctgccaagcccatggccagctcagcactcggattttatttggtctctcggtatgggttcctttatcagcatttcaaaaagcttttgtgttttatccataattgattaaagtttgtagctgtgaataaaagattgattaaaagcaacaacagcaaaacatatagnggggggcggggacaaattttgncctaaattgggtttctttaggggggccccgcgccccaattcccccctaaggggggggaataaaaaatccagggcccggttttaccaccggcgggaactgggaaaacctggggggttgcccacttaaaataggttgggag

SEQ ID NO: 51316 - DNA, 475 bp, Homo sapiens
ctggctgtcctcttctgtaagaccctgttctccctccgcacattacagccctccctggaaagtcctctggtgggcgctcggtgtctagctgctgccaatgaagctggcttcattttggtctccttggaaccagctggttttcccatccttaccctaggcctgggccatcatgtttaagctccagtgaaaatgtcaaaccctgtaaccttcctgcaatatgttccctgagggcagtgtgactccttaagttgagggaatgtgtcccagacatgggaaaagcctccgagagccccgtgcctccagaacacgggacatcgtggcctgtcctttgatggcattggcttcccatggtagacctgagcacgtgcatcagagatgggtgagccagaggaccctggactctgatctcctactcaagcaggggacggtgtaggggcagggcacaatgacattggcttgggaaattagccaaaag

SEQ ID NO: 51317 - DNA, 670 bp, Homo sapiens
caatatatgcaaattattagtgagatctaaaattattcttcacactaagaattcaaaactcactgtgtatctggttatagcataatttggatgctaacgtttcatcaggaatacttgatctgtatttagattttgtaaaatatgcagttgaaaaacacaaattcatatccaagttgttccaaagatagttaaacatagtaaagtttttcagtaactgaattgaacatcaagtttgaaaaaataaaacccagttccttagtcatgctaaccttatttcaggtgctcaaagggcccatgcatctagtgctgctgtcccgggacagagcggctctaagtgatctgcttttacacgctttatggtccgactatacataatcctcccattagtaactaaagtattggccaataaatttttcccaggcatacattaaacattcacaatactctgtggccatgtttaacttgggagcaagtagtggcaaaacctcctatacaaaaacgtgaccacacctcattcatgcctttgtagagctaagcaaaatgctttagatcaaaaattgccttgaattatttacgttcattgtaatctctcctctaggcctttgtgtgttttgatagagttcgtttgaattggctcaataaatcattttatttgctgcaaaaaaaaaaa

SEQ ID NO: 51318 - DNA, 432 bp, Homo sapiens
gtcctgatcgtggtgatggtttcatgagtgtacacacggcagaacccctcaccttgtatactactttaacgacgttatttattgtgtgcaatcatacttcagtaaatctgttacaacacaggcacaccccttgggtaagtcttggctccaccatttatctaagtatgggatcttaatctccgtggactgtggattactctgtaaaatgggaatgataaggccttccctgcccaccccataggagtgttaggaacatcaacatgagaaaacaacagcaccagcaatccaggtgtgtatacattcataaactcacaaatgggtttcatctcctttaatcactgtcgacaatgaaatgggtcagtgctactgctctagggcctggtctgttgtcttgcccacggtcagtctgcaatgtttattgaattgagctga

SEQ ID NO: 51319 - DNA, 520 bp, Homo sapiens
gcaggatgcccctttgtgctggaagtcagaatctccatgtgttcttctcgctgcccgccgaggtctgagcggggccctgctgtgaatgaccccgggaacggtgccagagtcacacagacttggtgcagacaacagagctacctttcaggggctctgtgtccttggacaggtcactagacttctctgaacccgttcgctcatttccagaaagggataagatctctcttacagttcatggggtgcgcaagaatgatgggtgccaagcccatgaccccaggttctggcaaggaatcggcctctccaaaaatgatggtttttattattctcactattctagaaaatgtctttgtgaattgtttgcttgattgaaacggtttctttttaataaaatcttgattttaaaaagcccgaagtcacctctgttttctttattcagcagaataggatgcggggcgaggacaacatttagagacttggtaaatgtttttttctttaacttacattgccgtgtgtgtgcgtg

SEQ ID NO: 51320 - DNA, 288 bp, Homo sapiens
gaaaaaagcatagaagacacacaccaaactgacgattaaggatcagagaggaagggaatgacttctacttttcactttaaatacgtctgtgctgttttcgtgtcttaaaaatagcatgtctttatactagaaaataaaataaacgactttattaaaatgtaccccacacaaactttagtgaatagtaacatattatagtaacaaattttgtaattagtaacattaaagtttctaaatgcacatttcattcattcattctgtaaatgtttatggaggaactactaaggg

SEQ ID NO: 51321 - DNA, 301 bp, Homo sapiens
atttctggtcccaagcattttggataaggaatactcaacttttaattgttgggaagcatctgtttcttttagcaattctgtgctgcacagaagccccctggccccagttttatgctttgtatgatttgtttttcatccttcctatcgttacttctctgttatttagtctcagttttaaaacattacaactagtgagaacctgctcatttctaaatgttcaaaaaagagggggaaatatcatgatcacttttcaatagcatgaaaaacaccagctatttttaagctgcttagatgcaactga

SEQ ID NO: 51322 - DNA, 494 bp, Homo sapiens
ctctactctcgcagagcggaggtaggggaaagacgggtatattctgtactgtctctcaattcgacagacgagcagctgcattctaagacaagctttgagaagacaggatcctgggtttgtcaggcaggagtgcccttggcctgttaagccccgtgtccgctatgggctatgacagggggagtgcctagctccagctcgattttttgaccaagacactgggcagaggttttaggcttttgcatcttgacgtgggagatagagagcctgtgagggagaggcaccagagacggagacgccaggaaaggtcccctggtaccttttccaaaccaaaaatctgaagcagcagaacctccaaaaactccaccctcatcttgtgattccaccaatgcagccatcgccaagcaagccctgaaaaagcccatcaagggcaaacaggccccccgaaaaaaagctcaaggaaaaacacaacagaatcacaaacttacggatttcta

SEQ ID NO: 51323 - DNA, 329 bp, Homo sapiens
gttacacatcacgaagtcaaatgccaggggaaaccattagccggaatctacaggaaacgagaagagaaaagaaatactgggaacgcagtacagagcgccatgaagtccaagaaacagaagatcaaagacgccaggaaaggtcccctggtaccttttccaaaccaaaaatctgaagcagcagaacctccaaaaactccaccctcatcttgtgattccaccaatgcagccatcgccaagcaagccctgaaaaagcccatcaagggcaaacaggccccccgaaaaaaagctcaaggaaaaacacaacagaatcacaaacttacggatttcta

SEQ ID NO: 51324 - DNA, 946 bp, Homo sapiens
gaacatgaaatccccaaggaagcacgttccaagctgagtaagaatgataagggttagatgagttgtcaattgcttcacagcatattatgccaaatcctagcctcttaaacaatgagcatgtattatcttacacagtatctgtgggttctgaatctggaagtaaattggctaggtagctctggctcagggactttcatgaggtggacaatccaaggctgagaataccaagaagggtgatcactggggaccatcatggaggctggccaccacaaaaactctgaatatttctaatctgaaaggcagtatttggtgaaaggacattagccttggagttacttggatctatatttgaatcacaactctgccacttactgcgccaccttagccccattaactaatctttctaaattccagttttctcatttgtcagatggggctaatagcatctagcttattggactattctgaggattaggtacagataattttggaggctggcaagttggaggcactgaagaattgttatcactatagctacaacataggtgaattgtcactgtaaaaacacagttggaagtcattatccacaaaaccttatgtcaaattctaaggttttgttttacctatttgttttattatcacccatatattcttttataacctagtgagagccaaacaaagggaaaacgaaaggtgcatgaggctttaaaaaattatttacttttatgtatttggatacatgtaaaaaccataagaattttaagggccaaacttgaagagtcaaaaaactgtcaagctatttcagttctcccatatgactgaagtccatattttgatgaccttaagtaaacatggaaataaataaataataataaagaaaatagaaggggaaagaaaaaccaccaatactgagctaagtgggtttcttaaaattttaactcttctg

SEQ ID NO: 51325 - DNA, 363 bp, Homo sapiens
  misc_feature (355)..(361): n is a, c, g, or t
  misc_feature (363)..(363): n is a, c, g, or t
acaggttatgctgtgagatgcagaaaagggattctggttactttgggggcagattctgcaataaaagcgcagatactggcaagggctccaccacccagggaggaattcatgataatggcataaagcatggcaaaaaagaaggaagaagtagaagtatgtctaaggataaaagtgccactttgatcaaaactattaaaaataggtaggaatgctgaataaatatgaacttagaccctgaattctcattttgggcgtaatagacttgaaatggccgctgaaattatactatcaatgaaatgaaattagtcatattaaatgtcgtaatcatttaatcgtattaaatataccaatatannnnnnnan

SEQ ID NO: 51326 - DNA, 351 bp, Homo sapiens
atggagtcttgctctgttgcccaggcgggagtgtagtggtgcagcctccactggtgcagcctccactgcagcctccacctcccaggttcaaatgattctcctgcctcagaatcccaagtacctgggattacaggcacatgccaccatgcctggctaacaaaaacattttgaaaagggttaaataaatcatgcacaaactgaggaaaaatactcttttcaaaaatgatggagaggatcactatgatgatgaatgattccactggtcacattattgatagagcaatcagtaaatccaggcacatcctcgggatattactgacctcctattattaaaatatgaaaaaatggagg

SEQ ID NO: 51327 - DNA, 392 bp, Homo sapiens
tgtctcacacatgcgaaggagggcctcctttgtcttgagcatctgaccctggagcctctcaagcctgcactgctgcaaaaacagaacgactcctcaatgccttttgactctggctcaccgaatgtcttgacatgttcagcatcttgggatgaaggaaatacataggtcaagacatccctggcattacaatgggctagggttaggttttttagcagtgttttctttttatataattattttattttatttttaagttccatagtacatgtgcaggatgtgcaggtttgttacataggtaagcatgtgccatggtggtttgctgcacctggcaacccatcacctaggtattaagcccagcatgccttagctctttttcttaatgctcttccccc

SEQ ID NO: 51328 - DNA, 354 bp, Homo sapiens
gaaaaggaggaagaaccttagaaattcctatcttcttccatcaaacagcagtttctcttcagctcttcatagctggaaatgtgatctttgtagccatatcacgtgataacagaattcttccaaagagtactatttgtaaaatgtgcccctaatcttcttgttggtgacttcctagcccaaatcagacctattatcagagctcagtttcattccagaaatatttatatatggtcttttgaaaatctgaggctgtgcttggaaaaagtttgtataatttgttgttgaacagtttcatcttatgtaaagtgaagatcgtagaaatcactcatgaattaaggaaagaatccttcatta

SEQ ID NO: 51329 - DNA, 1901 bp, Homo sapiens
agccagctgccgagtgagaagtctgactatccggagatggcggtgagtatagagaatttctgctaggtctcctgtgtttcagccatcccagcccaggcaccacgacacattatcaaaggactatcttggaccttctcatcccagcaaacatccaatggagaagaatgaagactccaggcatatgatcccactctagccatcccaggagcccccagctatccaaacaactacagctgtggccaaaaacatcgtgtatcagggacaaactctctgcttatggctgctctaatccttgacctacagaatcatgaaatttgtggatacggtcatgatcttgattttggcgatggtttcacagtaactcatgctttcaaaatatcaggaagcaaatgagaaaaggaaaaaaagacattcattgtatatgctgtgaagtaatcctgccaaaggacactttgggctccgcagtgagtatattttttccttaaaaattgccaatttcttgatctatattctatgataaaagttttaatattttgctaagttaattagtattgcctattgaccaacatgttctatttagtgtactgcttcaccaagtgccaacatatacgtctccagtgactgctgatggctgagtctccttatgttagtaaatttctaaacatttttcttagtacatggagtaacgtgttatgttgatcaatgtttgatgacacttaaatgtaactacaatgcagtaattcgaaggtaagaaaaagttgccatgactctcatttctttgaaattgtgtacaatgaaaggcttctcagcatgataccccaactaaaatttaggcgtatgacagcacttataagtaaatccattttatttgagtaaatattgagtttcatttaccttttagcaaattccgaagtagcatctccataaatttaaactgattttacttattgagtcctattactaactttaaaagacaatctactttggatcattttgagcatcacatattgcttacataaaataagtttaaatctgagtcaataatgatactaagcaaacaaataaaatcattggtcactgtattaagtctgttttcatgctgttgataaagacatacccatgactgggcaatttacaaaagaaatgtttaattggacttacagttccacgtgtggctggggaagcctcacaatcatggtggaaggcgaaaggcacatctcacatgatagcagacaagggaaaagagcttgtgctggggaactccttttttaaaaccatcagatctcgtgacacttatctactatcagcacgggaaagaccttcccccatgattcaattaccttccaccagtccctcacataatatatgagaattcaagatgagatttgggtggggacacagcaaaaccatatcagtcacctttggagaatactagagaattaactaactattctgaaaatcagtaattaaagggaaagaagcaaacattttttctgtctttccataaaaaattgtactttgaacaaccaaatgggtgataatgaaagaaagttcctctttataaaagtaactgaagaggccaggcgtggtggctcatgcctgtaatcccagcactttgggaggccgtgatgggcagatcacttgagcccagaagtttgagaccagcctgtgcaacatatctagaccctgtctttaaaaagaaagaaaaaatttaaaacagtaactgagcatcagctattgtgggcacactgcctatgggtagccctgctccacaaggagcagttaaaaaaaaaagtaactcagtagataaatgagaaaggaatgataattacaataacaagatgtggcaatcctgatttaattaatgaatctaagcaaaaagcaatggctttgaatagaac

SEQ ID NO: 51330 - DNA, 493 bp, Homo sapiens
aactccagacaaacccaccatcctctctccattctgttcctgttcttctctcggttaatggcatcgccaaccatccagtccccttccctgcagcctaggagtcatggacttctccctctaaccatttcatctctccctatacaccccagtgtaatcagtcacaagtgtggtattttatcttccaagtatttctcagacccatctcgaagcgcagagcactgtatgctgtaatcatgtcagacagctggcttccctcacgctctccgcgacttctctgtgtccatgtccatgttcctgaagtgcctatgccgagcccgttccccaggccaagtgctttttccttgtgctccctgtcacacacccaggcccatctcccacctctcagcagtgtcttcatcctttaaatagaggtcgggatggtagccacctcgaggagttaagtattacattgagaagacacacttacacaatgctcaataaaagttattataac

SEQ ID NO: 51331 - DNA, 841 bp, Homo sapiens
caggaggcagaggttgcagtgatctaaaatggtgccactgctctccagcctgggtgacagagtgagactctgtctcaaaagaaaaaaaaaaaaaaaacaaatcccaaaagaaaaatctcatttcgctatggcagctgaaagtctgtctatctctgtaattgcacacctttcaacatgaatgattgactgaatatgctctgaataagtgcaaaggatgaaagagaaggttgcaatagaaaagccttatgcttctactacctgtttcctttcctagctcaataaatcaggatcttccatatgtccagaaattcatttctgctttttctaggcatatgtttattttgtatgccttgagataagacctctttggttacagtttagcataattgggaattttagtttaataatatgagactacaattcttcaatgaagacaaactcagaaattcagtatctttgttcacattcttctgtatactttagtctcaacagagatgggccataatctgggtccaatttcactaggaactatgtctctaaatttggttgctttcagagaatctctcctctgtctccctattgcaggtctctaaaaatagcaaagactggtaaagagctttatacttttaccagatggtatctcactgaacccccaaacagacctgtaacatttttaggagggttattacccatttgataaaaggaagaaattaggaaaggctaatcaacttgctcaacacatccaataccaacagacctggaatttgaaactaagacaaaatatgttatcacactctagaagccttcggcagtgatggtactgataaaaatagacaagaca

SEQ ID NO: 51332 - DNA, 647 bp, Homo sapiens
gaaaccttggatttttgagtacccttccacagtgtgttgactgacagtgcctctgactggtcacaggaagtagttatgcaatactcattatatcaatctaaattgtatttcatgattctaatgccctctttttaggctatcattcattgcacctcccaggttgacatgtccagtgaattgagaccagagaggcctttgtgtttgtcctgaattcataatagagtctaggaattttaatagctagacctgtgttcttgccctgaaatggcatatgaccattaccaagaagctgctctaaataaccttcctgcacgttgacccttgggaaaagaaaatttgaaatattatctctcttgaatcctattcctgagactagaactttacaaatttgtattctacttaatgtcatatctatattttttaatattaagattattaacttagtttaacacagaaaaaacgttgatgttccagggaaggtgcaccctatttagcctacggtttctcgtatatcttgggaacactgaagtgtaacacctgagggctgtgtaaacagaggccagcctgagaagctgaggaatcaaggaatttggatggctcaacccataggattccctcttactcacacttctaggtttgtggcagag

SEQ ID NO: 51333 - DNA, 658 bp, Homo sapiens
gaaaccttggatttttgagtacccttccacagtgtgttgactgacagtgcctctgactggtcacaggaagtagttatgcaatactcattatatcaatctaaattgtatttcatgattctaatgccctctttttaggctatcattcattgcacctcccaggttgacatgtccagtgaattgagaccagagaggcctttgtgtttgtcctgaattcataatagagtctaggaattttaatagctagacctgtgttcttgccctgaaatggcatatgaccattaccaagaagctgctctaaataaccttcctgcacgttgacccttgggaaaagaaaatttgaaatattatctctcttgaatcctattcctgagactagaactttacaaatttgtattctacttaatgtcatatctatattttttaatattaagattattaacttagtttaacacagaaaaaacgttgatgttccagggaaggtgcaccctatttagcctacggtttctcgtatatcttgggaacactgaagtgtaacacctgagggctgtgtaaacagaggccagcctgagagagaaaaatccacataaaaaaagggggtggagaaagtccaacaaggctggaaaaaagaataaaaaggggaatatttgggaagaaaagg

SEQ ID NO: 51334 - DNA, 486 bp, Homo sapiens
gacagggtttcaccacgttagccaggatggtctcgatctcctgaccttgtgatatgtccgccgcagcctcccaaagtgctgggattacaggtgtgagccaccgcacctggcccagtgtttgcttcttacagaatgattgcaagccccccttgcagtcctgcctgcctttctaaaaaacgtgcattgagtggcttcataaggaaatccagagaccttggttctctgagtctgatgcagctacagaagctgtgcagatgcgggtgtggaattattttaccctaaaggacccggttaacactcacacttttgcctaaatcctagactggaggcctgaagttttcagttcatgaaattagacaaggagctggggttcattccaagtttccctttgcccatgaccctggcattctttcttttgacatccaaatagacactcccttggcttccattcaacagaaaattggcatcctgaaaagccagataaaa

SEQ ID NO: 51335 - DNA, 384 bp, Homo sapiens
  misc_feature (1)..(1): n is a, c, g, or t
nttttttttccaatgtagaaactctttcctcaatcttttcattgttacagttggaaaagattgaggaaagagtttctacattgattgtagcatccaaggtgtgttctggggcaggttttgagtgttaaaaagttttatccaatgcttaagaaaagacattcaccttcagcacatgcatcctgggccattgtccctactgccattatcctgcaggatgctgtggggtattctctgggtggccacttaggaatttactgtatttgtctgggtgtgggtgggctcatgcttgtaatcctaggaactttgggaggccgaggcagggagattacttgaggtcagggagttcaagaccaacctggctaatgtggcaaaacctcgtctcta

SEQ ID NO: 51336 - DNA, 1046 bp, Homo sapiens
ctgtagccttaattgaaatcccctgatcatgcacttgagcagctgtgcttgtctttccatgttggcttcaatcaaacatagatgtgcatcttaatgggagaagggatagtggattatgccacagtccccttccaggtttacagaatcttagctagtgactccagcaaacacagcaaggttcattttattcttaagacagatccctgttacagtttgctttgtgagccaaggaagacaaatactgattaaccatcccaaagaactaatgagagtggagttggagcgattatccaactgctccaaaaatgtggggattttcttccaaaagaaaaagatttttaaatgttgacacatttccacaatgcatatcaaatgtgcatttatattaatttgtgtctgtgtttatctgcatttctaatattcaggcactcaaatagtatctgctactggccaggctttgttttaggtcctactgatagagcagtaaacaaaaataaagtctcttcccagggagcacacatgtaagatggcacatatttgagtggaggcccaaagaaagtatgagtgctaacccatgtatgtttgagaaaaaagcattccaagaagagtataaaggagcaaatacaaaggctgaagcaggagtatgctgggaacacaaaccattgtggctggaataaaggacggaagaacccagattctctgaggccttcacccacactcccctttccctgcaagcacccacaacaatggctttgatggtacctgatggtcaattgagaagccaaaatgtatatctgtgctattaatggcaacattttcatggagagactgcaagagtctatatgtgtttcatccttatttgaaaaggaatccttgactttgttaggagctctatatatctcctctcatagaaatgccatatattatcaggagactgttaatatctcatgtggaggacccatttgtgcaagcatatctttaaaattaaatattttcaactattgaacatattcatatttttaaataaaggctacagtaaaccatta

SEQ ID NO: 51337 - DNA, 1911 bp, Homo sapiens
gacaagttgaagacccttaagggcctcacagcctagttaagagaattcataaacaggtgagaagttaaaagtatatcagcaggctaagtattgaaaacaatattaaaggggtaccatgcaaaacacgatgcagcaacaaagaagatatgcaggtaatcatcacattttcttttagaaattcagggaaaaaaagatgtcacataatggcatcaggctcaattggaaagggaaggcttttgaaaataagaggtccggtaagaccttgcctctgggtcactactggtatagggagaaacttgctttaaacagtcctgacataaagtgccttttgacatcaactattcaatacctttgagactcacttagacaactggactcattgtaggttccacagaaaaacacggacaacattctagttgtcactccaaccagccacactaggagggcacagcctctggtaccctttctgttcctgaaggcatgtacagcggcttctacagcaagcttgcttacctcccaggattcacctcatggtttggacactgattcctgagagagccttgagacacacaaagtgaaaaaaatgtcaagcaggaatgaaagctctagttttttgcttgttggtatatgtaaatttgtttaaaaagtatccattctgtcgttggtagaagttttgctttggttgataatagagattctgatgtactcttataacttaggttttctcagaaattaagtagcattgaagatcaatgtaatacagttttaagcaggtacactaattatattattgattctatagaaaactaaaattatagatgaggtatcaggatccattataggttgtaaaaaaattcatgttcttcatagattgagtctaatatttcttctatagattgcatctaatgttcctactacctaaattattacgttcaaagttttgaaaattgaacgaaggtatttttaagtacttaaaacatttctctatcattctgtattacatgtataattataagatattgtttgcttcaactagctgtactttgttttcctgtgaagtttcaacttatgtgttatcgatttaacttaattgttccatctagccatgtataatggaaaaaggaagttaatatttgttattgtgttctatgccagggactgtaccaaactctgattggtacattatttcatgtctcataactctgggatctaagtattgtcacaaagagactaaaaatgagagaaaaaattacttgactaggattatgtaggtggtaataatagaatcaggatttaaactcaggacttcagatgccagcatcaatgatattctctcactggaagtggttctcaaagcaaggtcctgacaaaagcatcagcgttactggggaacttgttagaaaagcaagttcataggctgggcatggtggctcatgcctgtaatcccagcactctgggaggcctaggcaggtgggtcacttgagctcaggagttttgagaccagcctgcacaatgtggtgaaaccctgtctttactaaaagtcaaacaaattagtggtgcatgcctgtaggcccagctacacgggaggattgcttgagcccaggagactgaggtgcagtgagccgtgattgctccacttcattctagcctgagcaacggagtgagaccttgtctcaaaaacaaaaaaacaaacaaacaaaaaacaaaaagcaagttcccagaagagaaaaaagaagttccagacctagtgaatcaaaaactctgagcgtggcatctcacaatctgtgtttttgtaatccttccaggtgactgattcatgctaaagtttgagactcattgctctatgccagtcatcattccctttgctcaggttagaatcatctggagagcttataaacgtccccatgccca

SEQ ID NO: 51338 - DNA, 1485 bp, Homo sapiens
gacaagttgaagacccttaagggcctcacagcctagttaagagaattcataaacaggtgagaagttaaaagtatatcagcaggctaagtattgaaaacaatattaaaggggtaccatgcaaaacacgatgcagcaacaaagaagatatgcaggtaatcatcacattttcttttagaaattcagggaaaaaaagatgtcacataatggcatcaggctcaattggaaagggaaggcttttgaaaataagaggtccggtaagaccttgcctctgggtcactactggtatagggagaaacttgctttaaacagtcctgacataaagtgccttttgacatcaactattcaatacctttgagactcacttagacaactggactcattgtaggttccacagaaaaacacggacaacattctagttgtcactccaaccagccacactaggagggcacagcctctggtaccctttctgttcctgaaggcatgtacagcggcttctacagcaagcttgcttacctcccaggattcacctcatggtttggacactgattcctgagagagccttgagacacacaaagtgaaaaaaatgtcaagcaggaatgaaagctctagttttttgcttgttggtatatgtaaatttgtttaaaaagtatccattctgtcgttggtagaagttttgctttggttgataatagagattctgatgtactcttataacttaggttttctcagaaattaagtagcattgaagatcaatgtaatacagttttaagcaggtacactaattatattattgattctatagaaaactaaaattatagatgaggtatcaggatccattataggttgtaaaaaaattcatgttcttcatagattgagtctaatatttcttctatagattgcatctaatgttcctactacctaaattattacgttcaaagttttgaaaattgaacgaaggtatttttaagtacttaaaacatttctctatcattctgtattacatgtataattataagatattgtttgcttcaactagctgtactttgttttcctgtgaagtttcaacttatgtgttatcgatttaacttaattgttccatctagccatgtataatggaaaaaggaagttaatatttgttattgtgttctatgccagggactgtaccaaactctgattggtacattatttcatgtctcataactctgggatctaagtattgtcacaaagagactaaaaatgagagaaaaaattacttgactaggattatgtaggtggtaataatagaatcaggatttaaactcaggacttcagatgccagcatcaatgatattctctcactggaagtggttctcaaagcaaggtcctgacaaaagcatcagcgttactggggaacttgttagaaaagcaagttcataggctgagccaccacgcccggctagactttacctttctaaagaacatgttactggattctcacgaagtacg

SEQ ID NO: 51339 - DNA, 719 bp, Homo sapiens
gaaatgaataactgttttccagactcaaggaagattcaactcgagatgtaacattaggcaggtaggcaggccagtgttgaagcactggtttactgggccggagatgggtagttcacagactccatgcatggtttgactatgaaagaggagtccatgaacacagattacatgttcattctctcaatgcagtttttggctaggttgcattaatacatattcatcaatagatcagtagaaaaacgctgagctctgttaatcatactatagatctgtagtcaaaaggtgttttttttttttaaaggtgtttttgaggagaagtaatgtgaaaaagggagcaaaccatttcataacacagattagatgccacataatatacaaagctaagagaaaggaaacttattttgggctccaaaaatgttgggatgtgagactgaaattagtactcatgtttctgatgaaaggtctcaaactgagtactgtggattattctaggccattaataaccacaaactgcttgaaataaccatggcaacaaccagtagctatgtacagtacaatcaccctgattaccatagaattagcacaaaacaaatgtttgttcttttcctaaatagatgtattatgatgatgataacagcttcctatttaccccaggttttcccatcaccactcctactccaaacaatggaaagatgacatctttgcatgatatttgtttc

SEQ ID NO: 51340 - DNA, 339 bp, Homo sapiens
tagcccacatatgcctccagcattctgtatgcctcccttccttggcagctggcacaactgcacccctgtagacagcacgtgagcctctgcagattgtgtacaagcagacacagacagctggcttgactttcctatattgagagaaagaacttaaccttagacacttctgagcactgccctaaggaaaaataaatggaagcttcgtgacacctggcctggctttgtgggattgagataaggtatagaatcctaagacttacccccaaatagggaacaagaggagtggagtgggtacattaataggaaaggtctgagaggctcccagaattcctagtcagg

SEQ ID NO: 51341 - DNA, 455 bp, Homo sapiens
ctcacagttctggaggctaaaagtccaaaattactcgacctccgaaggctctaggaagaattgctccccatctcttcctagcctctggttgctggcagtccttcacgttcatgccttagagctgcatcacttcagtttctgcctctgtcttcacatgaatgtctttgccttgtaaggatcaagtcatacaccacatacaaaaataaataccaaatggattcagataaatatgaaaaaaattatttctagaaacaaatatggaagaatatttatgaccttggagcagggatgattaaacaggataacatggctgggcgctgtggctcacgcctatagttccagcactttgggaggctgaggcaggaggactgcctgagctcagaagttcgtgggcacctctactgtggtcacaccactgcaccccagcctgggcgatggagtgagaccctgcctca

SEQ ID NO: 51342 - DNA, 425 bp, Homo sapiens
gttgaattggtgctaccgctggttgcatttggcccctttccttccatgaacctcagtggcacatggatacaagtagccccattgctcttgcacatacagaacatggcacagtctcctccctttgcatataccatctctgtctttcaggaacctgcctgtgctctcgtgtgttgcttataatttaattgccttcttttactctgcactggcttgtcctttaattgctctttattgcccttagcgttgccaatcttctgtctttgctgttacctgataacattcagatgtttttccaattcagccatccatctatcaaaatatcatgtagatggtgctttccatcgcacgatcaatggaactatccaattccaagtttccactgcagtcccctctcaacaatcaacagtatacttgacacaaaacca

SEQ ID NO: 51343 - DNA, 429 bp, Homo sapiens
ctataagattccacacactactctgtccatacctgtgccaaacaatatcatgtggtctcctctttcagacagctcctcttcctcctccacactctcagcttttggccctgcttcttatttctctgggggaatggaacaaatcagaagggaatttctgcatgctccccagcagcatggctgcccacccctctgtgtctgcacccacacggcagccttccttccagttctgtggatgacctgtttgtcctggctgcaaccacccctttccttgtgtgccagatcacattccttctcttttactcaagggcatcactctgcaattattccctctccctccttcaaccttagatgtttcctgtctattggatgattcctatcagcgttcctattgttcataccctatctatctgtagtattccctatcttgaa

SEQ ID NO: 51344 - DNA, 436 bp, Homo sapiens
catgaaagaaactatatccgcaaacgttttactaaccacagcagaccccctccttgtagaacccacaagggcagagagcatcagatgaaatcaactgctgagagaggaaagtgagtgctgtgttggcaccgctgccagaaactcttgagaatgagcatcgtgtgccacttatccactgcttgccgacttcagtagcaagagcctccagaatgctcatggataaacatcatctttgtggccacacattgttttatgagctgagtcatcagactggctggctccttaaatgctgctgtgtgattctctaggcagcagaaaacaaggagagaagatatgaagtgtatctcatcgagctttgtagagggccagtatcattcaccaaaggtgatgggggatttaccattatggagtttgcttgtgataaaaaattattgat

SEQ ID NO: 51345 - DNA, 1929 bp, Homo sapiens
taatttttgagataggatcttgctctgtcacccaggctggagtgcagtggtatgatcacagctcaccatatccttgacctccaggactcacgtgttgctcccaccttctcagcctcccaagtagctggggactcaggcgtgtgccaccacacttggcttttcttttgtttttttttcagagatgtggtttctgcaaaaccccatctcaaactggtttcaaactgccaggctcaagcaacccacccgcctcagcttctcaaagtgctgggattacaggcatgagccatcgcacccaggcaaaccctattttttatgatatgcaaaaaagtcctgtttcttactttcatatggagatggcagtttcttttccctttagatatctaacaagtaaacttcctgaaggatatttggctacagaagctcagaaagctatgagctgaatgtctggatactacttgtttcacttcatggttcaattaagaagaatagtcacaacttagaccagttatttttaatctaggaaggatgaactcttaaggaggccactaatgggcatgtaacaaagtaattcatataagaaaagtttaagtataacattctggttagggccatagctttcatcaaatactccagtctataaggctgacagttacaaaaaaacactgacttcagtcaaggaatctgatgcctaagtatacatgcaagaaaaagtactgtacatacgcacaaggataagcaggtaagaatgttcctttcggccgagcatggtggctcacgcctgtaatctcagcactttgggaggccgaggtgggcggatcacgaggtcaagagatcgagaccatcctggccaacatggtgaaatcccgtctctactaagaatacaaaaattagctgggcgtggtggcatgtgcctgtagtcccagctactcgggaggctgaggcagagaatcgcttgaacccaggaggcagaggctgcagtgagctgactgagataacgccactgcactccagcctggcacagagcgagactccgtctaaaaaaaaaaagaatgttcctttctactttctttattaatagcccaaaatgagaagcaattgaaaggcccattaccaggagaataaacagtgttacatagttcacaatggagaactacttaggaacgaagaatgaagacattataagatcatgttaacaatatagaaaaaattttaaaatttttaactaaaagaagttacaaaaatatatagagtatggtataatttatagaaagtttaagaaaatgcaaaatcatgctgtatttgtgtacaccttcaaacagtatttagtaaacatacgaaaataagcatgggaaagacaaacaccaagcggggtatgatggtgacctgagagggatgaccaggaaagtcattaggaaagcgtacatgggtctccagctgtgcccccaacacctggcttcttcaacttcagtgggcacacagggattcactgggccatcatttggccctttctggtcctcaaactcttaatctgttttcataccccagcccctaaccccacgcatgtctattttatagtgcctcactctcagatttttacagcagccccttccacttctgtgtctgctctcatattctcacttttcaacatttgaaagatcagaaaacttcctgttaaaaaatcccaattttctaccttttctaaaaagagatcagaagatctgggctagattaacaaaaagaaaatgggctatttcttgcctggtcctcataaaccactctaccccaccaaccctagacatgcatattcagtttattcagctgcctgttcaaaaatctccatttagctgtctcctaggaggcatctcatatgttaatccttattcataccacaaagatgttccttccttaggttccttttccttagtaaat

SEQ ID NO: 51346 - DNA, 479 bp, Homo sapiens
ttctggatttataaaagggagttttgctcacataattctaaaaacaaaaaaatccatttattaactcatttaaaataaaataattggcccattttgggtgatagttattcagcaaaatatttaacgtataaaattagagatgacccttcccctcttccccctttaagtatctgcttcaggtaaacatcaacttaataatgtaaaacatttcaaaaaaccatgtttgtgtgtgtgtgcataatacaggcctcctaaaagaaaagataaacagttgtggaaaagggaatttgtatgaaaataacatttgaggtctgtgaacctttgaactctttggtcttgctgctcttctgtaaaatggaagtaactcaacagtgtatttacaaagtataagatatcgaagttgtggagaagtgtattacaattcaattaattatttaggaggttttttttttttaagagtttcactcttgttgccccgt

SEQ ID NO: 51347 - DNA, 927 bp, Homo sapiens
taaagttcctccatagaaatgtgtggcatgggaacagagcctaatactttctgaataagatattaacaggcttgtagtggatgctgggaatttagaaagctctgttttttttttttttctaaagcctcccagtagaatgtcagactaataaatggactgcatatttccacagtgtttttatgacatgtttcacacactgtcttggtgcagatatgagaaagcccttgtccacagcccagttctgactcactcattaattttaccttgtattcagttttcttggggtggatctagactagaatagaatagaataagccgacctttaactacagtccttaaatgaggaaatctccaccctgggccagctgtgccaggaatcccgacgagatggaactccgctgtggtttataggcagggctgattttcaggggggagtgcacccatctggactccctgctgttcccatcaatctattccagccctggtacccctggaccaccctactgtccagcaactaaaggattaacaggagccacctccaggagcctccgggacccttcagaaggtgtctgatttgatggatcagaggctaggccactgccagctctctgcacatattttacatatcacccatttgcaggtgttgaagaccggtaagtgcccaggagctggcaggtgttgcaaacatgtcagtgtacctggtgggggcgctcctgcccagctgataggagacagcttctacccagcccacccctttggtggctacaccagcttggcacagtctctcattgctgaagagcatccccccgccaactccgcccaatccccacctccagtcttgactacttttcattggtttgtttgtttaaattgacatctcctgattttcaaaaccttgctgattaacaaagcaaaaagagcacacac

SEQ ID NO: 51348 - DNA, 416 bp, Homo sapiens
cggctctaggagcagggggtgagaccagagggcactgctgagagattagctttcaattgcatactgtatttgcaactatcttgtgataattaaagtacctaaggcttacagagtgagctgacagatggtgcagtcccatcgtaagttacagaaaacagaatcttgctccaagtacacagccggttagtagtagcaggtcagtaactatgactcttgcgtctctttccctgaaggccagtgtcacagatccgccagtccttgtagtataatgtcatgctgccctgcaattatatggtacatttctagagctcccagaatcctaaaagtcgatgctttaataagaccttttatacttgggctttaggggtaaagaggggggccccaaaagatattagtattttttatttcctgaaggt

SEQ ID NO: 51349 - DNA, 861 bp, Homo sapiens
gttaacagcttcttgctatactttccaggaagtaaatcagtggcagacagctacttacttccttatggattcaaagcccagagcattgctgaggcctctcatacctgccccttggtcgttccttcctgtcaaagccaagaggggaaggagagaagagcctcctctcaccatgctcaggaaggcattcattctcctgagagtagatgagcccatctgtattctggggccctgcctgcatctgggaaggtgtcatggtcccaacagagaatgaatcagtcccatactggtgagggctggagtagaacccccatctttgagcacttccctgacacctgaccccctcccttagttacagttgcctggttctaccaaagccactggctaccagactgtttccttcacaccccaaacttctaggtgatctgtgggatttatacctgggcagccttcaggtacgtctgaagtcccacccatgaggctcctcaaagtggagtggagtggagtgaatgaggcctgctttactccaccggaagaatatgcatttgataggggagtaaagaataaatcagactaagaaaagcaatttggtctacctagcactctcagtctatgtggccagtgaatatccacttcagtggggctgggattttcagatcaaaaaaccagaataagatgtatgggagccaggccacaagactcaggtataaaaaaagactgaggaaaactttcatgccttcctctccctctgccaggatcagtgagtgggtgtcacagaaataccctggcattaccccctggcaagcagttgataatccacagaaggtcactttgtgggttttgaggacaagacaaaaaagaaaa

SEQ ID NO: 51350 - DNA, 428 bp, Homo sapiens
tactactactaccactaaattcgcggccgcgtcccacccatgaggctcctcaaagtggagtggagtggagtgaatgaggcctgctttactccaccggaagaatatgcatttgataggggagtaaagaataaatcagactaagaaaagcaatttggtctacctagcactctcagtctatgtggccagtgaatatccacttcagtggggctgggattttcagatcaaaaaaccagaataagatgtatgggagccaggccacaagactcaggtataaaaaaagactgaggaaaactttcatgccttcctctccctctgccaggatcagtgagtgggtgtcacagaaataccctggcattaccccctggcaagcagttgataatccacagaaggtcactttgtgggttttgaggacaagacaaaaaagaaaa

SEQ ID NO: 51351 - DNA, 345 bp, Homo sapiens
caccttcctcaccctgtctccctggacagtgaattccccctgggaatgttagtgaccaaaagtcactggtttgtgtcaagtcacagtgaccaggcaaaactgggttccttaaaaagaacccaggtcaccagtcactgaaattttcttctttaaaaatagaatcaacctcaacagtagctaaatatgccccttcttgggccccagacccagggcagggtgggcagtctatgggggctctcggaaatggaatgtgcccctggccatctcagcctcctgagcctgtggtcccactcaacccctttgctgtgaggatgctctgtgcagaacagtggagcctgacttgct

SEQ ID NO: 51352 - DNA, 372 bp, Homo sapiens
caccaccatgcccagctaatttttgtatttttagtagagataggctttcatcttgttggccaggctggtcttgaactcccggcctcaagtgatcctccctcttcagcctcctaaagtgctgggattacagtcatgagccaccgcactcagcaaaagctccttccttttattgctaagtagtatttccctgtaggtctagatctcaatttgatggacatatgggttgtttccagtttttggcaattatgaatcaagctactgtttgtatttgcatacaggtcagtcagtggacatatattttcatttctctagtttgagaccagcctgggtaacgagagtgaaactctgtctcaaaaaaaaaaagaaaagaaa

SEQ ID NO: 51353 - DNA, 458 bp, Homo sapiens
aaaaaactcctctttgattcttctagctgtttcactattgggcaaccagacaccagaatgagtactaaaaagtctcctgaggaactgaagaggatttttgaaaaatatgcagccaaagaaggtgatccagaccagttgtcaaaggatgaactgaagctattgattcaggctgaattccccagtttactcaaaggtccaaacaccctagatgatctctttcaagaactggacaagaatggagatggagaagttagttttgaagaattccaagtattagtaaaaaagatatcccagtgaaggagaaaacaaaatagaaccctgagcactggaggaagagcgcctgtgctgtggtcttatcctatgtggaatcccccaaagtctctggtttaattctttgcaattataataacctggctgtgaggttcagttattattaataaagaaattattagacatac

SEQ ID NO: 51354 - DNA, 314 bp, Homo sapiens
agatttgctgagctttttacttagccattctggaagtcttgctatgcctataaaagtttatcacctcatgttctacttatgtccttttatcctacccaaagtctagagtttgggaggttttttttttttccagccagccattaaaaggagtatcaacacttgagagcaaagtaaaggatactcttaagcaaaagctaatgcctgaaatttaggtttgagccggtgcctgtagtcccagctactccggaggctgagtaggcggatggcttgaggccaggagttcaaggtggccagtgtgctatgatcgcatctgt

SEQ ID NO: 51355 - DNA, 427 bp, Homo sapiens
tatcaagcctagtttctaaagagaactagcccagtgcgtgccccacacacacactgaggagttcagttctcaagcaccggaacatcagccattttaggaggccttatttttcttcccaataaagcatactcacatcatttccttgctctaagttgggggtgggtatctaggggtgaaggttgggaggtgaaaatattatttgacagaataactatttttgcaagctgctgcactggcgggacagaggcctgggatctggcacagaggagtacccgcctcacgatctgacacccgcctccgagcagcccgccacctgcagcccggggccgggcccaggggagggggcgccagcagcccctggccctcagccatgctacctctcttcagggcactggatcagacacagcagataactggccaaaaaaaa

SEQ ID NO: 51356 - DNA, 698 bp, Homo sapiens
cttttaaaattagagttttaaatgatacaaaaagtattggagatcagcattaacatcattctatactaacaagaatgaaactgttccaataagtagctaaaagacaaacttccttctgtccatggacataaattagcaagttttttttttgtaggggggtgggggcagggtctcactctgtcgcccaggctggagtgcagtggcacaatctctgctcactgtagcctcagcctcctggacttaagttatcctcccaactcactccctcccctaccaagtagctgggactacaggtgtgcaccaccacacccagctataaattagcaattcttatattcctaactagttacttgtaagaatgaatagtgtggatttgttttcattccccagctagttctaatatcctttaaggcagactcaaatttcttctgtcctcttgaattgtgaagcatcatatttttcacattgtgcatgctcaacaaatgcttatgattaataaactgactgatacggtagtttgcaagtgggaccctagcaaacataattctttccaaatgtgctgcatacatgtaaattgcaaccatttctttgggcaagaatcataaattaagctcccccaaatattcagctgagtaatttttaatagtttttttttaattataaagctaatcattatctttgcaaaattatcaggaaat

SEQ ID NO: 51357 - DNA, 433 bp, Homo sapiens
gttcttataaatccagtatcattcagaggacctggaggaattaaagcataacctagtggcagggaatatcaaaccctagatcttaaatctctcctctctgctgtgaagctgggcttgagcctgccaatgccatctaaatttcatcagctgaaagaaagagtatttatttcaacatccaaggaacccccaaaacttaatgcgccttctcaattgtctaactaatttttaaagagacatacattttgtccataaatacctgactctgtttgctaagcatgtggtgggtaatattattggttgaaaagcaataggttttcgtttactggccagattagttttattggcttttttagttgaaaatctataaaatgcggactgaattttactgtggcatattctttgtttattacatgaactcattttcaaagatgaa

SEQ ID NO: 51358 - DNA, 329 bp, Homo sapiens
gaaatgttctagttttgaaatgtgggctaaaatcgtttttaactgcacaaccaaacaaaacacctattcatttgttcagaatctgcaggagattaattcatctctgattgcagccatttgtatcatacataataagctctcagtaaattctatctgctgttattattgctatatttctatgtctgattactcagagactttgcaagtggtctacttgttttctgaacaaatttccttcatttctaattaaatactgtgttcaatacctagatttctgttggtcttccaatgcggaaaacattttattttcccttctacttttattttgg

SEQ ID NO: 51359 - DNA, 542 bp, Homo sapiens
cagattcatctggattcagaactccaggcagaagctgcttaacagcaaaaatctggcatcttcactacattttaagattttaggtagaactaagagggatcagatatagaggaataaggaatgtgagaaggaaaaagatatagtagtttagctaaatttttcttagagtttcttggtggggctggccatgaagtaactagtctgactcatttcttctgggaaggctaaaagagacacaaatagcttctcttttaccttggctttaaggaaaagccattttattaacaaaagtattagacacgactgcataagaaatttgctgtgtgagaataaagaacaagggagtaggagggtgggacagagaagggtgagaagttggcttcgtgagggccacctgtcagttgtctttgtgccttgtgacatcaaaactgaaatgtttgtattactgttgtccatgactttttttttctgtgtcagacatacaaattgaatttggttgtaatgttttaaacgtaataaagaattcttacctaaaaaaaaaa

SEQ ID NO: 51360 - DNA, 863 bp, Homo sapiens
attctcagtatcctgtaggactataacaaaagatctaagatttctgtccctgaaaggagaaaagagggcagggtgagaaggtaatggaagaaataatgactaaaaactttccaagtttggtaaaggcacaaacatgtagcttcaagaagctgaacacattcacagcaagagataccatagtcaggtttaaaaaaaaactataggaaaatcttgaaagcagcccaagaaattatatcttacccattggggaaaacaattagaaaactagctcatttctcatcagaaatcagaggccagaaggaagtggcacattatcaagtgctgaaagataaggactgtcaactcataattctatatccagcaaaaatatccttcaggaatgtaggggaaatcaagacattctcaaatgaaggaaaatgaaggaactttttgccagtagacctatccaaaagagaagtttgtctaaataggaagaaaacagtaaaaagaaggaatctcaaagtattaggaaggataaatgtacatggtaaacagaactgtgggtatatgtaatagacttccttttgcttcatgaattttctaaattttgtttggtggttgaagtaaaaattttaactctgatgtggttctaaatatatagagaaaatattttaggtaattatattataaatgagcaaggacaaagggatataaaaggaggtgaagtttctacatatcactcaaactgacaaaatgaattcagtagaccatgataagttacataaatataataactagaacaaccactaagaaagctatacaaggagatacatttaaaacattatagataaaatggaatcctgaaatatgttcatgtaacaggc

SEQ ID NO: 51361 - DNA, 1046 bp, Homo sapiens
ccaggctggaatgcaatggcacgatctcagctcactacaacctccgcctcccgggttcaagaaattctctgcttcagcctcccaagtagctgggattacaggcacctgccacaatgcccagctaagttttgtatttttaatagagacagggtttcaccatctttgccaggctggtcttgaactcctgacttcgtgatccacctgcctcggcctcccaaaatgcgggattacaggcatgagccactgcacccggccaagtgctagcatcttagacaacacctctccaaaaataccaaaagattgagaaaaactgggttattttagtgtgggaagtgcaggtataaactatttcttcttaaacctcagaagacttgcaaatatcctagctgggactatgggggtgaagtacaaaattaagataaattattcaagatataaaaatttggcaaaaaattactttgtgtcctttaaagttattctttagcattaaaatttaaagtctaaacgatttttagagattcaaaagatatcaccaaaggctgtcctgtaggaaattaagcaatttagtatctaactttgaaatcttttatttagctttttcctttctttcttttttcactgggtatacaaatcagtctctgtattctccttggaaccagcttttgttatcttgttgatttcctcattaaagagataaagaaatctgcaacacatgacatatttgtgagttatgttcttaactttttgcaaggaatactttgacaacacatacactaatcctataacaaatgctactaacaaacactacattgcaatatttcaacattcacagatgaacattcaaaaaaattcaagaaatctctgagatgtcagaagtaaaagcagtctttctcttattaaaaaagaaatggggaaggaaagcaaattaattgagaagaagctcagaagtctggagatgtcaaggtatattttcaagcacctaacaagaaatgtggaggtttcctcaatgccaggcccgtgtcctaacctgaaatcacttaggtctg

SEQ ID NO: 51362 - DNA, 912 bp, Homo sapiens
tatggttcttagctctctctcgtatttggaagtgttcagaaacatggctgcttattttctgagatttctttcctttattccctcactccactttcaaaattaccctttcttaaagtgtactatttggtgttttttagtatattcacagagggagaaaccattaccactatcttattttagaagatatttatcacccccataagaaaccccatacttattaatagaactcctcattcctcacttcttccagcccctggcacccactcatctaccctctctgtctctagatttgcctatgttggacattggatataaatggaattatacaatatatgatcttttgtgactggcttcttttacttagcataatgttttctaagttcgtcattctgtagcatgtatcagtatagtcatttgctgcataacagagtttcagggccaggcacagtagctcatgcctataatgccagcactttgggcggctgaggtaggaggatcatttgagcccatgagtttgagatcagcctgggcaacatagtgagactacatcagaaaaaataaaatagacaggcatggtggcacgcacctgtggtcccagccactcaggaggctgaggttggaggattgcttgagtttcaagaggttgaggctgcagtgaggtgtgatcgcaccacttccagcttgggcaacagagcaagacaaccctatctcaaaaaatctaaaacgaacaaaaaaaaaaacacgacatttcagtcaacagtggattgcgtgtacgatggtggcaatttctatcacctagtaacatcatagaccttccaataggataagatgtggaggtggaagatagtgatattgatgatcctaaccctgtataggcttaggcttatgtgtgtgtttctgtccgtttttagc

SEQ ID NO: 51363 - DNA, 317 bp, Homo sapiens
attaatttggtagttcctgtatgagcccacgttcatttgactttgctgaagatttccagagtatgagaaacacttttttaggctttagtgaaagacaaaggtaaatgaaaaccattagctgtaagtcttcttaactgagggctccaggaggtcaaggaccaccatatctctctgtgtatatgcagcgcccaagccagtgcctagggagttttgcgtacttcatgaatttccttacaaatccttcatgactaatttcttctatttgatttcttttctttatacctctctctgctgagtgttaatctgttaatcttaca

SEQ ID NO: 51364 - DNA, 667 bp, Homo sapiens
tctgcacttattttttttatagctatgtagtgttccattacgtggatttactataatttagtcagttccctattggttgacaatgacactgggatgtttctgatcctttgggtgtattataaacaatgccgtaaggaattatcttgggcagctatcattttatatattagtatttctgcaggatgaattcctagaagtagaattgctctgtcaaagggtttgttactcatctgaaccttaaaaagactggtttcttgaaaactcagtctcttaaagcgaaaattaacaaaacaactttagttttaaactaaaaatgggattaggccaggaatggtggcttatccctgtaattccagcactttgggaggccaaggtgggatgattgcttgagcccaaaagtttgagaccaacctggacatagcgagacctcatctctacaaaaaaaaaaaaacaaaaaaaacaaaaaacaatcctgcagcctgagtgacagagcaacaccctgtctcaaaacaattacttaattaaaaaaaagtttttaagggcctgggccaggtgcagtggctcacgcctataattccagctttttggaaggctgtggcaagcggactgtttgagatcaggagatcgagaccagcctgagcaacaatggcaagaccccatctctaca

SEQ ID NO: 51365 - DNA, 366 bp, Homo sapiens
gagagtataataacatagggttactttcatatgtacatagggttacactctcacccaactacttgagaagaatgctacaagggggatgggagcagtagaccacagggaatctgatttatttgtctctgtaagtacaaagttatactattttactgcagtaaaggtgtaatctgagtaaaaatgtaaagaccttaagtttcatcagtaagtaagaagttccagtaatgtaagattttgcaatgggtcactttgtactgtgtgcattttttaaactatattcaaagatcctgaagcttcactgtccatgaccaattttgctcttataatatttataaataaatatccagaggtgggataaatgcatga

SEQ ID NO: 51366 - DNA, 719 bp, Homo sapiens
catgtctcaaaaaaaaaaaaaaagtttaattcagtatagatattaggtcaaaaatggattaaattattgcttaattttaaactagttccttggagctcagaatgctgtcgtaattgatagctgggtgctcgggctgacccacagatcatagccttcatagagtgaatacgtcacctatagcagcccccatcccttagccgtgatggtggagagcctctgtcactctgtgtgtgtgtgtgtgtgtgtgtgtgtgtgtgtgtgtgtgtgtgtgtgtggtcattcagctagcaactcacagaactctttaaggcaatacttctcaaactatctttggcaaaggacctgatattcaagtttctagtctgttatagactggcatttttgtgcgtcaaattgtatgcatacatttgattttttcttaattgaaatataacttaaataacataattatatttaccattttaaagtatataattgtgtggtcttgtagcatattcataagattgtgcaaccattaccaccattctctaattccagaatattttcatcacccctccctgcaaaaaaatcccatacccattagcagtcactctccattgccccttcccccagctcctggaaatcactaatttactgaatccaaggatttgcctattttagacactttatataaatagactcatacaatatgtgtggccttttatgtctgtctttcactt

SEQ ID NO: 51367 - DNA, 846 bp, Homo sapiens
gtatatctatgtgagtctgcatacttggagaatttccttctatcgatcaaaaaatattccagcacagagcaggacattctcctgaataagccttatcacttaaagcatttcctcctcaaaggcaatccatttaggtgaagtgcagagacaactgagttgaaattcatcaagaggggaatgttggcccccaaagcattatgggccattaagtctgtaatgtggcagaggcctctggatagccagagttccttccttcctggtgaattgcaagggctgctgtgccggcaccttcctgttatagtctctgtcatacacacaagcactcagacattctcctggtgtttccctcttccttgggcacctgtgtccataacggaggatggtgatagctgggagactcccgcttggatgtcagtggaggccatggggccccttccaccacaggtctcaggattaaggagctgcagttttcatcgcaacgagtgcccctttccctgcttatagcttggaggacgctagtcctgggctctgggagggatatagatagatacctgtgtccctctgccctctcccttctgctaggaccccggcctgctcagtttgccaagggtggcttgttttccgtctggagtgtcaagcctgcattgagagggaaggcgtggggctggaccttccagcattgtgtatgtaggagtgggggtggtgggcagggtgagtaggacctttgtctgactaggaccaatagttttgaaatgacttgaaaaaaatttgatcttggggaatttccagcatgagtaaaacctagagacttctcagagttttgagaaagccaccccctgtcaagcc

SEQ ID NO: 51368 - DNA, 462 bp, Homo sapiens
  misc_feature (402)..(402): n is a, c, g, or t
  misc_feature (410)..(413): n is a, c, g, or t
  misc_feature (416)..(416): n is a, c, g, or t
agagtaaaactaatttaataatcataagtactttctttcactgtgttgacatttgcactttggctcaaaagtgatgttttggaaaacttgctggttaggaaaaaatcagtgcagtttcttcaaactatgttctgcagcaccatcaccacatatttatagtaaacgaagttttacttggtcgggcatcgtggctcatccctgtaatcccagcactttgagaggctgaggcaggagaattgcttgagcacaggagtttgagaccagcctgggcaacatagggagacctcgtctctataaaaaaaccaaaaatgttagctgggcatggtgatgcgtgcctgtagtcccagctacttaggaggctgagctgtggtgatcccttgagtccgggaggttgaggctgcngtgagccnnnntcncgccattgcactccaggctgggtgatagagtaagactacatctctt

SEQ ID NO: 51369 - DNA, 445 bp, Homo sapiens
ggagcagacacttcagaatctggagcagtcatacgtggaaactatagactgggacttagcaaaaagtcaagcctgttcagccaccagaagcatcatgtgtgccctgaatgcgggagaggcttttgcagagatcagaccttatcaagcaccagaggacacacaccggggagaagccatacctgtgtcctgagtgtgggcgtcggtttatccagaaggcctccctctccatacaccagaggaagcactcgggggagaagccgtatgtgtgcagggaatgtgggcgacacttcaggtatacatcctctcttcactaatcacaagagggatttcactccgggggaggagggccctttgttattgttcagggagttgtggggcgaggcttttcgccaggaaggattaggccctcctttctacaccagaggacgcacttggaggagaagcc

SEQ ID NO: 51370 - DNA, 453 bp, Homo sapiens
aggtagaggactgtattcaagaaatgtctgctctgatttccatcatagttaaagctgtgccacaacatttcaatggtaaaggcagaagccttagccagaactaaaacaatgtagatgtgcatgctaaaaggtaataaaggcagtgctgtgctcacatgaagttcatatatcataaaacacctgtgcgggcccagctcatacctgtaatcccagcactttgggaggctgaagtggaaggatcacttgagcccaggagttcaagaccaacctgggcaacatggcgaaaccccatctctacgtaactccaggtgtgatggtgcacacgtgtagttccagctactcgggaggctgaggtggcaggatggagtgagccccaggaggttgaggctgcactgagctgtgattatgccactgcactccagcctggacaatagagcgagaccctgtctcaaa

SEQ ID NO: 51371 - DNA, 794 bp, Homo sapiens
aagagaaaatgtctaaagttgaaaaatgaagaaataggccatggtcgtggctcatgcctgtaatcccaacactttgggaggctgaggtgggaggattgcttgcccatgaattgaaggctgcagtgagccatgattgtaccactgccctcgcgcctgggcgacagagcaagactgtctcaaagaaaggaaaagaaaaaatagctgtgtaagcaagacatttagaagtcacagagtttgaaattgattgcttcttaggggcagggtgtggggagtagggcctagtgttgagcagggcctggagcttacgtattttaaactatgaactattattttgatagaaatttaaaaaattttagagttttaaatctatatcattacagactatatatattctgcgtttacactgtgaaaaaattagaagtcaatagaaaaagaaatgaaaaacctttttatatatttggaaaaattacacctctgaataattgagtcaaagaagacttgttatggaaattagaaaatatttagaactgaataatgaaattaccacatatgaaacattagggataaacgtgtttcatatgcagataaaatattagagaggatatttagttaagaagaaagactgaaaattaattagctaagcattaaactcataaaaacaaaaggtaatttggagaaagtagaagaaagttttaagagcagaaacaaatgaaataagtgaagtgaggggcagaaatattaaaaaactgatatttaaaaatagtcccaaaagatatataaacctagccagtata

SEQ ID NO: 51372 - DNA, 1097 bp, Homo sapiens
catgaccaagcccaaagtcactggggtagcatttaacagacatttgcaaaaagtttctaatgaaagatagggcaaaaagcaaaattataagtataatagaaataaaggaagttggaaaaagcaaagacaaatctaaagaaagttaaaaaaaaaaacagacaaacccaaagctaattactatccttagagaattaagagaaagcattgcgttcattaaacaaggacaggacagaatgccatcagataggaagaattacagcaggaaaacttggaaattatgatgggtataaaaaacccagtaaaagtgttaaaagatgaagttgaggaaacttctaagcagtagaaaaaacagatagaaaacagaaaaatagatttgagaaccagtccagcagaaccaacatccatctagtgaaacagaaagcagagaaaatgggaagaggatttttttattttcatttttgcgacagagcaagactgtctcaaagaaaggaaaagaaaaaatagctgtgtaagcaagacatttagaagtcacagagtttgaaattgattgcttcttaggggcagggtgtggggagtagggcctagtgttgagcagggcctggagcttacgtattttaaactatgaactattattttgatagaaatttaaaaaattttagagttttaaatctatatcattacagactatatatattctgcgtttacactgtgaaaaaattagaagtcaatagaaaaagaaatgaaaaacctttttatatatttggaaaaattacacctctgaataattgagtcaaagaagacttgttatggaaattagaaaatatttagaactgaataatgaaattaccacatatgaaacattagggataaacgtgtttcatatgcagataaaatattagagaggatatttagttaagaagaaagactgaaaattaattagctaagcattaaactcataaaaacaaaaggtaatttggagaaagtagaagaaagttttaagagcagaaacaaatgaaataagtgaagtgaggggcagaaatattaaaaaactgatatttaaaaatagtcccaaaagatatataaacctagccagtata

SEQ ID NO: 51373 - DNA, 374 bp, Homo sapiens
tgacttagaggatccccaaacacgcaacttcctgctcagcctcctgggtagctgagattacaggcacataccaccatgcccagctgatttttgtatttttagtagagttggggtttcaccatgttggccaggctggtctcgaactccagaccttaggtgatctgcccacttcggcctctcaaagtgctaggattacaggcgtgtgccactgtgcccggccagaagagaaactttcaaaaagacaggaacatttccttgaactgatagagcaggagccttcagtttgcaaaggtacaccattgagagagactagcttaaaaaatgtaaaaattgccacactgactgaaattttagaacttttgcgataaagtaaa

SEQ ID NO: 51374 - DNA, 453 bp, Homo sapiens
gaaggcaggtagcatactacctttaaaatttaggaatcagaatagtcctagacttaccattaggaacagtggaaacttagactctaatgaagctgttcattcaaaatacaaagtgaatctgattttcaacctaagattgcatgcttaacccaactttgaatttcggagtaaaaatattttcagatttgcaaggtcatagaaaatttgattctttgtaaaagatattggagtgggggatggattagctaaagcatgactttctacagtgaagagaaaatgtctaaagttgaaaaatgaagaaataggccatggtcgtggctcatgcctgtaatcccaacactttgggaggctgaggtgggaggattgcttgcccatgaattgaaggctgcagtgagccatgattgtaccactgccctcgcgcctgggcgacagagcaagactgtctcaaagaaa

SEQ ID NO: 51375 - DNA, 577 bp, Homo sapiens
ccagactggagtgtagtggtgcgatctcggctcaccacagcctccacctcgtgggttccagtgattctcctgcctcagcctcctgggtagctgagattacaggcacataccaccatgcccagctgatttttgtatttttagtagagttggggtttcaccatgttggccaggctggtctcgaactccagaccttaggtgatctgcccacttcggcctctcaaagtgctaggattacaggcgtgtgccactgtgcccggccagaagagaaactttcaaaaagacaggaacatttccttgaactgatagagcaggagccttcagtttgcaaaggtacaccattgagagagactagcttaaaaaatgtaaaaattgccacactgactgaaattttagaacttttgcgataaagtaaaactcccagaaagttcctgtctggggtagggggcaataggagggaaggcaggtagcatactacctttaaaatttaggaatcagaatagtcctagacttaccattaggaacagtggaaacttagactctaatgaagctgttcattcaaaatacaaagtgaatctga

SEQ ID NO: 51376 - DNA, 475 bp, Homo sapiens
atgcacaacaatgcaccaaaaaaaccaagggagcagctgttttttttgtcatctccaggttggggttacatctctaatggcatataacctcacacacgatttgactctgcagtgttgggagtgctgttggaaagctgagcctgagagacagattgaggaaggagatttacttggtgtttgtttctgtgtcacagctttccgtccatttaactcttgatctgttttctggaagtgctcaaaatcgcagtaggctctcaaagctggaacttgagatgcatctttggcttaaattacaagtgaaatagaatgtagtggccatttaccctggtctaaaagaacatcagtcaatctgtctcactggcaggggtgtggggactgggtcggcagaagcgctgtgtagatgctgtccccaggcctctgccatcgcacactgagggcacccagctccaccacctccttgctgccttctgaccgc

SEQ ID NO: 51377 - DNA, 569 bp, Homo sapiens
atttctagtagcagtaagcactatgaaggaaaataaagtggggaagagggatgcagaataatggggctgctgtttcacatagggtggtctctttggtaaagcagcatttgagaaagccttgagggaagggaggaagtgagctatgcagagatctgagggaaaagcagagagaacagaagaaggctagcatggctaaaccagagtgtgggaggagaggaaatgtaaaaggagaggaggtcagagggagccaggggcctttcaggcttttggaagactttgctttcctctcagtgaaatgagaagccagtggtgggctttgagaagaggagggattggatctgacatatatttatgttgtgttgaaaatagactctagggaggaaaggcaggtgccggagacaaataaggaagctactgcaatcatctaggcatgagtttgtggtggctgggaccagggagagagcagtgcaaagtggggcaaagtggcgagattcagtatctagttcaaaggtagagccagcagaactgacgtggtggatgtggtgggtaggagaaaaaggagaagtcca

SEQ ID NO: 51378 - DNA, 496 bp, Homo sapiens
ggggcaccccggccccccccagccccgctccctccgcacgactcccccccacacaagcggagaaaaggtttccctacacggaaaaggcgcggccgatggaaatctccgtgaaatctactatctatgatcctgcctgcaacccctctccccagcttggcgcagtcgaggggggcgatgctctctgcccatcccagctgcaccctagctccccttccctaacagttcctgttcttgacttgaagagaattgacccgtgggggactccccacctccccaacccagactttggagcgggtgggagttgtaagacaaatcaaaatacggatgacaaagaggatatagccgtgtataccccagggagaggaggcgccgagttctgatgggagaggtacaggttgggttctctgcctaccattgctgtctctgacttccagagctcaaccccctcctttctcccagtggtgacaagatatcaataaacttatttttaatacaa

SEQ ID NO: 51379 - DNA, 1334 bp, Homo sapiens
ggggcaccccggccccccccagccccgctccctccgcacgactcccccccacacaagcggagaaaaggtttccctacacggaaaaggcgcggccgatggaaatctccgtgaaatctactatctatgatcctgcctgcaacccctctccccagcttggcgcagtcgaggggggcgatgctctctgcccatcccagctgcaccctagctccctgctccagggatgtgagcacccactccctgtgctagttagtgcctgattctctggggggggcctcagtaatgggcccccccaacccctttctctggtacagtgctgtctgcctggctgcctcccttaaccctgacttctaagccatcaatttcatgttatttattattgccctatgtggggtggggagggaacctctcgggtctgcacatctccccttccctaacagttcctgttcttgacttgaagagaattgacccgtgggggactccccacctccccaacccagactttggagcgggtgggagttgtaagacaaatcaaaatacggatgacaaagaggatatagccgtgtataccccagggagaggaggcgccgagttctgatgggagaggtacaggttgggttctctgcctaccattgctgtctctgacttccagagctcaaccccctcctttctcccagtggtgacaagatatcaataaacttatttttaatacaaaaaaaaaaaaaaaaaaaaaaaaaaaaaaaaaaaaaaaaaaaaaaaaaaaaaaaaaaaaaaaaaaaaaaaaaaaaaaggggggggcgggcgaagaaaagaatctctcctcaacgggaggagggagcaaacagacaccaagcagcgaagcagccagcaagtatgtggagcgaaaacagagggggctccctcataatgagagcgagggatatattatataagcgacgcgacggaggcggcgccgaggcttaataaacagacccggcacggaaggggggagcaaacgacgcaggagaaagagcgggcgccaaaacctgtggagagggagagaacaccccacaaccaaatgagggcgagagagggcagaccacacaaggaggtggagaaaaaacacaaaccaccaccgagagaacgagaagaacaaacgcacgcacacgcggggggagaacaaagaaacagcaacgagagaaagaaaaggaagcgcggaacacaggaggggagaaaaaaaaaagaagcagacgagcagaacaaaaagccgccctcccgagtcgagagaacagaaaaatgagagggaaagaacgcgagggggagtagtacgaaagagataaacagaaacatatatcaac

SEQ ID NO: 51380 - DNA, 404 bp, Homo sapiens
gcggccgcctactactactactgctcgaattcaagcttctaacgatgtacggggacatgttatttattattgccctatgtggggtggggagggaacctctcgggtctgcacatctccccttccctaacagttcctgttcttgacttgaagagaattgacccgtgggggactccccacctccccaacccagactttggagcgggtgggagttgtaagacaaatcaaaatacggatgacaaagaggatatagccgtgtataccccagggagaggaggcgccgagttctgatgggagaggtacaggttgggttctctgcctaccattgctgtctctgacttccagagctcaaccccctcctttctcccagtggtgacaagatatcaataaacttatttttaatacaa

SEQ ID NO: 51381 - DNA, 711 bp, Homo sapiens
ggggcaccccggccccccccagccccgctccctccgcacgactcccccccacacaagcggagaaaaggtttccctacacggaaaaggcgcggccgatggaaatctccgtgaaatctactatctatgatcctgcctgcaacccctctccccagcttggcgcagtcgaggggggcgatgctctctgcccatcccagctgcaccctagctccctgctccagggatgtgagcacccactccctgtgctagttagtgcctgattctctggggggggcctcagtaatgggcccccccaacccctttctctggtacagtgctgtctgcctggctgcctcccttaaccctgacttctaagccatcaatttcatgttatttattattgccctatgtggggtggggagggaacctctcgggtctgcacatctccccttccctaacagttcctgttcttgacttgaagagaattgacccgtgggggactccccacctccccaacccagactttggagcgggtgggagttgtaagacaaatcaaaatacggatgacaaagaggatatagccgtgtataccccagggagaggaggcgccgagttctgatgggagaggtacaggttgggttctctgcctaccattgctgtctctgacttccagagctcaaccccctcctttctcccagtggtgacaagatatcaataaacttatttttaatacaa

SEQ ID NO: 51382 - DNA, 629 bp, Homo sapiens
  misc_feature (278)..(278): n is a, c, g, or t
  misc_feature (284)..(284): n is a, c, g, or t
ggggcaccccggccccccccagccccgctccctccgcacgactcccccccacacaagcggagaaaaggtttccctacacggaaaaggcgcggccgatggaaatctccgtgaaatctactatctatgatcctgcctgcaacccctctccccagcttggcgcagtcgaggggggcgatgctctctgcccatcccagctgcaccctagctccctgctccagggatgtgagcacccactccctgtgctagttagtgcctgattctctggggggtgacctagncatgcngcctccgatccgcgttatatggctccaggctgaccgcctgaacggctaccttaaccccaacttccaatctataactttcttcctatctactagtgccctaagcgggcctccccggccacctcaaccacttgtgcacaaagccctccctaagacacccctgtcgttacatcgaactgaatggctccaggcattactaccctacttatccactgctacatgccttggtccacccgcacggctcctggcccctttcgcgctcgcaccccacccccggctacctccccaagacggcgccatcttcctggcaccactctcccctcaccgttctcaaccctctacctgcct

SEQ ID NO: 51383 - DNA, 852 bp, Homo sapiens
gccttctggtagaccaggccctgccacaaaaagtgccattcagaaagctcgccagcgagaagagagctccacgctcagcctcagaagaaagacgttcaacgacttactggggagagaaagaaaaggaacgggagctgagagaaagtttcacacatatgatttagaccttacgatcagccattgtttacatcgggaagcatcaatccggagtaactggcaagcagggacagggtctcaccatgtcgcccaggcttgtcttgaactcctggcttaagtgatcctccagcctcagcctctcaaagtactgggattacaggcatgagccaccatgcctggcccagcctcttccctgagaactagcagatagcacagcactcctgtttgaagcagaccaacaccttgagatttgtttaagccaagaaggaggtcctacctttaaacaagaaaaggtttatgactctcttgacatactccagggattcctgtctggcagtgctcaggaagaacaactgaaaaaaacagacctctaacatttcagaactgtcagagacaaaaactgacagagacaaagaacacccaatccagccttctcatgttgcaaaggaagacgttgaggctagagacaaggagcgcctcactccaggtgcggttatggcagaactcaaggggcaaaactgggtggcaggagaattgcagagaggggtagagggctctctctcgccttccgactgggactgtattactttcattatttcagtgcctgtgagcatgagaatgcgccaatgctatagataattaaggcaaaagttgtgggaggtggagtatggtatcacagctaccagtaataccata

SEQ ID NO: 51384 - DNA, 1191 bp, Homo sapiens
gtgtgcctgcgcgcaagccggggagcggcgcgcgggcggcccgagcctcggcggcggcggtagcggcggcggcgacgctgacacctcccaccatggacagcttcgacttagccctgctccaggaatgggacctcgagtcactgtgtgtctatgaaccagatagaaatgcattacggaggaaagaacgagaaagaagaaatcaagaaactcaacaggatgatggcacgtttaattctagttactctctcttcagtgagccctacaagactaacaagggggatgaactctccaaccggatccagaacactttaggcaattatgatgaaatgaaagactttttaactgatagatccaatcagagtcatctcgttggagttcccaaacctggggttcctcagactcctgtgaacaagatcgatgaacattttgttgcagattcaagagcccagaaccagccctcgtctatctgtagcactacaacttccacaccagcagctgtccccgtgcagcagagtaagagaggcactatgggctggcagaaggctgggcacccaccctctgacggccaacagagagcaacacaacagggctctctcaggaccttgcttggagatggtgttggcagacagcagcctcgggccaaacaagtgtgcaatgtggaggtgggccttcagacccaggagaggccacctgccatggcggccaagcacagcagcagcggacactgtgttcagaactttcctccatccctagcttcaaaacccagcctggtccagcagaaaccgaccgcgtatgtgaggccaatggacggccaagatcaggcccctgatgagtctcctaagctgaagtcgtcttcggaaaccagccaagccggagcctgccagagccaaggccaagctctccaagttcagcatccccaagcagggggaggtgagtctttatcagcaccgttcacatgcaactgcatagttacaagtgacaatttgaccctcgtgaattcagtttccatgtttcttttttttcagtgatgtggttaacttcatgtggtaggatttgtagcagtcactgaaaggggaggcagacttaaatagtgatttcttaaaatctcaaatttattataatttgaatttttagagttccagcaaatgcagttgtgtgtgtatgtattagttagggaaggaatgtcccctt

SEQ ID NO: 51385 - DNA, 1384 bp, Homo sapiens
gccttctggtagaccaggccctgccacaaaaagtgccattcagaaagctcgccagcgagaagagagctccacgctcagcctcagaagaaagacgttcaacgacttactggggagagaaagaaaaggaacgggagctgagagctgatcacctgcctttccagaccggagacgggcggcaagtttgaagtcgacacccagaggccagtttgtcccccttcccgcgcgcgggcggcccgagcctcggcggcggcggtagcggcggcggcgacgctgacacctcccaccatggacagcttcgacttagccctgctccaggaatgggacctcgagtcactgtgtgtctatgaaccagatagaaatgcattacggaggaaagaacgagaaagaagaaatcaagaaactcaacaggatgatggcacgtttaattctagttactctctcttcagtgagccctacaagactaacaagggggatgaactctccaaccggatccagaacactttaggcaattatgatgaaatgaaagactttttaactgatagatccaatcagagtcatctcgttggagttcccaaacctggggttcctcagactcctgtgaacaagatcgatgaacattttgttgcagattcaagagcccagaaccagccctcgtctatctgtagcactacaacttccacaccagcagctgtccccgtgcagcagagtaagagaggcactatgggctggcagaaggctgggcacccaccctctgacggccaacagagagcaacacaacagggctctctcaggaccttgcttggagatggtgttggcagacagcagcctcgggccaaacaagtgtgcaatgtggaggtgggccttcagacccaggagaggccacctgccatggcggccaagcacagcagcagcggacactgtgttcagaactttcctccatccctagcttcaaaacccagcctggtccagcagaaaccgaccgcgtatgtgaggccaatggacggccaagatcaggcccctgatgagtctcctaagctgaagtcgtcttcggaaaccagccaagccggagcctgccagagccaaggccaagctctccaagttcagcatccccaagcagggggaggtgagtctttatcagcaccgttcacatgcaactgcatagttacaagtgacaatttgaccctcgtgaattcagtttccatgtttcttttttttcagtgatgtggttaacttcatgtggtaggatttgtagcagtcactgaaaggggaggcagacttaaatagtgatttcttaaaatctcaaatttattataatttgaatttttagagttccagcaaatgcagttgtgtgtgtatgtattagttagggaaggaatgtcccctt

SEQ ID NO: 51386 - DNA, 1049 bp, Homo sapiens
gccttctggtagaccaggccctgccacaaaaagtgccattcagaaagctcgccagcgagaagagagctccacgctcagcctcagaagaaagacgttcaacgacttactggggagagaaagaaaaggaacgggagctgagagggacagggtctcaccatgtcgcccaggcttgtcttgaactcctggcttaagtgatcctccagcctcagcctctcaaagtactgggattacaggcatgagccaccatgcctggcccagcctcttccctgagaactagcagctgatcacctgcctttccagaccggagacgggcggcaagtttgaagtcgacacccagaggccagtttgtcccccttcccgcgcgcgggcggcccgagcctcggcggcggcggtagcggcggcggcgacgctgacacctcccaccatggacagcttcgacttagccctgctccaggaatgggacctcgagtcactgtggtaagtccccgtgccggccgcttcgggcgggcgggagcggcgaggggcggccgcggcggcccgcgcgtcctcacctgggccgggggctccgggcggccggccgccgtgggggtggggtgggtcgggggcgcctgcctcgccagcccttttctgcctccccgggtgggatgcgtggccgcctgcccgtctgtttccccctctcctgttcccctccctcgcggcggcccgccccagcccagggactggtgatctaggtagccaggggcagagcgcagccgtggggaggaaaagaagcgatttgaagactgtgtcactaatgcctggggatccacccgtcggccccctgctcctctcacttcctttccctccgactgcgccccctccctcctccggctggcaccaccgaccccctggagttggtgctgctgcgaagtgcccttagaggatgctccagcctccccgcctgcgcccggtctcggctgcatcctttctgtctctcccacccacttccaccgagatggaaaagtgaacatccagggcaggaaacgagtgtttctccgtgccggtattcc

SEQ ID NO: 51387 - DNA, 1080 bp, Homo sapiens
gccttctggtagaccaggccctgccacaaaaagtgccattcagaaagctcgccagcgagaagagagctccacgctcagcctcagaagaaagacgttcaacgacttactggggagagaaagaaaaggaacgggagctgagagggacagggtctcaccatgtcgcccaggcttgtcttgaactcctggcttaagtgatcctccagcctcagcctctcaaagtactgggattacaggcatgagccaccatgcctggcccagcctcttccctgagaactagcagctgatcacctgcctttccagaccggagacgggcggcaagtttgaagtcgacacccagaggccagtttgtcccccttcccgcgcgcgggcggcccgagcctcggcggcggcggtagcggcggcggcgacgctgacacctcccaccatggacagcttcgacttagccctgctccaggaatgggacctcgagtcactgtggtaagtccccgtgccggccgcttcgggcgggcgggagcggcgaggggcggccgcggcggcccgcgcgtcctcacctgggccgggggctccgggcggccggccgccgtgggggtggggtgggtcgggggcgcctgcctcgccagcccttttctgcctccccgggtgggatgcgtggccgcctgcccgtctgtttccccctctcctgttcccctccctcgcggcggcccgccccagcccagggactggtgatctaggtagccaggggcagagcgcagccgtggggaggaaaagaagcgatttgaagactgtgtcactaatgcctggggatccacccgtcggccccctgctcctctcacttcctttccctccgactgcgccccctccctcctccggctggcaccaccgaccccctggaaaggtttttggggttggcctgggtctgggcggaaaaaggttgcccccccttttagggagggatgctccagcctccccgcctgcgcccggtctcggctgcatcctttctgtctctcccacccacttccaccgagatggaaaagtgaacatccagggcaggaaacgagtgtttctccgtgccggtattcc

SEQ ID NO: 51388 - DNA, 1598 bp, Homo sapiens
gccttctggtagaccaggccctgccacaaaaagtgccattcagaaagctcgccagcgagaagagagctccacgctcagcctcagaagaaagacgttcaacgacttactggggagagaaagaaaaggaacgggagctgagagggacagggtctcaccatgtcgcccaggcttgtcttgaactcctggcttaagtgatcctccagcctcagcctctcaaagtactgggattacaggcatgagccaccatgcctggcccagcctcttccctgagaactagcagctgatcacctgcctttccagaccggagacgggcggcaagtttgaagtcgacacccagaggccagtttgtcccccttcccgcgcgcgggcggcccgagcctcggcggcggcggtagcggcggcggcgacgctgacacctcccaccatggacagcttcgacttagccctgctccaggaatgggacctcgagtcactgtggggtgaagacatcttaaaccagaggaatgactctctagttgtggaatttcagtcatcagccagcagatgcaggagtgtctatgaaccagatagaaatgcattacggaggaaagaacgagaaagaagaaatcaagaaactcaacaggatgatggcacgtttaattctagttactctctcttcagtgagccctacaagactaacaagggggatgaactctccaaccggatccagaacactttaggcaattatgatgaaatgaaagactttttaactgatagatccaatcagagtcatctcgttggagttcccaaacctggggttcctcagactcctgtgaacaagatcgatgaacattttgttgcagattcaagagcccagaaccagccctcgtctatctgtagcactacaacttccacaccagcagctgtccccgtgcagcagagtaagagaggcactatgggctggcagaaggctgggcacccaccctctgacggccaacagagagcaacacaacagggctctctcaggaccttgcttggagatggtgttggcagacagcagcctcgggccaaacaagtgtgcaatgtggaggtgggccttcagacccaggagaggccacctgccatggcggccaagcacagcagcagcggacactgtgttcagaactttcctccatccctagcttcaaaacccagcctggtccagcagaaaccgaccgcgtatgtgaggccaatggacggccaagatcaggcccctgatgagtctcctaagctgaagtcgtcttcggaaaccagccaagccggagcctgccagagccaaggccaagctctccaagttcagcatccccaagcagggggaggtgagtctttatcagcaccgttcacatgcaactgcatagttacaagtgacaatttgaccctcgtgaattcagtttccatgtttcttttttttcagtgatgtggttaacttcatgtggtaggatttgtagcagtcactgaaaggggaggcagacttaaatagtgatttcttaaaatctcaaatttattataatttgaatttttagagttccagcaaatgcagttgtgtgtgtatgtattagttagggaaggaatgtcccctt

SEQ ID NO: 51389 - DNA, 3377 bp, Homo sapiens
gcggcgaaagctaaaggccggcgcacgctgggcggtggtggtccctaagccgggccgcggccggtgcaatggactccactgcctgcttgaagtccttgctcctgactgtcagtcagtacaaagccgtgaagtcagaggcgaacgccactcagcttttgcggcacttggaggtaatttctggacagaaactcacacgactatttacatcaaatcagatattaacaagtgaatgcttgagttgccttgtagagctacttgaagaccccaacataagtgcttcactgatcttaagtattatcggtttgctgtctcaactagcagtagacattgaaaccagagattgtcttcagaatacatataatctgaatagtgtgctggcgggagtggtttgtcggagcagccacactgattcggtgtttttgcagtgcattcaacttctacagaagttaacatataatgtcaaaattttctattctggtgccaatatagatgaattaattacgttcctgatagatcacattcaatcttctgaagatgagttaaaaatgccttgtctaggattattggcaaatctttgtcggcacaatctttctgttcaaacgcacataaagacattgagtaatgtgaaatctttttatcgaactcttatcaccttgttggcccatagtagtttaactgtggttgtgtttgcactttcaatattatccagtttgacattaaatgaagaggtgggggaaaagctattccatgctcgaaacattcatcagacttttcaactaatatttaatattctcataaacggtgatggcactctaactagaaagtattcagttgacctactgatggatctccttaagaatcctaaaattgctgattatctcaccagatatgagcacttttcttcatgtcttcaccaagtattaggtcttcttaatggaaaggatcctgattcctcttcaaaggttttagaattacttcttgccttctgttcagtgactcagctgcgccatatgctcactcagatgatgtttgaacagtctccacctggcagcgccactctgggaagccatactaaatgtttagaacctactgtggctctactgcgctggttaagccaacctttggacggatcagaaaactgttctgttttagcattggagttgttcaaggaaatatttgaggatgtcatagatgctgctaactgttcctcggctgatcgttttgtgacccttctgctgcctacaatccttgatcaacttcagttcacagaacaaaatctagatgaggctttaacaagaaaaaaatgtgaaaggattgccaaggccattgaagttttgttaactctctgtggagatgatacactaaaaatgcatattgcaaaaatcttgacaactgtcaagtgtaccactcttatagaacaacaatttacatatggcaagattgacctgggatttggaacaaaggttgcagattctgaattatgcaaacttgctgctgatgtaattttgaaaactcttgatttgattaacaaacttaaaccattggttcctggtatggaagtaagcttctacaaaatacttcaggacccacgtttgattactcctttggcttttgctttaacgtcagataatagagaacaagtacagtctggactgagaatattattggaggctgctccactgccagattttcctgctttagtacttggagaaagtatagcagcaaacaatgcctatagacaacaggaaacagaacatatacccagaaaaatgccctggcaatcatcaaatcacagttttccaacatcaataaagtgtttaactcctcatttgaaagatggtgttcctggattgaatattgaagaattaatagagaaacttcagtctggaatggtggtaaaggatcagatttgtgatgtgagaatatctgacataatggatgtatatgaaatgaaactatccacattagcttccaaagaaagcaggctacaagatcttttggaaacaaaagctctagcccttgcacaggctgatagactgattgctcagcatcgctgtcaaagaactcaagctgaaacagaggcacggacacttgctagtatgttgagagaagttgagagaaaaaatgaagagcttagtgtgttgctgaaggcgcagcaagttgaatcagaaagagcgcagagtgatattgagcatctctttcaacataataggaagttagagtctgtggctgaagaacatgaaatactgacaaaatcctacatggaacttcttcagagaaatgaaagtactgaaaagaagaataaagatttacagatcacatgtgattctctgaataaacaaattgagacagtgaaaaagttgaatgagtcactcaaggaacaaaatgaaaaaagtattgcccaattaatagagaaagaagaacagagaaaagaagtacagaatcagctagtagacagagaacataagctagcaaatttgcatcaaaaaacaaaagtacaagaagaaaagattaaaaccttacaaaaggaaagggaagataaggaagaaaccattgatatccttagaaaagaattaagcagaacagaacagataagaaaagagttgagcattaaggcttcctccctagaggttcaaaaggcacaattagaaggtcgtttggaagagaaagagtccttggtgaaacttcagcaagaggaattgaacaaacactcccacatgatagcaatgatccacagtttaagtggtggaaaaataaatccagaaactgtgaatctcagtatatagacattatggcattttggaatttgtaatctcatgatatttttgatgtatttatctattggagggggggtgggtaggggagttaatttgtgacttcgtaacaataagaagttattatctaatttagtaaagaccctgatctgttgcatgttttttatttgatagtttgaatagaaatttaattttctaagttttactttttgtttctggcttttatggcttaaggttttctttggttcttacattagaaaatcatttttaacctccattatcatttttctaaggttctttcctttttcttagttgctttctattctgttttgcctgtcttatttattctcatttgtgattatttagatcttaagaccaaactttcttggtataacagtcctaaagattacaaaataaaaatatagagagagtaaaagtaaaaagtaaagtaaaaagagagaaggtatgattttactgctagagaagtttgtctctgaagaagcacaaaagaaaatattagtgaatttaaaataatttttatactgctgtagcataatttctaaatttgaaaaaaatgcaatggtaataaaatgtataaaaatt

SEQ ID NO: 51390 - DNA, 5037 bp, Homo sapiens
ccttaacttctgagctcacctattgtctttgggaagaagcagaaggaataatcccataactaccctctgggcttcatttttcattctcctccctcaaagtaatttctggacagaaactcacacgactatttacatcaaatcagatattaacaagtgaatgcttgagttgccttgtagagctacttgaagaccccaacataagtgcttcactgatcttaagtattatcggtttgctgtctcaactagcagtagacattgaaaccagagattgtcttcagaatacatataatctgaatagtgtgctggcgggagtggtttgtcggagcagccacactgattcggtgtttttgcagtgcattcaacttctacagaagttaacatataatgtcaaaattttctattctggtgccaatatagatgaattaattacgttcctgatagatcacattcaatcttctgaagatgagttaaaaatgccttgtctaggattattggcaaatctttgtcggcacaatctttctgttcaaacgcacataaagacattgagtaatgtgaaatctttttatcgaactcttatcaccttgttggcccatagtagtttaactgtggttgtgtttgcactttcaatattatccagtttgacattaaatgaagaggtgggggaaaagctattccatgctcgaaacattcatcagacttttcaactaatatttaatattctcataaacggtgatggcactctaactagaaagtattcagttgacctactgatggatctccttaagaatcctaaaattgctgattatctcaccagatatgagcacttttcttcatgtcttcaccaagtattaggtcttcttaatggaaaggatcctgattcctcttcaaaggttttagaattacttcttgccttctgttcagtgactcagctgcgccatatgctcactcagatgatgtttgaacagtctccacctggcagcgccactctgggaagccatactaaatgtttagaacctactgtggctctactgcgctggttaagccaacctttggacggatcagaaaactgttctgttttagcattggagttgttcaaggaaatatttgaggatgtcatagatgctgctaactgttcctcggctgatcgttttgtgacccttctgctgcctacaatccttgatcaacttcagttcacagaacaaaatctagatgaggctttaacaagaaaaaaatgtgaaaggattgccaaggccattgaagttttgttaactctctgtggagatgatacactaaaaatgcatattgcaaaaatcttgacaactgtcaagtgtaccactcttatagaacaacaatttacatatggcaagattgacctgggatttggaacaaaggttgcagattctgaattatgcaaacttgctgctgatgtaattttgaaaactcttgatttgattaacaaacttaaaccattggttcctggtatggaagtaagcttctacaaaatacttcaggacccacgtttgattactcctttggcttttgctttaacgtcagataatagagaacaagtacagtctggactgagaatattattggaggctgctccactgccagattttcctgctttagtacttggagaaagtatagcagcaaacaatgcctatagacaacaggaaacagaacatatacccagaaaaatgccctggcaatcatcaaatcacagttttccaacatcaataaagtgtttaactcctcatttgaaagatggtgttcctggattgaatattgaagaattaatagagaaacttcagtctggaatggtggtaaaggatcagatttgtgatgtgagaatatctgacataatggatgtatatgaaatgaaactatccacattagcttccaaagaaagcaggctacaagatcttttggaaacaaaagctctagcccttgcacaggctgatagactgattgctcagcatcgctgtcaaagaactcaagctgaaacagaggcacggacacttgctagtatgttgagagaagttgagagaaaaaatgaagagcttagtgtgttgctgaaggcgcagcaagttgaatcagaaagagcgcagagtgatattgagcatctctttcaacataataggaagttagagtctgtggctgaagaacatgaaatactgacaaaatcctacatggaacttcttcagagaaatgaaagtactgaaaagaagaataaagatttacagatcacatgtgattctctgaataaacaaattgagacagtgaaaaagttgaatgagtcactcaaggaacaaaatgaaaaaagtattgcccaattaatagagaaagaagaacagagaaaagaagtacagaatcagctagtagacagagaacataagctagcaaatttgcatcaaaaaacaaaagtacaagaagaaaagattaaaaccttacaaaaggaaagggaagataaggaagaaaccattgatatccttagaaaagaattaagcagaacagaacagataagaaaagagttgagcattaaggcttcctccctagaggttcaaaaggcacaattagaaggtcgtttggaagagaaagagtccttggtgaaacttcagcaagaggaattgaacaaacactcccacatgatagcaatgatccacagtttaagtggtggaaaaataaatccagaaactgtgaatctcagtatatagacattatggcattttggaatttgtaatctcatgatatttttgatgtatttatctattggagggggggtgggtaggggagttaatttgtgacttcgtaacaataagaagttattatctaatttagtaaagaccctgatctgttgcatgttttttatttgatagtttgaatagaaatttaattttctaagttttactttttgtttctggcttttatggcttaaggttttctttggttcttacattagaaaatcatttttaacctccattatcatttttctaaggttctttcctttttcttagttgctttctattctgttttgcctgtcttatttattctcatttgtgattatttagatcttaagaccaaactttcttggtataacagtcctaaagattacaaaataaaaatatagagagagtaaaagtaaaaagtaaagtaaaaagagagaaggtatgattttactgctagagaagtttgtctctgaagaagcacaaaagaaaatattagtgaatttaaaataatttttatactgctgtagcataatttctaaatttgaaaaaaatgcaatggtaataaaatgtataaaaattagaaaactgtcattgtgttaaactattacatttaaatgattacatttaacacaatagctgtctcataaaaaatctaagaacttgtagaattatttgtaaggtatatttagtgtttttttctcttttttcaaatgttgcatagtggtccagatcatctataattaattataagtttcttatgatttacataaggataatttggattctactcttgctgcatattcagaaaaatattatttactgttaattctgatatgaattgtatttaatttgttgtcctaatagtttttaattggttcatttaattttaaagcataggttaaatatctttattttttttaaaatacaagggtccttctgtacttttcatttgaatcatatcctctaactactctgtaagaaacgtttttacatcaatattttgattgattttattgctataccaatacagtcattaattttacttggtgttttcttcaccatatgtctgtttgatttaagtgaatttagatttgtacagttctggaaattttttaaaaaatattatgcagagtaaaacattttaaattactatttgttctatagaggagatacattctgtttctcttttgaaattgcatgcattttcaaccaaatatgaaaaagtttaagtggatagataagactgaagaataaaagggtctataaaataaaagagacaaaacgttaaagaaagaaatgaatgaatgaaccaaaaattctagggaaaatcaatttatctttccaatttagacatcttgagacagcctagcctagtgctaccctatacaattttctgtgataatgacagtgttctatgatgtccagtcccatagccagtggctaaaagtggccattgagcacttgaaatttggcctttgcaactgaaaaaactaaatttttgattttattaaatttaattttgataaccatcctgttagataatgcagatctgtcccattctcacaagtatgtgtttaaagaactcaatttgccttttcttaaagatctatataaataattaccccattatatatatgtagtagccctttcttaatgtaattttaacctgtttatttctaatcttctctccctaaagaggaaagtccgtactgcagctttgaagaaggtgagtactaatcatcatccttcatctctttctgtctcttgtaacacctttcatattgtttctgttgtttttctgagtgcctttactatatcagttactttttttttcttgttggactgtgtacctcatattaaaaaagcaaaagtgtgtgtaaatattttttttctaaaaaaaaaaatttaatcaaatttgaaccaccaccatagtcagggttttgtatgtgtgtatgcatgtccatttcctaatggaaaaaacaaaacttaggaagtgcatcattatattaggattactcgcatcctcttaaaattttgctggggagagtttgtctccaaagtatacattaacacagttccgttactatttacacttgccacttgaacaaatagacacatctcataaaatttggttggttaaagtttatattaaattgttcattaatttaatgtcaggaaaaaaagaatgaaactgtatgctgtgtcttaggaaattatcaggtcagtgtccatttgggtctatttacttatatattataaggactagttacttaagaataaaaagagattctgtcatgagttagcactgtca

SEQ ID NO: 51391 - DNA, 5109 bp, Homo sapiens
gcggcgaaagctaaaggccggcgcacgctgggcggtggtggtccctaagccgggccgcggccggtgcaatggactccactgcctgcttgaagtccttgctcctgactgtcagtcagtacaaagccgtgaagtcagaggcgaacgccactcagcttttgcggcacttggaggtaatttctggacagaaactcacacgactatttacatcaaatcagatattaacaagtgaatgcttgagttgccttgtagagctacttgaagaccccaacataagtgcttcactgatcttaagtattatcggtttgctgtctcaactagcagtagacattgaaaccagagattgtcttcagaatacatataatctgaatagtgtgctggcgggagtggtttgtcggagcagccacactgattcggtgtttttgcagtgcattcaacttctacagaagttaacatataatgtcaaaattttctattctggtgccaatatagatgaattaattacgttcctgatagatcacattcaatcttctgaagatgagttaaaaatgccttgtctaggattattggcaaatctttgtcggcacaatctttctgttcaaacgcacataaagacattgagtaatgtgaaatctttttatcgaactcttatcaccttgttggcccatagtagtttaactgtggttgtgtttgcactttcaatattatccagtttgacattaaatgaagaggtgggggaaaagctattccatgctcgaaacattcatcagacttttcaactaatatttaatattctcataaacggtgatggcactctaactagaaagtattcagttgacctactgatggatctccttaagaatcctaaaattgctgattatctcaccagatatgagcacttttcttcatgtcttcaccaagtattaggtcttcttaatggaaaggatcctgattcctcttcaaaggttttagaattacttcttgccttctgttcagtgactcagctgcgccatatgctcactcagatgatgtttgaacagtctccacctggcagcgccactctgggaagccatactaaatgtttagaacctactgtggctctactgcgctggttaagccaacctttggacggatcagaaaactgttctgttttagcattggagttgttcaaggaaatatttgaggatgtcatagatgctgctaactgttcctcggctgatcgttttgtgacccttctgctgcctacaatccttgatcaacttcagttcacagaacaaaatctagatgaggctttaacaagaaaaaaatgtgaaaggattgccaaggccattgaagttttgttaactctctgtggagatgatacactaaaaatgcatattgcaaaaatcttgacaactgtcaagtgtaccactcttatagaacaacaatttacatatggcaagattgacctgggatttggaacaaaggttgcagattctgaattatgcaaacttgctgctgatgtaattttgaaaactcttgatttgattaacaaacttaaaccattggttcctggtatggaagtaagcttctacaaaatacttcaggacccacgtttgattactcctttggcttttgctttaacgtcagataatagagaacaagtacagtctggactgagaatattattggaggctgctccactgccagattttcctgctttagtacttggagaaagtatagcagcaaacaatgcctatagacaacaggaaacagaacatatacccagaaaaatgccctggcaatcatcaaatcacagttttccaacatcaataaagtgtttaactcctcatttgaaagatggtgttcctggattgaatattgaagaattaatagagaaacttcagtctggaatggtggtaaaggatcagatttgtgatgtgagaatatctgacataatggatgtatatgaaatgaaactatccacattagcttccaaagaaagcaggctacaagatcttttggaaacaaaagctctagcccttgcacaggctgatagactgattgctcagcatcgctgtcaaagaactcaagctgaaacagaggcacggacacttgctagtatgttgagagaagttgagagaaaaaatgaagagcttagtgtgttgctgaaggcgcagcaagttgaatcagaaagagcgcagagtgatattgagcatctctttcaacataataggaagttagagtctgtggctgaagaacatgaaatactgacaaaatcctacatggaacttcttcagagaaatgaaagtactgaaaagaagaataaagatttacagatcacatgtgattctctgaataaacaaattgagacagtgaaaaagttgaatgagtcactcaaggaacaaaatgaaaaaagtattgcccaattaatagagaaagaagaacagagaaaagaagtacagaatcagctagtagacagagaacataagctagcaaatttgcatcaaaaaacaaaagtacaagaagaaaagattaaaaccttacaaaaggaaagggaagataaggaagaaaccattgatatccttagaaaagaattaagcagaacagaacagataagaaaagagttgagcattaaggcttcctccctagaggttcaaaaggcacaattagaaggtcgtttggaagagaaagagtccttggtgaaacttcagcaagaggaattgaacaaacactcccacatgatagcaatgatccacagtttaagtggtggaaaaataaatccagaaactgtgaatctcagtatatagacattatggcattttggaatttgtaatctcatgatatttttgatgtatttatctattggagggggggtgggtaggggagttaatttgtgacttcgtaacaataagaagttattatctaatttagtaaagaccctgatctgttgcatgttttttatttgatagtttgaatagaaatttaattttctaagttttactttttgtttctggcttttatggcttaaggttttctttggttcttacattagaaaatcatttttaacctccattatcatttttctaaggttctttcctttttcttagttgctttctattctgttttgcctgtcttatttattctcatttgtgattatttagatcttaagaccaaactttcttggtataacagtcctaaagattacaaaataaaaatatagagagagtaaaagtaaaaagtaaagtaaaaagagagaaggtatgattttactgctagagaagtttgtctctgaagaagcacaaaagaaaatattagtgaatttaaaataatttttatactgctgtagcataatttctaaatttgaaaaaaatgcaatggtaataaaatgtataaaaattagaaaactgtcattgtgttaaactattacatttaaatgattacatttaacacaatagctgtctcataaaaaatctaagaacttgtagaattatttgtaaggtatatttagtgtttttttctcttttttcaaatgttgcatagtggtccagatcatctataattaattataagtttcttatgatttacataaggataatttggattctactcttgctgcatattcagaaaaatattatttactgttaattctgatatgaattgtatttaatttgttgtcctaatagtttttaattggttcatttaattttaaagcataggttaaatatctttattttttttaaaatacaagggtccttctgtacttttcatttgaatcatatcctctaactactctgtaagaaacgtttttacatcaatattttgattgattttattgctataccaatacagtcattaattttacttggtgttttcttcaccatatgtctgtttgatttaagtgaatttagatttgtacagttctggaaattttttaaaaaatattatgcagagtaaaacattttaaattactatttgttctatagaggagatacattctgtttctcttttgaaattgcatgcattttcaaccaaatatgaaaaagtttaagtggatagataagactgaagaataaaagggtctataaaataaaagagacaaaacgttaaagaaagaaatgaatgaatgaaccaaaaattctagggaaaatcaatttatctttccaatttagacatcttgagacagcctagcctagtgctaccctatacaattttctgtgataatgacagtgttctatgatgtccagtcccatagccagtggctaaaagtggccattgagcacttgaaatttggcctttgcaactgaaaaaactaaatttttgattttattaaatttaattttgataaccatcctgttagataatgcagatctgtcccattctcacaagtatgtgtttaaagaactcaatttgccttttcttaaagatctatataaataattaccccattatatatatgtagtagccctttcttaatgtaattttaacctgtttatttctaatcttctctccctaaagaggaaagtccgtactgcagctttgaagaaggtgagtactaatcatcatccttcatctctttctgtctcttgtaacacctttcatattgtttctgttgtttttctgagtgcctttactatatcagttactttttttttcttgttggactgtgtacctcatattaaaaaagcaaaagtgtgtgtaaatattttttttctaaaaaaaaaaatttaatcaaatttgaaccaccaccatagtcagggttttgtatgtgtgtatgcatgtccatttcctaatggaaaaaacaaaacttaggaagtgcatcattatattaggattactcgcatcctcttaaaattttgctggggagagtttgtctccaaagtatacattaacacagttccgttactatttacacttgccacttgaacaaatagacacatctcataaaatttggttggttaaagtttatattaaattgttcattaatttaatgtcaggaaaaaaagaatgaaactgtatgctgtgtcttaggaaattatcaggtcagtgtccatttgggtctatttacttatatattataaggactagttacttaagaataaaaagagattctgtcatgagttagcactgtca

SEQ ID NO: 51392 - DNA, 3683 bp, Homo sapiens
tcccgtcggcagtatgtcgatctgggattcgtacaaggtcgcagattctgaattatgcaaacttgctgctgatgtaattttgaaaactcttgatttgattaacaaacttaaaccattggttcctggtatggaagtaagcttctacaaaatacttcaggacccacgtttgattactcctttggcttttgctttaacgtcagataatagagaacaagtacagtctggactgagaatattattggaggctgctccactgccagattttcctgctttagtacttggagaaagtatagcagcaaacaatgcctatagacaacaggaaacagaacatatacccagaaaaatgccctggcaatcatcaaatcacagttttccaacatcaataaagtgtttaactcctcatttgaaagatggtgttcctggattgaatattgaagaattaatagagaaacttcagtctggaatggtggtaaaggatcagatttgtgatgtgagaatatctgacataatggatgtatatgaaatgaaactatccacattagcttccaaagaaagcaggctacaagatcttttggaaacaaaagctctagcccttgcacaggctgatagactgattgctcagcatcgctgtcaaagaactcaagctgaaacagaggcacggacacttgctagtatgttgagagaagttgagagaaaaaatgaagagcttagtgtgttgctgaaggcgcagcaagttgaatcagaaagagcgcagagtgatattgagcatctctttcaacataataggaagttagagtctgtggctgaagaacatgaaatactgacaaaatcctacatggaacttcttcagagaaatgaaagtactgaaaagaagaataaagatttacagatcacatgtgattctctgaataaacaaattgagacagtgaaaaagttgaatgagtcactcaaggaacaaaatgaaaaaagtattgcccaattaatagagaaagaagaacagagaaaagaagtacagaatcagctagtagacagagaacataagctagcaaatttgcatcaaaaaacaaaagtacaagaagaaaagattaaaaccttacaaaaggaaagggaagataaggaagaaaccattgatatccttagaaaagaattaagcagaacagaacagataagaaaagagttgagcattaaggcttcctccctagaggttcaaaaggcacaattagaaggtcgtttggaagagaaagagtccttggtgaaacttcagcaagaggaattgaacaaacactcccacatgatagcaatgatccacagtttaagtggtggaaaaataaatccagaaactgtgaatctcagtatatagacattatggcattttggaatttgtaatctcatgatatttttgatgtatttatctattggagggggggtgggtaggggagttaatttgtgacttcgtaacaataagaagttattatctaatttagtaaagaccctgatctgttgcatgttttttatttgatagtttgaatagaaatttaattttctaagttttactttttgtttctggcttttatggcttaaggttttctttggttcttacattagaaaatcatttttaacctccattatcatttttctaaggttctttcctttttcttagttgctttctattctgttttgcctgtcttatttattctcatttgtgattatttagatcttaagaccaaactttcttggtataacagtcctaaagattacaaaataaaaatatagagagagtaaaagtaaaaagtaaagtaaaaagagagaaggtatgattttactgctagagaagtttgtctctgaagaagcacaaaagaaaatattagtgaatttaaaataatttttatactgctgtagcataatttctaaatttgaaaaaaatgcaatggtaataaaatgtataaaaattagaaaactgtcattgtgttaaactattacatttaaatgattacatttaacacaatagctgtctcataaaaaatctaagaacttgtagaattatttgtaaggtatatttagtgtttttttctcttttttcaaatgttgcatagtggtccagatcatctataattaattataagtttcttatgatttacataaggataatttggattctactcttgctgcatattcagaaaaatattatttactgttaattctgatatgaattgtatttaatttgttgtcctaatagtttttaattggttcatttaattttaaagcataggttaaatatctttattttttttaaaatacaagggtccttctgtacttttcatttgaatcatatcctctaactactctgtaagaaacgtttttacatcaatattttgattgattttattgctataccaatacagtcattaattttacttggtgttttcttcaccatatgtctgtttgatttaagtgaatttagatttgtacagttctggaaattttttaaaaaatattatgcagagtaaaacattttaaattactatttgttctatagaggagatacattctgtttctcttttgaaattgcatgcattttcaaccaaatatgaaaaagtttaagtggatagataagactgaagaataaaagggtctataaaataaaagagacaaaacgttaaagaaagaaatgaatgaatgaaccaaaaattctagggaaaatcaatttatctttccaatttagacatcttgagacagcctagcctagtgctaccctatacaattttctgtgataatgacagtgttctatgatgtccagtcccatagccagtggctaaaagtggccattgagcacttgaaatttggcctttgcaactgaaaaaactaaatttttgattttattaaatttaattttgataaccatcctgttagataatgcagatctgtcccattctcacaagtatgtgtttaaagaactcaatttgccttttcttaaagatctatataaataattaccccattatatatatgtagtagccctttcttaatgtaattttaacctgtttatttctaatcttctctccctaaagaggaaagtccgtactgcagctttgaagaaggtgagtactaatcatcatccttcatctctttctgtctcttgtaacacctttcatattgtttctgttgtttttctgagtgcctttactatatcagttactttttttttcttgttggactgtgtacctcatattaaaaaagcaaaagtgtgtgtaaatattttttttctaaaaaaaaaaatttaatcaaatttgaaccaccaccatagtcagggttttgtatgtgtgtatgcatgtccatttcctaatggaaaaaacaaaacttaggaagtgcatcattatattaggattactcgcatcctcttaaaattttgctggggagagtttgtctccaaagtatacattaacacagttccgttactatttacacttgccacttgaacaaatagacacatctcataaaatttggttggttaaagtttatattaaattgttcattaatttaatgtcaggaaaaaaagaatgaaactgtatgctgtgtcttaggaaattatcaggtcagtgtccatttgggtctatttacttatatattataaggactagttacttaagaataaaaagagattctgtcatgagttagcactgtca

SEQ ID NO: 51393 - DNA, 422 bp, Homo sapiens
ttattttctacttattgttttaaactttaaatcatatttggaatggcttcccttttcttgacataatgtttcacaaaagcagttcggtttaatcaagttgaaaaagtggtacgttttttaaatttaggagctataagaaattggccaggcacagtggctcactcctgtaatcccagcactttgggagttggagatgggtagattgcttgagctcaggagtttgagaccagcctgagcaacatggtgaaaccccatctctacaaaaaatacaaaaatttagccaggtgtgttagtgtgcacctgtagttccagctactcaggaagctacagtgggagaatctcttgaacctggatgtcaaggctgcagtgagctatgttcacgccactgcactccaacctgggtgacaaagcaagactgtctc

SEQ ID NO: 51394 - DNA, 372 bp, Homo sapiens
gagaaaaagttacaaatggtatatggttcattaatgttttcttctattttttttaataacttcagaagtattgcccaattaatagagaaagaagaacagagaaaagaagtacagaatcagctagtagacagagaacataagctagcaagtaagtggcttcttatttaatacattttctatttttaatgtatttattttggaagcatgagtggttttgtttgcttttttattttctacttattgttttaaactttaaatcatatttggaatggcttcccttttcttgacataatgtttcacaaaagcagttcggtttaatcaagttgaaaaagtggtacgttttttaaatttaggagctataagaaattggcc

SEQ ID NO: 51395 - DNA, 480 bp, Homo sapiens
atttgttttcagtagatacttttagtttagaataatttttaaatcacaaagtctgtttaaaaaagtcttatttgtaaaaccttactgtctaatttgagaaaaaagccatagccctcaaaactggttagaagtataaattttaaataaaaatttaaatattcacaggagacttaggtcaatggcatattgaaggaaatataaaaaatttaaagagagtgttacaattcagtgatgactttttctgtattgtatattccatctttgcttttaatcatttgtgatggataattctccaggatgtcatagatgctgctaactgttcctcggctgatcgttttgtgacccttctgctgcctacaatccttgatcaacttcagttcacagaacaaaatctagatgaggctttaacaagaaaaaaatgtgaaaggattgccaaggccattgaagttttgttaaatatcctttactgtcattaacgtg

SEQ ID NO: 51396 - DNA, 239 bp, Homo sapiens
agcttattagatacttagtaaacttttaaattgtaggtatgtgttgagcatatgatatagatgatagtggtaaagtctatcttctttttttttttgaggcacggacacttgctagtatgttgagagaagttgagagaaaaaatgaagagcttagtgtgttgctgaaggcgcagcaagttgaatcagaaagagcgcagagtgatattgagcatctctttcaacataataggaagttagag

SEQ ID NO: 51397 - DNA, 3995 bp, Homo sapiens
  misc_feature (3984)..(3984): n is a, c, g, or t
ccttaacttctgagctcacctattgtctttgggaagaagcagaaggaataatcccataactaccctctgggcttcatttttcattctcctccctcaaagtaatttctggacagaaactcacacgactatttacatcaaatcagatattaacaagtgaatgcttgagttgccttgtagagctacttgaagaccccaacataagtgcttcactgatcttaagtattatcggtttgctgtctcaactagcagtagacattgaaaccagagattgtcttcagaatacatataatctgaatagtgtgctggcgggagtggtttgtcggagcagccacactgattcggtgtttttgcagtgcattcaacttctacagaagttaacatataatgtcaaaattttctattctggtgccaatatagatgaattaattacgttcctgatagatcacattcaatcttctgaagatgagttaaaaatgccttgtctaggattattggcaaatctttgtcggcacaatctttctgttcaaacgcacataaagacattgagtaatgtgaaatctttttatcgaactcttatcaccttgttggcccatagtagtttaactgtggttgtgtttgcactttcaatattatccagtttgacattaaatgaagaggtgggggaaaagctattccatgctcgaaacattcatcagacttttcaactaatatttaatattctcataaacggtgatggcactctaactagaaagtattcagttgacctactgatggatctccttaagaatcctaaaattgctgattatctcaccagatatgagcacttttcttcatgtcttcaccaagtattaggtcttcttaatggaaaggatcctgattcctcttcaaaggttttagaattacttcttgccttctgttcagtgactcagctgcgccatatgctcactcagatgatgtttgaacagtctccacctggcagcgccactctgggaagccatactaaatgtttagaacctactgtggctctactgcgctggttaagccaacctttggacggatcagaaaactgttctgttttagcattggagttgttcaaggaaatatttgaggatgtcatagatgctgctaactgttcctcggctgatcgttttgtgacccttctgctgcctacaatccttgatcaacttcagttcacagaacaaaatctagatgaggctttaacaagaaaaaaatgtgaaaggattgccaaggccattgaagttttgttaactctctgtggagatgatacactaaaaatgcatattgcaaaaatcttgacaactgtcaagtgtaccactcttatagaacaacaatttacatatggcaagattgacctgggatttggaacaaaggttgcagattctgaattatgcaaacttgctgctgatgtaattttgaaaactcttgatttgattaacaaacttaaaccattggttcctggtatggaagtaagcttctacaaaatacttcaggacccacgtttgattactcctttggcttttgctttaacgtcagataatagagaacaagtacagtctggactgagaatattattggaggctgctccactgccagattttcctgctttagtacttggagaaagtatagcagcaaacaatgcctatagacaacaggaaacagaacatatacccagaaaaatgccctggcaatcatcaaatcacagttttccaacatcaataaagtgtttaactcctcatttgaaagatggtgttcctggattgaatattgaagaattaatagagaaacttcagtctggaatggtggtaaaggatcagatttgtgatgtgagaatatctgacataatggatgtatatgaaatgaaactatccacattagcttccaaagaaagcaggctacaagatcttttggaaacaaaagctctagcccttgcacaggctgatagactgattgctcagcatcgctgtcaaagaactcaagctgaaacagaggcacggacacttgctagtatgttgagagaagttgagagaaaaaatgaagagcttagtgtgttgctgaaggcgcagcaagttgaatcagaaagagcgcagagtgatattgagcatctctttcaacataataggaagttagagtctgtggctgaagaacatgaaatactgacaaaatcctacatggaacttcttcagagaaatgaaagtactgaaaagaagaataaagatttacagatcacatgtgattctctgaataaacaaattgagacagtgaaaaagttgaatgagtcactcaaggaacaaaatgaaaaaagtattgcccaattaatagagaaagaagaacagagaaaagaagtacagaatcagctagtagacagagaacataagctagcaaatttgcatcaaaaaacaaaagtacaagaagaaaagattaaaaccttacaaaaggaaagggaagataaggaagaaaccattgatatccttagaaaagaattaagcagaacagaacagataagaaaagagttgagcattaaggcttcctccctagaggttcaaaaggcacaattagaaggtcgtttggaagagaaagagtccttggtgaaacttcagcaagaggaattgaacaaacactcccacatgatagcaatgatccacagtttaagtggtggaaaaataaatccagaaactgtgaatctcagtatatagacattatggcattttggaatttgtaatctcatgatatttttgatgtatttatctattggagggggggtgggtaggggagttaatttgtgacttcgtaacaataagaagttattatctaatttagtaaagaccctgatctgttgcatgttttttatttgatagtttgaatagaaatttaattttctaagttttactttttgtttctggcttttatggcttaaggttttctttggttcttacattagaaaatcatttttaacctccattatcatttttctaaggttctttcctttttcttagttgctttctattctgttttgcctgtcttatttattctcatttgtgattatttagatcttaagaccaaactttcttggtataacagtcctaaagattacaaaataaaaatatagagagagtaaaagtaaaaagtaaagtaaaaagagagaaggtatgattttactgctagagaagtttgtctctgaagaagcacaaaagaaaatattagtgaatttaaaataatttttatactgctgtagcataatttctaaatttgaaaaaaatgcaatggtaataaaatgtataaaaattagaaaactgtcattgtgttaaactattacatttaaatgattacatttaacacaatagctgtctcataaaaaatctaagaacttgtagaattatttgtaaggtatatttagtgtttttttctcttttttcaaatgttgcatagtggtccagatcatctataattaattataagtttcttatgatttacataaggataatttggattctactcttgctgcatattcagaaaaatattatttactgttaattctgatatgaattgtatttaatttgttgtcctaatagtttttaattggttcatttaattttaaagcataggttaaatatctttattttttttaaaatacaagggtccttctgtacttttcatttgaatcatatcctctaactactctgtaagaaacgtttttacatcaatattttgattgattttattgctataccaatacagtcattaattttacttggtgttttcttcaccatatgtctgtttgatttaagtgaatttagatttgtacagttctggaaattttttaaaaaatattatgcagagtaaaacattttaaattactatttgttctatagaggagatacattctgtttctcttttgaaattgcatgcattttcaaccaaatatgaaaaagtttaagtggataggccggatatattggggatccnctagaggcgac

SEQ ID NO: 51398 - DNA, 5026 bp, Homo sapiens
gcggcgaaagctaaaggccggcgcacgctgggcggtggtggtccctaagccgggccgcggccggtgcaatggactccactgcctgcttgaagtccttgctcctgactgtcagtcagtacaaagccgtgaagtcagaggcgaacgccactcagcttttgcggcacttggaggtaatttctggacagaaactcacacgactatttacatcaaatcagatattaacaagtgaatgcttgagttgccttgtagagctacttgaagaccccaacataagtgcttcactgatcttaagtattatcggtttgctgtctcaactagcagtagacattgaaaccagagattgtcttcagaatacatataatctgaatagtgtgctggcgggagtggtttgtcggagcagccacactgattcggtgtttttgcagtgcattcaacttctacagaagttaacatataatgtcaaaattttctattctggtgccaatatagatgaattaattacgttcctgatagatcacattcaatcttctgaagatgagttaaaaatgccttgtctaggattattggcaaatctttgtcggcacaatctttctgttcaaacgcacataaagacattgagtaatgtgaaatctttttatcgaactcttatcaccttgttggcccatagtagtttaactgtggttgtgtttgcactttcaatattatccagtttgacattaaatgaagaggtgggggaaaagctattccatgctcgaaacattcatcagacttttcaactaatatttaatattctcataaacggtgatggcactctaactagaaagtattcagttgacctactgatggatctccttaagaatcctaaaattgctgattatctcaccagatatgagcacttttcttcatgtcttcaccaagtattaggtcttcttaatggaaaggatcctgattcctcttcaaaggttttagaattacttcttgccttctgttcagtgactcagctgcgccatatgctcactcagatgatgtttgaacagtctccacctggcagcgccactctgggaagccatactaaatgtttagaacctactgtggctctactgcgctggttaagccaacctttggacggatcagaaaactgttctgttttagcattggagttgttcaaggaaatatttgaggatgtcatagatgctgctaactgttcctcggctgatcgttttgtgacccttctgctgcctacaatccttgatcaacttcagttcacagaacaaaatctagatgaggctttaacaagaaaaaaatgtgaaaggattgccaaggccattgaagttttgttaactctctgtggagatgatacactaaaaatgcatattgcaaaaatcttgacaactgtcaagtgtaccactcttatagaacaacaatttacatatggcaagattgacctgggatttggaacaaaggttgcagattctgaattatgcaaacttgctgctgatgtaattttgaaaactcttgatttgattaacaaacttaaaccattggttcctggtatggaagtaagcttctacaaaatacttcaggacccacgtttgattactcctttggcttttgctttaacgtcagataatagagaacaagtacagtctggactgagaatattattggaggctgctccactgccagattttcctgctttagtacttggagaaagtatagcagcaaacaatgcctatagacaacaggaaacagaacatatacccagaaaaatgccctggcaatcatcaaatcacagttttccaacatcaataaagtgtttaactcctcatttgaaagatggtgttcctggattgaatattgaagaattaatagagaaacttcagtctggaatggtggtaaaggatcagatttgtgatgtgagaatatctgacataatggatgtatatgaaatgaaactatccacattagcttccaaagaaagcaggctacaagatcttttggaaacaaaagctctagcccttgcacaggctgatagactgattgctcagcatcgctgtcaaagaactcaagctgaaacagaggcacggacacttgctagtatgttgagagaagttgagagaaaaaatgaagagcttagtgtgttgctgaaggcgcagcaagttgaatcagaaagagcgcagagtgatattgagcatctctttcaacataataggaagttagagtctgtggctgaagaacatgaaatactgacaaaatcctacatggaacttcttcagagaaatgaaagtactgaaaagaagaataaagatttacagatcacatgtgattctctgaataaacaaattgagacagtgaaaaagttgaatgagtcactcaaggaacaaaatgaaaaatttgcatcaaaaaacaaaagtacaagaagaaaagattaaaaccttacaaaaggaaagggaagataaggaagaaaccattgatatccttagaaaagaattaagcagaacagaacagataagaaaagagttgagcattaaggcttcctccctagaggttcaaaaggcacaattagaaggtcgtttggaagagaaagagtccttggtgaaacttcagcaagaggaattgaacaaacactcccacatgatagcaatgatccacagtttaagtggtggaaaaataaatccagaaactgtgaatctcagtatatagacattatggcattttggaatttgtaatctcatgatatttttgatgtatttatctattggagggggggtgggtaggggagttaatttgtgacttcgtaacaataagaagttattatctaatttagtaaagaccctgatctgttgcatgttttttatttgatagtttgaatagaaatttaattttctaagttttactttttgtttctggcttttatggcttaaggttttctttggttcttacattagaaaatcatttttaacctccattatcatttttctaaggttctttcctttttcttagttgctttctattctgttttgcctgtcttatttattctcatttgtgattatttagatcttaagaccaaactttcttggtataacagtcctaaagattacaaaataaaaatatagagagagtaaaagtaaaaagtaaagtaaaaagagagaaggtatgattttactgctagagaagtttgtctctgaagaagcacaaaagaaaatattagtgaatttaaaataatttttatactgctgtagcataatttctaaatttgaaaaaaatgcaatggtaataaaatgtataaaaattagaaaactgtcattgtgttaaactattacatttaaatgattacatttaacacaatagctgtctcataaaaaatctaagaacttgtagaattatttgtaaggtatatttagtgtttttttctcttttttcaaatgttgcatagtggtccagatcatctataattaattataagtttcttatgatttacataaggataatttggattctactcttgctgcatattcagaaaaatattatttactgttaattctgatatgaattgtatttaatttgttgtcctaatagtttttaattggttcatttaattttaaagcataggttaaatatctttattttttttaaaatacaagggtccttctgtacttttcatttgaatcatatcctctaactactctgtaagaaacgtttttacatcaatattttgattgattttattgctataccaatacagtcattaattttacttggtgttttcttcaccatatgtctgtttgatttaagtgaatttagatttgtacagttctggaaattttttaaaaaatattatgcagagtaaaacattttaaattactatttgttctatagaggagatacattctgtttctcttttgaaattgcatgcattttcaaccaaatatgaaaaagtttaagtggatagataagactgaagaataaaagggtctataaaataaaagagacaaaacgttaaagaaagaaatgaatgaatgaaccaaaaattctagggaaaatcaatttatctttccaatttagacatcttgagacagcctagcctagtgctaccctatacaattttctgtgataatgacagtgttctatgatgtccagtcccatagccagtggctaaaagtggccattgagcacttgaaatttggcctttgcaactgaaaaaactaaatttttgattttattaaatttaattttgataaccatcctgttagataatgcagatctgtcccattctcacaagtatgtgtttaaagaactcaatttgccttttcttaaagatctatataaataattaccccattatatatatgtagtagccctttcttaatgtaattttaacctgtttatttctaatcttctctccctaaagaggaaagtccgtactgcagctttgaagaaggtgagtactaatcatcatccttcatctctttctgtctcttgtaacacctttcatattgtttctgttgtttttctgagtgcctttactatatcagttactttttttttcttgttggactgtgtacctcatattaaaaaagcaaaagtgtgtgtaaatattttttttctaaaaaaaaaaatttaatcaaatttgaaccaccaccatagtcagggttttgtatgtgtgtatgcatgtccatttcctaatggaaaaaacaaaacttaggaagtgcatcattatattaggattactcgcatcctcttaaaattttgctggggagagtttgtctccaaagtatacattaacacagttccgttactatttacacttgccacttgaacaaatagacacatctcataaaatttggttggttaaagtttatattaaattgttcattaatttaatgtcaggaaaaaaagaatgaaactgtatgctgtgtcttaggaaattatcaggtcagtgtccatttgggtctatttacttatatattataaggactagttacttaagaataaaaagagattctgtcatgagttagcactgtca

SEQ ID NO: 51399 - DNA, 1003 bp, Homo sapiens
gcggcgaaagctaaaggccggcgcacgctgggcggtggtggtccctaagccgggccgcggccggtgcaatggactccactgcctgcttgaagtccttgctcctgactgtcagtcagtacaaagccgtgaagtcagaggcgaacgccactcagcttttgcggcacttggaggtaatttctggacagaaactcacacgactatttacatcaaatcagatattaacaagtgaatgcttgagttgccttgtagagctacttgaagaccccaacataagtgcttcactgatcttaagtattatcggtttgctgtctcaactagcagtagacattgaaaccagagattgtcttcagaatacatataatctgaatagtgtgctggcgggagtggtttgtcggagcagccacactgattcggtgtttttgcagtgcattcaacttctacagaagttaacatataatgtcaaaattttctattctggtgccaatatagatgaattaattacgttcctgatagatcacattcaatcttctgaagatgagttaaaaatgccttgtctaggattattggcaaatctttgtcggcacaatctttctgttcaaacgcacataaagacattgagtaatgtgaaatctttttatcgaactcttatcaccttgttggcccatagtagtttaactgtggttgtgtttgcactttcaatattatccagtttgacattaaatgaagaggtgggggaaaagctattccatgctcgaaacattcatcagacttttcaactaatatttaatattctcataaacggtgatggcactctaactagaaagtattcagttgacctactgatggatctccttaagaatcctaaaattgctgattatctcaccaggtatgactcacttcagtcaattttagaacttttttatttttaaaccaagatgtgttggttataaacagaattgtcttcttaaaatataataaacttggattctactgattcacagta

SEQ ID NO: 51400 - DNA, 1643 bp, Homo sapiens
agtgcagcgcggggcggggcgggccggtgcgcctggcagtcggctgcgtcctcctgcgagcgccggagaggggctggaggcggggcgagggcgcggctcgaggcatccctgcagggcgctcctccgagtccctcggcgctctgagcccacagggaagaaggaggggccggcgtcagtgacgtcagcgagaccgaggtgagcgtgggcgttgccagtggtgctctgtcagtgcctatggattatggcagggaaagtaaaatgggtcactgatatcgagaagtcagtgctgatcaataactttgaaaagagaggatgggtccaagtgacagaaaacgaggactggaatttttactggatgagtgtgcaaaccatccgaaatgtgttcagcgttgaagctggatatcggctctcagatgaccaaatagtcaaccattttccaaaccactatgaactgacccggaaggacctgatggtgaagaacatcaaaagatacaggaaggagctggagaaagaagggagtcctctggcagaaaaagatgaaaatggaaaatacctctatctggactttgttccagtcacctatatgctgcccgctgactacaacctgtttgtagaggagttccggaagagcccgtccagcacctggatcatgaagccttgtggcaaggcccagggaaagggcatcttccttatcaacaagctctcacagatcaaaaagtggtcccgggacagcaagacatcttcgtttgtgtctcaatctaataaggaagcctacgtgatctctctctatattaacaacccgttactaattggcgggaggaagttcgacctgcgcttgtacgttctggtgtccacgtaccgtccactgcgctgttacatgtacaagcttgggttttgccggttctgcacagtgaaatacaccccgagtaccagtgagctggacaacatgttcgttcatctcaccaacgtcgccatccagaaacacggggaggactacaaccacatccatgggggcaagtggacagtgagtaacctgcggctctacctggagagcacccgcggcaaggaggtgaccagcaagctgttcgacgagatccactggatcatcgtgcagtccctgaaggctgtggcgccggtgatgaacaatgacaagcactgctttgaatgctatggctacgacatcatcatcgacgacaagctgaagccctggctgatcgaggtgaatgcgtccccgtctctcacgtccagcactgccaatgaccgaatcctcaagtacaacctgattaatgacaccctcaacatcgccgtcccgaatggtgaaatcccagactgcaaatggaacaagtcgccacctaaggaagtcctcggcaattacgagattctgtatgatgaagaattggcccagggtgacggggctgaccgggagctgagaagccgtcagggtcagtctctggggcccagagcaggccgatcgagagactcggggagagcggtcctcaccacctggaagtgagtcccacctggaccttatcaaaactactcactccacctgggcccctgctgaagccctattttgaaatttcccttttgtagagcttttttcctttcctaagccctgtaaataaatgaaggcacttctttgg

SEQ ID NO: 51401 - DNA, 896 bp, Homo sapiens
agtgcagcgcggggcggggcgggccggtgcgcctggcagtcggctgcgtcctcctgcgagcgccggagaggggctggaggcggggcgagggcgcggctcgaggcatccctgcagggcgctcctccgagtccctcggcgctctgagcccacagggaagaaggaggggccggcgtcagtgacgtcagcgagaccgaggtgagcgtgggcgttgccagtggtgctctgtcagtgcctatgccggtgatgaacaatgacaagcactgctttgaatgctatggctacgacatcatcatcgacgacaagctgaagccctggctgatcgaggtgaatgcgtccccgtctctcacgtccagcactgccaatgaccgaatcctcaagtacaacctgattaatgacaccctcaacatcgccgtcccgaatggtgaaatcccagactgcaaatggaacaagtcgccacctaaggaagtcctcggcaattacgagattctgtatgatgaagaattggcccagggtgacggggctgaccgggagctgagaagccgtcagggtcagtctctggggcccagagcaggccgatcgagagactcggggagagcggtcctcaccacctggaagtgagtcccacctggaccttatcaaaactactcactccacctgggcccctgctgaagccctattttgaaatttcccttttgtagagcttttttcctttcctaagccctgtaaataaatgaaggcacttctttggaaggttatggagtctgtttgactagtgctaaaggaaacaattcatgcggatgtataaaactcgctcttttttttttaatttttaacctaagcagaattttcatattaaaaactcacttttttgacagaaagtaacagcttcaagcatg

SEQ ID NO: 51402 - DNA, 1033 bp, Homo sapiens
ctggcatttctgtgcctcctgggactgaaatctctgtttctccacctggaagatgaggcctcctgctcccaggggcagacagatgttaagaacttcccggcgctagtgcccaccagactgcgctcctcctaatgcggggacatgaggctgacaccaatgctccctgggaagctcgggctcccagaccacagtaaacactgcgttaaaacagcaacaaaaatgttacaatagtaagagctacaacagtaacatcaacaaccacgtcctaccccacgagtggctcattctagcaaaattgacaatgaagggcttgaaagcgatcgcatttaggaggccagagcccagacgacgaccagctccgaaccccacaagccttgtcgtgaccgcgccccgcaggcggggggccccctcgcgggtcacccgcaggggcgcacctccaatttaccaaacaaggtcgcatgccccagccgggctctagtccccgcccagtctggggcgcacctgtgcagggcgcgtgggcaagcgagggcgggcggctgcgcgccgctccgtgtgcacgttcctgttccggactttctgggcgtcccgttacgaagcctttcctcggcccttcctcaggtgcgcagcgcctccgggagccggtcccggcggcaccgggcacgacgccatcttccctcttttaagggcaccggggctgtgcggccgcggccgtgggctggcgttgccgcgctacggtctggccgggtccgcacgaccccagagttcggagccgggtgcccggaagccgcactggaggactgtgcggcggcgatggggcgtccagccgtcgcggcgagacgcagagggaccaccccattgcacaggcgcggagactgaggcccgcaggggccgcgcctggcacgatcgcccgtcggggacctggagccccggacagagagggtacgtttcggagccggagtcccgagacgtcgccccgccagcgacttgctggagcggtaaaacctgggcacggctccccacacttccagccgct

SEQ ID NO: 51403 - DNA, 613 bp, Homo sapiens
accgtggagtgacgtaagtgtttatctggactgggcgtggtggctcatgcctgtaatcccagcactttgggaggccaaggcgggtgcatcacctgaggtcaggagttggagaccagcctagccaacttggtgaaaccccatcactaaaaaaatacaaaaattaaccgggtgtggtggcactcgcctgtagttgcagctacttaggaggctcaggcaggagaatcacttgaacccgggaggcagagattgcagtgagccgagatcataccactgcacttcagcctggttgagcagagtgagaacctgtctcaaaaaaacaaaaacaaacaaaaaatggttaaagagtgtcttcttaatgtgtttgatgtacatttcatctgtgtgttaacttttagggaagaaggaggggccggcgtcagtgacgtcagcgagaccgaggtgagcgtgggcgttgccagtggtgctctgtcagtgcctatggtaggtacagcctgagacggccccttagggaccatttgcccacacggtgggagagagggcgcggggcctgggagggacacctgatggtctggctaaagcacctgccccagttgcttagtgaaatgtggatgag

SEQ ID NO: 51404 - DNA, 1791 bp, Homo sapiens
agtgcagcgcggggcggggcgggccggtgcgcctggcagtcggctgcgtcctcctgcgagcgccggagaggggctggaggcggggcgagggcgcggctcgaggcatccctgcagggcgctcctccgagtccctcggcgctctgagcccacagggaagaaggaggggccggcgtcagtgacgtcagcgagaccgaggtgagcgtgggcgttgccagtggtgctctgtcagtgcctatggattatggcagggaaagtaaaatgggtcactgatatcgagaagtcagtgctgatcaataactttgaaaagagaggatgggtccaagtgacagaaaacgaggactggaatttttactggatgagtgtgcaaaccatccgaaatgtgttcagcgttgaagctggatatcggctctcagatgaccaaatagtcaaccattttccaaaccactatgaactgacccggaaggacctgatggtgaagaacatcaaaagatacaggaaggagctggagaaagaagggagtcctctggcagaaaaagatgaaaatggaaaatacctctatctggactttgttccagtcacctatatgctgcccgctgactacaacctgtttgtagaggagttccggaagagcccgtccagcacctggatcatgaagccttgtggcaaggcccagggaaagggcatcttccttatcaacaagctctcacagatcaaaaagtggtcccgggacagcaagacatcttcgtttgtgtctcaatctaataaggaagcctacgtgatctctctctatattaacaacccgttactaattggcgggaggaagttcgacctgcgcttgtacgttctggtgtccacgtaccgtccactgcgctgttacatgtacaagcttgggttttgccggttctgcacagtgaaatacaccccgagtaccagtgagctggacaacatgttcgttcatctcaccaacgtcgccatccagaaacacggggaggactacaaccacatccatgggggcaagtggacagtgagtaacctgcggctctacctggagagcacccgcggcaaggaggtgaccagcaagctgttcgacgagatccactggatcatcgtgcagtccctgaaggctgtggcgccggtgatgaacaatgacaagcactgctttgaatgctatggctacgacatcatcatcgacgacaagctgaagccctggctgatcgaggtgaatgcgtccccgtctctcacgtccagcactgccaatgaccgaatcctcaagtacaacctgattaatgacaccctcaacatcgccgtcccgaatggtgaaatcccagactgcaaatggaacaagtcgccacctaaggaagtcctcggcaattacgagattctgtatgatgaagaattggcccagggtgacggggctgaccgggagctgagaagccgtcagggtcagtctctggggcccagagcaggccgatcgagagactcggggagagcggtcctcaccacctggaagtgagtcccacctggaccttatcaaaactactcactccacctgggcccctgctgaagccctattttgaaatttcccttttgtagagcttttttcctttcctaagccctgtaaataaatgaaggcacttctttggaaggttatggagtctgtttgactagtgctaaaggaaacaattcatgcggatgtataaaactcgctcttttttttttaatttttaacctaagcagaattttcatattaaaaactcacttttttgacagaaagtaacagcttcaagcatg

SEQ ID NO: 51405 - DNA, 2650 bp, Homo sapiens
ctggcatttctgtgcctcctgggactgaaatctctgtttctccacctggaagatgaggcctcctgctcccaggggcagacagatgttaagaacttcccggcgctagtgcccaccagactgcgctcctcctaatgcggggacatgaggctgacaccaatgctccctgggaagctcgggctcccagaccacagtaaacactgcgttaaaacagcaacaaaaatgttacaatagtaagagctacaacagtaacatcaacaaccacgtcctaccccacgagtggctcattctagcaaaattgacaatgaagggcttgaaagcgatcgcatttaggaggccagagcccagacgacgaccagctccgaaccccacaagccttgtcgtgaccgcgccccgcaggcggggggccccctcgcgggtcacccgcaggggcgcacctccaatttaccaaacaaggtcgcatgccccagccgggctctagtccccgcccagtctggggcgcacctgtgcagggcgcgtgggcaagcgagggcgggcggctgcgcgccgctccgtgtgcacgttcctgttccggactttctgggcgtcccgttacgaagcctttcctcggcccttcctcaggtgcgcagcgcctccgggagccggtcccggcggcaccgggcacgacgccatcttccctcttttaagggcaccggggctgtgcggccgcggccgtgggctggcgttgccgcgctacggtctggccgggtccgcacgaccccagagttcggagccgggtgcccggaagccgcactggaggactgtgcggcggcgatggggcgtccagccgtcgcggcgagacgcagagggaccaccccattgcacaggcgcggagactgaggcccgcaggggccgcgcctggcacgatcgcccgtcggggacctggagccccggacagagaggggaagaaggaggggccggcgtcagtgacgtcagcgagaccgaggtgagcgtgggcgttgccagtggtgctctgtcagtgcctatggattatggcagggaaagtaaaatgggtcactgatatcgagaagtcagtgctgatcaataactttgaaaagagaggatgggtccaagtgacagaaaacgaggactggaatttttactggctccttgaccttcctgaatttcggtacagatcctgtttaaatgagtttcctgacttcagagtctgaaaagggatgagtgtgcaaaccatccgaaatgtgttcagcgttgaagctggatatcggctctcagatgaccaaatagtcaaccattttccaaaccactatgaactgacccggaaggacctgatggtgaagaacatcaaaagatacaggaaggagctggagaaagaagggagtcctctggcagaaaaagatgaaaatggaaaatacctctatctggactttgttccagtcacctatatgctgcccgctgactacaacctgtttgtagaggagttccggaagagcccgtccagcacctggatcatgaagccttgtggcaaggcccagggaaagggcatcttccttatcaacaagctctcacagatcaaaaagtggtcccgggacagcaagacatcttcgtttgtgtctcaatctaataaggaagcctacgtgatctctctctatattaacaacccgttactaattggcgggaggaagttcgacctgcgcttgtacgttctggtgtccacgtaccgtccactgcgctgttacatgtacaagcttgggttttgccggttctgcacagtgaaatacaccccgagtaccagtgagctggacaacatgttcgttcatctcaccaacgtcgccatccagaaacacggggaggactacaaccacatccatgggggcaagtggacagtgagtaacctgcggctctacctggagagcacccgcggcaaggaggtgaccagcaagctgttcgacgagatccactggatcatcgtgcagtccctgaaggctgtggcgccggtgatgaacaatgacaagcactgctttgaatgctatggctacgacatcatcatcgacgacaagctgaagccctggctgatcgaggtgaatgcgtccccgtctctcacgtccagcactgccaatgaccgaatcctcaagtacaacctgattaatgacaccctcaacatcgccgtcccgaatggtgaaatcccagactgcaaatggaacaagtcgccacctaaggaagtcctcggcaattacgagattctgtatgatgaagaattggcccagggtgacggggctgaccgggagctgagaagccgtcagggtcagtctctggggcccagagcaggccgatcgagagactcggggagagcggtcctcaccacctggaagtgagtcccacctggaccttatcaaaactactcactccacctgggcccctgctgaagccctattttgaaatttcccttttgtagagcttttttcctttcctaagccctgtaaataaatgaaggcacttctttggaaggttatggagtctgtttgactagtgctaaaggaaacaattcatgcggatgtataaaactcgctcttttttttttaatttttaacctaagcagaattttcatattaaaaactcacttttttgacagaaagtaacagcttcaagcatg

SEQ ID NO: 51406 - DNA, 1704 bp, Homo sapiens
agtgcagcgcggggcggggcgggccggtgcgcctggcagtcggctgcgtcctcctgcgagcgccggagaggggctggaggcggggcgagggcgcggctcgaggcatccctgcagggcgctcctccgagtccctcggcgctctgagcccacagggaagaaggaggggccggcgtcagtgacgtcagcgagaccgaggtgagcgtgggcgttgccagtggtgctctgtcagtgcctatggattatggcagggaaagtaaaatgggtcactgatatcgagaagtcagtgctgatcaataactttgaaaagagaggatgggtccaagtgacagaaaacgaggactggaatttttactggatgagtgtgcaaaccatccgaaatgtgttcagcgttgaagctggatatcggctctcagatgaccaaatagtcaaccattttccaaaccactatgaactgacccggaaggacctgatggtgaagaacatcaaaagatacaggaaggagctggagaaagaagggagtcctctggcagaaaaagatgaaaatggaaaatacctctatctggactttgttccagtcacctatatgctgcccgctgactacaacctgtttgtagaggagttccggaagagcccgtccagcacctggatcatgaagccttgtggcaaggcccagggaaagggcatcttccttatcaacaagctctcacagatcaaaaagtggtcccgggacagcaagacatcttcgtttgtgtctcaatctaataaggaagcctacgtgatctctctctatattaacaacccgttactaattggcgggaggaagttcgacctgcgcttgtacgttctggtgtccacgtaccgtccactgcgctgttacatgtacaagcttgggttttgccggttctgcacagtgaaatacaccccgagtaccagtgagctggacaacatgttcgttcatctcaccaacgtcgccatccagaaacacggggaggactacaaccacatccatgggggcaagtggacagtgagtaacctgcggctctacctggagagcacccgcggcaaggaggtgaccagcaagctgttcgacgagatccactggatcatcgtgcagtccctgaaggctgtggcggtgaatgcgtccccgtctctcacgtccagcactgccaatgaccgaatcctcaagtacaacctgattaatgacaccctcaacatcgccgtcccgaatggtgaaatcccagactgcaaatggaacaagtcgccacctaaggaagtcctcggcaattacgagattctgtatgatgaagaattggcccagggtgacggggctgaccgggagctgagaagccgtcagggtcagtctctggggcccagagcaggccgatcgagagactcggggagagcggtcctcaccacctggaagtgagtcccacctggaccttatcaaaactactcactccacctgggcccctgctgaagccctattttgaaatttcccttttgtagagcttttttcctttcctaagccctgtaaataaatgaaggcacttctttggaaggttatggagtctgtttgactagtgctaaaggaaacaattcatgcggatgtataaaactcgctcttttttttttaatttttaacctaagcagaattttcatattaaaaactcacttttttgacagaaagtaacagcttcaagcatg

SEQ ID NO: 51407 - DNA, 1279 bp, Homo sapiens
ctggcatttctgtgcctcctgggactgaaatctctgtttctccacctggaagatgaggcctcctgctcccaggggcagacagatgttaagaacttcccggcgctagtgcccaccagactgcgctcctcctaatgcggggacatgaggctgacaccaatgctccctgggaagctcgggctcccagaccacagtaaacactgcgttaaaacagcaacaaaaatgttacaatagtaagagctacaacagtaacatcaacaaccacgtcctaccccacgagtggctcattctagcaaaattgacaatgaagggcttgaaagcgatcgcatttaggaggccagagcccagacgacgaccagctccgaaccccacaagccttgtcgtgaccgcgccccgcaggcggggggccccctcgcgggtcacccgcaggggcgcacctccaatttaccaaacaaggtcgcatgccccagccgggctctagtccccgcccagtctggggcgcacctgtgcagggcgcgtgggcaagcgagggcgggcggctgcgcgccgctccgtgtgcacgttcctgttccggactttctgggcgtcccgttacgaagcctttcctcggcccttcctcaggtgcgcagcgcctccgggagccggtcccggcggcaccgggcacgacgccatcttccctcttttaagggcaccggggctgtgcggccgcggccgtgggctggcgttgccgcgctacggtctggccgggtccgcacgaccccagagttcggagccgggtgcccggaagccgcactggaggactgtgcggcggcgatggggcgtccagccgtcgcggcgagacgcagagggaccaccccattgcacaggcgcggagactgaggcccgcaggggccgcgcctggcacgatcgcccgtcggggacctggagccccggacagagaggggaagaaggaggggccggcgtcagtgacgtcagcgagaccgaggtgagcgtgggcgttgccagtggtgctctgtcagtgcctatggattatggcagggaaagtaaaatgggtcactgatatcgagaagtcagtgctgatcaataactttgaaaagagaggatgggtccaagtgacagaaaacgaggactggaatttttactgactctttgaccacattgaccagtggaatacagtaaaaatcatacatgcctgggcccaggccaattcctctgttggaaacatgtgggtgccctgagctgtcctgtgagaaggtgccatcctgaagccctcgtgccacag

SEQ ID NO: 51408 - DNA, 1747 bp, Homo sapiens
agtgcagcgcggggcggggcgggccggtgcgcctggcagtcggctgcgtcctcctgcgagcgccggagaggggctggaggcggggcgagggcgcggctcgaggcatccctgcagggcgctcctccgagtccctcggcgctctgagcccacagggaagaaggaggggccggcgtcagtgacgtcagcgagaccgaggtgagcgtgggcgttgccagtggtgctctgtcagtgcctatggattatggcagggaaagtaaaatgggtcactgatatcgagaagtcagtgctgatcaataactttgaaaagagaggatgggtccaagtgacagaaaacgaggactggaatttttactggctccttgaccttcctgaatttcggtacagatcctgtttaaatgagtttcctgacttcagagtctgaaaagggatgagtgtgcaaaccatccgaaatgtgttcagcgttgaagctggatatcggctctcagatgaccaaatagtcaaccattttccaaaccactatgaactgacccggaaggacctgatggtgaagaacatcaaaagatacaggaaggagctggagaaagaagggagtcctctggcagaaaaagatgaaaatggaaaatacctctatctgggtttgtgcgtcttccaccggctcatgttttcaactttgttccagtcacctatatgctgcccgctgactacaacctgtttgtagaggagttccggaagagcccgtccagcacctggatcatgaagccttgtggcaaggcccagggaaagggcatcttccttatcaacaagctctcacagatcaaaaagtggtcccgggacagcaagacatcttcgtttgtgtctcaatctaataaggaagcctacgtgatctctctctatattaacaacccgttactaattggcgggaggaagttcgacctgcgcttgtacgttctggtgtccacgtaccgtccactgcgctgttacatgtacaagcttgggttttgccggttctgcacagtgaaatacaccccgagtaccagtgagctggacaacatgttcgttcatctcaccaacgtcgccatccagaaacacggggaggactacaaccacatccatgggggcaagtggacagtgagtaacctgcggctctacctggagagcacccgcggcaaggaggtgaccagcaagctgttcgacgagatccactggatcatcgtgcagtccctgaaggctgtggcgccggtgatgaacaatgacaagcactgctttgaatgctatggctacgacatcatcatcgacgacaagctgaagccctggctgatcgaggtgaatgcgtccccgtctctcacgtccagcactgccaatgaccgaatcctcaagtacaacctgattaatgacaccctcaacatcgccgtcccgaatggtgaaatcccagactgcaaatggaacaagtcgccacctaaggaagtcctcggcaattacgagattctgtatgatgaagaattggcccagggtgacggggctgaccgggagctgagaagccgtcagggtcagtctctggggcccagagcaggccgatcgagagactcggggagagcggtcctcaccacctggaagtgagtcccacctggaccttatcaaaactactcactccacctgggcccctgctgaagccctattttgaaatttcccttttgtagagcttttttcctttcctaagccctgtaaataaatgaaggcacttctttgg

SEQ ID NO: 51409 - DNA, 2578 bp, Homo sapiens
ctggcatttctgtgcctcctgggactgaaatctctgtttctccacctggaagatgaggcctcctgctcccaggggcagacagatgttaagaacttcccggcgctagtgcccaccagactgcgctcctcctaatgcggggacatgaggctgacaccaatgctccctgggaagctcgggctcccagaccacagtaaacactgcgttaaaacagcaacaaaaatgttacaatagtaagagctacaacagtaacatcaacaaccacgtcctaccccacgagtggctcattctagcaaaattgacaatgaagggcttgaaagcgatcgcatttaggaggccagagcccagacgacgaccagctccgaaccccacaagccttgtcgtgaccgcgccccgcaggcggggggccccctcgcgggtcacccgcaggggcgcacctccaatttaccaaacaaggtcgcatgccccagccgggctctagtccccgcccagtctggggcgcacctgtgcagggcgcgtgggcaagcgagggcgggcggctgcgcgccgctccgtgtgcacgttcctgttccggactttctgggcgtcccgttacgaagcctttcctcggcccttcctcaggtgcgcagcgcctccgggagccggtcccggcggcaccgggcacgacgccatcttccctcttttaagggcaccggggctgtgcggccgcggccgtgggctggcgttgccgcgctacggtctggccgggtccgcacgaccccagagttcggagccgggtgcccggaagccgcactggaggactgtgcggcggcgatggggcgtccagccgtcgcggcgagacgcagagggaccaccccattgcacaggcgcggagactgaggcccgcaggggccgcgcctggcacgatcgcccgtcggggacctggagccccggacagagaggggaagaaggaggggccggcgtcagtgacgtcagcgagaccgaggtgagcgtgggcgttgccagtggtgctctgtcagtgcctatggattatggcagggaaagtaaaatgggtcactgatatcgagaagtcagtgctgatcaataactttgaaaagagaggatgggtccaagtgacagaaaacgaggactggaatttttactggatgagtgtgcaaaccatccgaaatgtgttcagcgttgaagctggatatcggctctcagatgaccaaatagtcaaccattttccaaaccactatgaactgacccggaaggacctgatggtgaagaacatcaaaagatacaggaaggagctggagaaagaagggagtcctctggcagaaaaagatgaaaatggaaaatacctctatctggactttgttccagtcacctatatgctgcccgctgactacaacctgtttgtagaggagttccggaagagcccgtccagcacctggatcatgaagccttgtggcaaggcccagggaaagggcatcttccttatcaacaagctctcacagatcaaaaagtggtcccgggacagcaagacatcttcgtttgtgtctcaatctaataaggaagcctacgtgatctctctctatattaacaacccgttactaattggcgggaggaagttcgacctgcgcttgtacgttctggtgtccacgtaccgtccactgcgctgttacatgtacaagcttgggttttgccggttctgcacagtgaaatacaccccgagtaccagtgagctggacaacatgttcgttcatctcaccaacgtcgccatccagaaacacggggaggactacaaccacatccatgggggcaagtggacagtgagtaacctgcggctctacctggagagcacccgcggcaaggaggtgaccagcaagctgttcgacgagatccactggatcatcgtgcagtccctgaaggctgtggcgccggtgatgaacaatgacaagcactgctttgaatgctatggctacgacatcatcatcgacgacaagctgaagccctggctgatcgaggtgaatgcgtccccgtctctcacgtccagcactgccaatgaccgaatcctcaagtacaacctgattaatgacaccctcaacatcgccgtcccgaatggtgaaatcccagactgcaaatggaacaagtcgccacctaaggaagtcctcggcaattacgagattctgtatgatgaagaattggcccagggtgacggggctgaccgggagctgagaagccgtcagggtcagtctctggggcccagagcaggccgatcgagagactcggggagagcggtcctcaccacctggaagtgagtcccacctggaccttatcaaaactactcactccacctgggcccctgctgaagccctattttgaaatttcccttttgtagagcttttttcctttcctaagccctgtaaataaatgaaggcacttctttggaaggttatggagtctgtttgactagtgctaaaggaaacaattcatgcggatgtataaaactcgctcttttttttttaatttttaacctaagcagaattttcatattaaaaactcacttttttgacagaaagtaacagcttcaagcatg

SEQ ID NO: 51410 - DNA, 1863 bp, Homo sapiens
agtgcagcgcggggcggggcgggccggtgcgcctggcagtcggctgcgtcctcctgcgagcgccggagaggggctggaggcggggcgagggcgcggctcgaggcatccctgcagggcgctcctccgagtccctcggcgctctgagcccacagggaagaaggaggggccggcgtcagtgacgtcagcgagaccgaggtgagcgtgggcgttgccagtggtgctctgtcagtgcctatggattatggcagggaaagtaaaatgggtcactgatatcgagaagtcagtgctgatcaataactttgaaaagagaggatgggtccaagtgacagaaaacgaggactggaatttttactggctccttgaccttcctgaatttcggtacagatcctgtttaaatgagtttcctgacttcagagtctgaaaagggatgagtgtgcaaaccatccgaaatgtgttcagcgttgaagctggatatcggctctcagatgaccaaatagtcaaccattttccaaaccactatgaactgacccggaaggacctgatggtgaagaacatcaaaagatacaggaaggagctggagaaagaagggagtcctctggcagaaaaagatgaaaatggaaaatacctctatctggactttgttccagtcacctatatgctgcccgctgactacaacctgtttgtagaggagttccggaagagcccgtccagcacctggatcatgaagccttgtggcaaggcccagggaaagggcatcttccttatcaacaagctctcacagatcaaaaagtggtcccgggacagcaagacatcttcgtttgtgtctcaatctaataaggaagcctacgtgatctctctctatattaacaacccgttactaattggcgggaggaagttcgacctgcgcttgtacgttctggtgtccacgtaccgtccactgcgctgttacatgtacaagcttgggttttgccggttctgcacagtgaaatacaccccgagtaccagtgagctggacaacatgttcgttcatctcaccaacgtcgccatccagaaacacggggaggactacaaccacatccatgggggcaagtggacagtgagtaacctgcggctctacctggagagcacccgcggcaaggaggtgaccagcaagctgttcgacgagatccactggatcatcgtgcagtccctgaaggctgtggcgccggtgatgaacaatgacaagcactgctttgaatgctatggctacgacatcatcatcgacgacaagctgaagccctggctgatcgaggtgaatgcgtccccgtctctcacgtccagcactgccaatgaccgaatcctcaagtacaacctgattaatgacaccctcaacatcgccgtcccgaatggtgaaatcccagactgcaaatggaacaagtcgccacctaaggaagtcctcggcaattacgagattctgtatgatgaagaattggcccagggtgacggggctgaccgggagctgagaagccgtcagggtcagtctctggggcccagagcaggccgatcgagagactcggggagagcggtcctcaccacctggaagtgagtcccacctggaccttatcaaaactactcactccacctgggcccctgctgaagccctattttgaaatttcccttttgtagagcttttttcctttcctaagccctgtaaataaatgaaggcacttctttggaaggttatggagtctgtttgactagtgctaaaggaaacaattcatgcggatgtataaaactcgctcttttttttttaatttttaacctaagcagaattttcatattaaaaactcacttttttgacagaaagtaacagcttcaagcatg

SEQ ID NO: 51411 - DNA, 438 bp, Homo sapiens
aagggatatatgataggaggcatttaactaatagacataagatggttctggatcatttcttccccagataagagggattatttctatagatgaataaaaatggtttctggaaagctatgcttctgtatttatatcttaattcaaaggtgtccaatcttttggctttcgtgggccacattggaagaaaaagaattgtcttgggccacacataaaatatactaacagtagctgatatgctaaaaaaaaaaaatctcataatgttttaagaaagtttacgaatttgtgttgggccacattcaaaaccatcctgggctgcatgtggcctgcaggccacaggttggacaagcttggcttagattattattttattgagagaatcatttgtattatttctggtgcatgtgatctatccacagtattctcattttctactgcctt

SEQ ID NO: 51412 - DNA, 551 bp, Homo sapiens
taaagaaatggggtctcactaagttgctcaggctggtcttgaactcctcagccccctaaagtgctgggattataccatgcctgattcatattttggcttttaaaaagcattctccactaaaaagaactatgctgcctagagaaaaagctcaagggctagtgagggtacaaaataagccagccaggaatatcttctcagggcagaaagttacgtagttctcaaagaatgacagagacatcaaaaagacacaaaagtcagcctgaagaaacttcccttgaccagatatgatacaattttgagcatcaaaactaaaatggtattaacagattatataacccatcaaataagacaaatccactaaattttttttggagtggggagggggcagttgaaagacagagtctcactctgtctcccaggccagagtgagacactctcaaaaaaacaaaaacaacaaaagaggctggggtgggaagatcacttgagcccaggaggtagtgactgtgccactgcattccagcctgggcaacagagcaagactctatctcaaa

SEQ ID NO: 51413 - DNA, 752 bp, Homo sapiens
gatcatggagggctaaataagatgggtggagctgagattacagctgacggaatggggattagacccaagtaccagataaatctagaaactagagaagtgaatgaaggaagttacagtacagaaaacagttccacgtgatcttcacacataaaggtggaagaagaaataggatgatctcatgttgtttttcaggctacggaaaaacctgcgagccctggtggttgtccatgctacatggtatgtgaaagcatttctggcactgcttcggcccttcatcaggtactagttctaggaacaaggactcctttctccttccccccattttcaaaatcaagattaagatctttctccaccttgattctttctagccttaaccactctacttctacatttttctttgcaaggatttttgggaacccttctcccaatacaaaacacagttgatttattctctcttttcagttccaaattcacacgaaaaatccgttttctggacagcctgggggagctggcccaactcatatccctggatcaagtccacatccctgaagctgtcagacagtgagtttcacacttaagaataaagccttggggtgggatgtgtaaagccaatctctacttttttaatgccttgggggacatacaaaagaacgaaaagctagagggccctgttttcgggtgctttaatgtatatggggaaactgcacacacccagagaagaaatgaaggacactactgcatccaacaagaat

SEQ ID NO: 51414 - DNA, 613 bp, Homo sapiens
ggttaccacggtgatggcctcaatgctgtcatcctttttgcttcctgttatctacccagaagcagcatccccaactacacctatgtcatggaacacttgtttaggtatatggtgggaactctggagctgctagtagctgaaaattacctgcttgttcatttgagtggaggcacaagcagggcccaagttccacctctaagctggatacgtcagtgttaccgtaccctggatcggcggctacggaaaaacctgcgagccctggtggttgtccatgctacatggtatgtgaaagcatttctggcactgcttcggcccttcatcagttccaaattcacacgaaaaatccgttttctggacagcctgggggagctggcccaactcatatccctggatcaagtccacatccctgaagctgtcagacagtgagtttcacacttaagaataaagccttggggtgggatgtgtaaagccaatctctacttttttaatgccttgggggacatacaaaagaacgaaaagctagagggccctgttttcgggtgctttaatgtatatggggaaactgcacacacccagagaagaaatgaaggacactactgcatccaacaagaat

SEQ ID NO: 51415 - DNA, 591 bp, Homo sapiens
cttgtttactagactgatcccacagaaatcccagtaggagtcacaagatgctgggatcacaacatgtgaaaattctggctatgcctatgaaagaaagactctgatagatacaaatgaaacacgtctttggggcatcctttgtttttgaaaatctgaatttacacagcccaaaaggtatattttcttgtaccatatccttatttattttcctttgtatggaattatactgagtactactgcttttttattttgtagccttggcattgtattgattagtgtcatgtaaatttggttagtctttgattttatagtgttgacagaccttaaaaaaaaatcatggccaggcatggtggctcacacctgtaatcccaacactttgggaggctgaggtggttgaatcacctgaggtgaggagttcgagaccagcctggccaacgtggtgaaaccccatctctactaaaaatagaaaataagccacaccatgatattggagggccagatgatgaaaggccagtagatgcttgagaccggagaaaatgagaaactatgtattttttaaaaataaaatattcttaagtatatgaaacttta

SEQ ID NO: 51416 - DNA, 1064 bp, Homo sapiens
ttggctgtgttgtattccattgaacaaatgacttctatttatgcagcctgtcccctaatgatgagcattgaggttgtttacaccttttggtgagtctgtttgcatcctacttggacatggtttttgtacaccttttcatcactccagtggaggagactcacctgcccaggacactctgcttcccctcttgtagctgaacttaactccactgaggttttctggggcccgagatctcggttcaggggagtccagcaacaaacattagaccagggttggaacggctggcacagtaacatcaatggaaagggacagagtttgagagttcaaacgtgatgcactcagcagccaccgccagcacatcctccacaccgtctcgtgcaggggcccacccatctctgtgtctttccagcacacaacagtcacccacactgggcattccattcagaggtgggagagaggaggacacccctcctggcccaggagcagaggccatcaaggtgtccccggaacttagagtagatacattgccaaaaggtgatatcctcattctcagggattctggtcttggagcagcccacttccaaatgaggggccgtacagaccaaagtcacccctctgaggcagcgtgtggtgatgctgatgcagccagagttcttagcaaaagttgatggatggggacaagcagctgctagattaagtaattcctcaaatttgtaaatgtcagcagtggaagaggagcagtctcttacccatctcttgctcaactttctacccccacgcttctcagcacaatgtccttaagcgttattggcgctcccaaaatagttgccaaatgaataagtgacctggggaaggaaaggaaggagggagggaacagaagattgcctgaaaaaggaggagagagttgggtggaaagaatgcattgagctgtgtgccttggttgcaatgcctgtcctgtgaccagaaaatgcatcccaacacatgtcaggctgtgtctagcaggtgggagggagtctggtggagaaatggcattggaccacatactcaccgctaggtctgttcgg

SEQ ID NO: 51417 - DNA, 500 bp, Homo sapiens
ttggctgtgttgtattccattgaacaaatgacttctatttatgcagcctgtcccctaatgatgagcattgaggttgtttacaccttttggtgagtctgtttgcatcctacttggacatggtttttgtacaccttttcatcactccagtggaggagactcacctgcccaggacactctgcttcccctcttgtagctgaacttaactccactgaggttttctggggggctcccacggacccgccgtgggcccaggggaggcagagcctgagccaacagcagtggtgctgtggaccgtggatcctgagggtggcctggggcaagtaccggctgagggtccaggtgggctttgtgtacctttgggtcctggggccctggtgacttggactccaggttagagtcaagtgacaggagaaaggctggtggggtcctgtgcttccgacttcatttcgagtgatggcagttcccaggaaggaatccacagctgacggtggctatagagg

SEQ ID NO: 51418 - DNA, 534 bp, Homo sapiens
agttttaatggaacacagccatccatgcttatgtaagtgtgcatattctctggctgttttcactgcaatagcagagttgagtagttgtgacaaagagtttatggcccacaaaacctaaaatatttactttctgatgctttacagaaaaagtttcctgaaccttattctagctatatgttgttcataaatgaatctttcgtggttctgaaggcatttaagaatctcttaggttataaattggctgggcgcagtggctcacgcctgtaatcccagcactttgggaggccgaggctggtggatcacgagggcaggagttcaagatcagcctagccaagatggtgaaaccctgtctccattaaaaaaaaaaaaaaaaaaaaaaatagctggggttggtggtgggcagtaatcccagctactcgggaggctgaggcagagaattgcttaaacccaggaggcggaggatgcagtgagccaagatcgcgccactgcactccagcctgggcaacagagtgaaacaccatctcaaaaaaaaaa

SEQ ID NO: 51419 - DNA, 390 bp, Homo sapiens
aagacacttgtcacttgattttgaggctacctggataatccaggatgatcttatctcaagattcttaacttaattacatctgcaaaacccctttttccaaataacatttgcagattctggggattaggacatgaacatatcttttgtggggttaccatgcaacacactaaaatatggttctggaaatttttgctaaggacatcagtaaggtatgctaaattatgcaaaaatctaaaggatatttaacgtttgtgcataattttaaaaatgggccaggtgcagtggctcacgcctgtaatcccagcactttggaaggctgacgtgggcggatcacttgagtccaggagttcgaaatcagcctggccaacatggcaaaacctcgccgcttgt

SEQ ID NO: 51420 - DNA, 308 bp, Homo sapiens
actgttgtgcaagccaaaccagtcagtgttgaagccttctttggtcttccaagatccacaattgaggactgcacactctgattgcatttgtgggaccacgatgctccttgaatagataatgagtccttgaagtggtggatctttcggaaactatatagcgattcccacgtcagacagttggatccagcgttggatctactatccaaatgatccctgtagacctaaaaatattccacctaaaatattccataagcagtatgtaggtactggagtcttcattatgaaagattaaaacattttgctgtcaa

SEQ ID NO: 51421 - DNA, 274 bp, Homo sapiens
catgcccagcctgttgggagctccaccctactctggcctgggcggtgtaggggatccctatgtgcccctcatggtgctgatgtgccgggtgtgcctggaagacaagcccatcaagcccctgccttgctgcaagaaggccgtgtgcgaggagtgcctcaaagtctacctgagcgcccagacggagtctcactctgtcaccaggctggagtgcagtggcatgatctcggctcacggaaacctccacatcccaggttcaagcgattctcctgcctca

SEQ ID NO: 51422 - DNA, 150 bp, Homo sapiens
ctctgatgttataatttcataaattttgtattttttgtaccttttgcagcagttgctttagggcttttaaccacaatgttattgtacctgggagtggagataactttttcaactaaataatgttttagaaatgacaattttggtattcaa

SEQ ID NO: 51423 - DNA, 447 bp, Homo sapiens
  misc_feature (42)..(42): n is a, c, g, or t
aatcacctggacctcccgtttggtggccccaaagtcaactcnaaagttggttcggaactgagtttggtcatctttctcccatgaacctcctcctccaccttccctcctctagggactccaccataatttacagtcacagaagccagcagccctggggactccacctttctcacacctcaagcacccatggaatccaccgccccaacacccagccttcatcttaattcaggcccccatcactgcttgctaccaattgttacaataattttctaattgtctccattctctacttgctgccagagtgagcattctaaagcacaagtcgaatttgcatctctcttgctttaaaataaagtatgcttttagctatttgccattatttacagcagtgctgtctaatagaaatataataggggtgatgtatgtaatttaaaaattttttgagac

SEQ ID NO: 51424 - DNA, 201 bp, Homo sapiens
tccagtatacaggatgaaatagggatcctagccatactttcccctcattggttgggggccccagtgagtagcctcctcctccaatggtgtaaaatgctactttccccataatgtcagtgcttataaggaacacatctgggactatttctggactttctattctgtctcatccacagtgggatgctaggacctgtgcacact

SEQ ID NO: 51425 - DNA, 1329 bp, Homo sapiens
  misc_feature (1)..(1): n is a, c, g, or t
  misc_feature (118)..(118): n is a, c, g, or t
  misc_feature (1109)..(1109): n is a, c, g, or t
ngtgtatttcagcagtataccacagctatttaatgtgtatttcagcagtataccacagctatttaatgtgtatttcagcagtataccacagctatttaatgtgtatttcagcagtatnccacagctatttaatgtgtatttcagcagtatgccacagctatttaatgtgtatttcagcagtatgccacagctatttaatgtgtatttcagcagtatgccacagctatttaatgtgtatttcagcagtatgccacagctatttaatgtgtatttcagcagtatgccacagctatttaatgtgtatttcagcagtatgccacagctatttaatgtgtatttcagcagtatgccacagctatttaatatgtatttcaaaatgcaggcagtccttgctttgcatggtaatgtggagccataaaaatgaccatgctgctgagactctgcaaagcaatgttaatcatcagtgaagggaaattattattctgtgacctttacatttttttgtgaaaatattaaaaactgcaatagtcaactataaaggtacaaattaggaaaaagtgaaaaatatattaaagttaatattgttaatacatggtaatttaaaacggaaacattgataatgttttacttatttgcaaaaaaaaaaaatgtatcaaagagaagaacaatccaaacctaaagcaaacagaagggtggaaataataaagattagagcagaaattaatgaaataggtaatagaaaagatgtaagaagacagacaaaactgaaagttggtcctttgaaaaaaaaatcaacaaaatgacaaaccttcagaccagccaagaaaaaagagagaaggctgaaatttctgaaagcaagcatgaaagagggaaaacaagagactattatgagtaactatgtgctaatacctgaggtaacttagatgaaattgacagattgctagaaagacataaactaccacttctaatcagtgttatagttgagattctatccagggcaataagaaaagaaaaagaaaaagaaaatcagattagaaaggaagaaataggccgggcgcggtggctcacgcctgtaatcccagcactttgggaggccgaggcgggcggancacgaggtcaggagatcgagaccatcccggctaaaacggtgaaaccccgtctctactaaaaatacaaaaaattagccgggcgtagtggcgggcgcctgtagtcccagctacttgggaggctgaggcaggagaatggcgtgaacccgggaggcggagcttgcagtgagctgagatcccgccactgcactccagcctgggcgacagagcgagactccgtctc

SEQ ID NO: 51426 - DNA, 549 bp, Homo sapiens
gtatttttttccattttcttttaaaagatatgcagataggactttttcctctttaactgtcttattttgggagcccccagatttcagggaagagccccacactatatgagcacatgagttggacatttctggttccccgccctgagttggacattgccagtcatgtctgcagaagaaccatcctgcctgttggaagctgcagttttaccttctggttcttgcctgctcatcccctaccatactaagcctccagagtgtgggaatgtgcaccatttcctaactatattaactcactgccaccagtctggtgtgggtgctcagtacaagtgaatcctgaaaaagcctcaggctcttggatggaggaaaactggctgcatttgaaagccatacttcaatttctattggtcactgctagtataaactttaattattgatttaaacaaattttatctggatccaattatgttgataaattatttttaggtttaataatttgttagattcatttcctagcttttctaggtttagaataaataatgatttatttgt

SEQ ID NO: 51427 - DNA, 1252 bp, Homo sapiens
gtaagaatgaggcttggaacgcggagcgcattgtgggcctgtcgtgggtggcgccagcagcacatgcatgcctggctcacagagcagcctttgggtgttcttttcccggaggagctctacggtgactttgaagacttggaaacaggggacatgcacaagggaaaatcgggccccgacactcagaatgaagatatagagaaacaaggaagaaattgaccccgacgaagaagaaagtgccaagaaaaagcatttggataagaagagaaaattgaaggagatgtttgatgcggaatatgatgaaggagaaagcacatattttgatgatcttaaaggagaaatgcagaaagaagcacagctgaatcacgtagaatttgaagatcaagatgatgaagccagagttcagtatgatggttttcgacctgggatgtacgtccgcgttgagattgaaaatgttccctgtgaatttgtgcagaactttgacccccattaccccattatcctgggtggcttgggcaacagcgagggaaatgttggacacgtgcagatgcgtctgaagaaacatcgctggtataagaaaatcctcaagtcccaagatccaatcatattttctgtagggtggaggaggtttcagaccatcctgctctattatattgaagaccacaatggaagacaaaggcttctaaagtataccccacagcacatgcattgtggagcagccttttggggtaaaatatgattacaataacttgcctattgccgagattaaactttacaggctgcgttattttagctttgtgcttttcctttcataaaattccactcctaagatgtttctgttttctgggagcggggaggtggtttggagtatatatgtaaatctatatccaaatctaaatgtccgtatccagtatgttaaactagaatctaaaatttctggtttgctatatttctttttttccttttcctttaagaccctatcactccacagggaactggtttcttggcaatacagtctgtcagtggcataatggtaactatcttggacaatttcttttacagattggtttgagaaatatatcctgaatgtgggttattatgtacatgagactttaagttgaaaattactcatttttattattataaagtaaatttccctttgcttttaatctttgtacatccttttcagtagggtgtgggattagaggaggggaggtggaagaattataatggtacatttcctatttttgtgcat

SEQ ID NO: 51428 - DNA, 449 bp, Homo sapiens
ctttagaagactagtttgtcttcctttaaggagaagaatatggaagatttgtctttagaaatgtagatgtttggcttttaaaagaataaatggtttgtcttcctttaaaaataggcttttaaagacacaagtaagttttaatttgagtgtaattgtaaggaggccactttctagttcgttggaaaatatgtgttcagaagacaatgtagtatcagtttttgtctgatttttcaagtgttggtttcccttttggttgaacagcagatctttctcgtatatgtgtaattctaaaggattgtacagaaaattaagggagatctaaatacttagatttttaaagtttatctggtgaactctgattttggtgatgataataaatgactgcattgaggataatgcatttcattgttatatcctaatgaagctttagggtcatcttcgcctcagaa

SEQ ID NO: 51429 - DNA, 763 bp, Homo sapiens
aagtggggcctggaatctgtcttgggactctgaaatggaggggggtgattgatgaaactagccctctgtttctcccctctcttttccagtcaaatgtcgctgcctccaatgccaagctggctttgttttatgactggctgttctttagtccagacaaggatagcattatgaacataggtatgtgaccaagaccaggcggctccacttccccatccccctaagcccccactgccttccttagtgatagcagtcataaatctcagggcaccgtggagtggaggcagtttatctgggagcagctctgttgttcctcatcagttttcccttgacctagaaagagaattgctttgataaggctaagccatcactgtacctcctccccacagtcttcaggatgcatggtcttcaggaggggagggcatgggcaaaggaaaaggctgtaccatgtcctgcttctcctcacctattacttcccttctcaaagctgaatgctgggaacaagaagggaaatgagggctacaagctgtttcggggcctgtctgctcttgggtctgctcagtggaaatggggggaatagacatagcacttcccagagccattcatgtatattgacatcccattttatggagatagaaacagactgactttagcctggcgtggtggcgcacacctgtaattccagctgctggggaggttgaggcatgagattcgcttgaacctgggaggcagaggcttcagtgagctgagatcgtaccatttgcac

SEQ ID NO: 51430 - DNA, 332 bp, Homo sapiens
cccgcccttccactatggccgcttctgtgtggtgtggggagacgctggtcctccccgtcctcccatagcgcttattgcctcaccctcaccccctaggggccggatccaaaggcgctgcactccccaagccttggggcatcagccaggaaggtttcctacctcctaattcaggggcaggactcctcttttccccccacggggaaaagaggcagaaacttaggggtttccctcctttcttagggtcagacgctcttagggtccacttcttcaggggcggaagcctctcctacccttgactcctctgtgctttggtaataaattgttttaccaga

SEQ ID NO: 51431 - DNA, 4216 bp, Homo sapiens
atattcaagcggctactcccaagattgcatgtgtttgtttaaaagtgacctgctactacctcaccattagcccactgggacttgcttcctctttaaaattttatgtaacactgatgctcctgttttgatgtgtatgaaccttaatctatgtgatatgtgactttgtgaacattgaattttttaattgagacctggggcaaggcatagttgtagctatttttatcctctttcctggcacttcttccctgtttggcacttccagcccctgcttcttatcccaagactggtatggcattgctgtgtgttaattctgccccacaaagtttcatagcaagcactaaagactgttacctggaaataagaaactcttggcctgttgggggcctcagtgcaggactcaggacatccagttgctagactgcagctgttgtcagccacctgtacttctcaggctctatctgagatatcatcctttctttccaactgtgggcttcttatatctacttctcagacgttcattttcaagggccaaaatgttcccactccaactcacaatctgtgggaaagtagcagctctggtttctagaaaaattcagaaccttccctttccttctttctggaggcaaagggtgaaactttaaagcctgacagaacagaaggcagtttatctcagcagtgaagggatggcagtaatgggatggcagtcagggtggaccagcagaatgggtgaagagatgtattggattggctgacttgctaatcggagctattctttttttccccttttgaaatcaggtggagatgttacagccaaaaatatctggttggcagaaagtgttctggatatcctgacagagcaaagggagtgggtcctgaagagcagcatcctcattgccatggctgtttacacgtacctccgcctcatcgtggaccaccatgggactgcccagctccaggccctgcgacagaaggaagtagacttctgcatctcactgcttcgggaacggttcatggaatgtctgatgattggtcgggatctcgtaagactacttcagaatgttgctaggataccagaatttgaactgctttggaaagatattatccataatcctcaggccttgagtcctcagttcacaggtatcctacagcttcttcagtcaagaacatcccgaaaattcctagcatgtcgtctaaccccggacatggagactaaactcctcttcatgacatcccgggtgcgatttggtcaacaaaagcgataccaagattggttccagcgccagtacctgtcaactccagatagtcagtctctgcgctgtgacctcattcgctacatctgtggggtagtccacccttctaatgaagtactgagttcagatatcttgccccggtgggccatcattggttggctcctgacaacgtgcacgtcaaatgtcgctgcctccaatgccaagctggctttgttttatgactggctgttctttagtccagacaaggatagcattatgaacatagaaccagccatcctggtcatgcaccactccatgaagccccacccagccatcactgccacactcctggacttcatgtgccgcatcattcccaacttctatccaccattggagggccacgtgcggcagggtgtcttttcctccctcaaccacattgtggagaaacgggtcttggcacacctagctcccctgtttgacaaccctaagttggataaggagctgcgggcaatgctgagagagaagtttcctgagttctgcagctcaccctccccacctgtggaagtcaaaattgaggagccagtttccatggagatggacaaccatatgtcggataaggatgagagttgctatgacaatgcagaggcagccttcagtgacgatgaagaggatctcaacagcaaaggaaagaagagggagtttcgcttccaccctatcaaggagacagttgtggaggagccagttgatatcaccccttaccttgaccagttggatgagtccctgagggacaaagtactccagctacagaaggggagtgatacggaggcccagtgtgaggtcatgcaggaaattgtggaccaggtcctggaggaagactttgactcggagcagctgtctgtccttgcttcctgcctacaggagctcttcaaggcccactttcgaggggaggtcctgcctgaggagattactgaggagtccctggaggagtctgtaggaaagcctctgtacctaatatttaggaacctatgtcagatgcaggaagacaacagcagcttctctctacttctagaccttctctccgagctatatcagaagcagcccaagattggctaccacctgctctactacctgagggccagcaaagccgccgcagggaagatgaacctgtacgagtcatttgcccaggctacccagctgggcgatctgcacacctgcctgatgatggacatgaaggcctgccaggaggacgatgtgcggctcctgtgccacctcacgccctccatctacacagagtttccagatgaaaccttgaggagcggagagctgctgaacatgatcgtggctgttattgactctgcacagctccaggagctggtctgccacgtgatgatgggtaacctggttatgtttcgaaaagactcagttctcaacatactcattcagagcctagactgggagacctttgagcagtattgtgcctggcagctctttctggcccacaatattcccctggagaccataatccccatcctgcagcacctcaaatacaaggagcacccagaggccctgtcctgcctactgcttcaactccgaagagaaaagcccagcgaggagatggtgaagatggtgctgagccggccctgccatcctgacgaccagttcaccaccagcatcctgcggcactggtgcatgaaacatgacgagctgctggccgagcacatcaagtccctgctcatcaagaacaacagcctgcctcgcaagagacagagcctgaggagctctagcagcaagctggcccagctgactctggagcagatcctggagcacttggacaatctgcggctcaacctgaccaacaccaagcagaacttttttagccagacgccaattctccaggcgctgcagcatgtccaagcgagctgtgacgaagcccacaagatgaaattcagtgatctcttctccctggcggaggaatatgaggactcttccaccaagccacccaagagccggcgaaaagcagctctgtccagccctcgaagtcgaaagaatgccacacagccccccaatgccgaagaagagtcgggctccagcagtgcttcagaagaggaagacacgaaaccgaagcctaccaagcggaaacgaaaagggtcctctgcagtgggctctgacagtgactgaggccctgcattccccatcccacccccggctggactgccctctccttcttggtgattcaaaggttaatagaggctgaggagattgcaggggaaacacccttgctgcatccccaagctcccccggtggaaggaggagctttctcctctggctgagtttgagaagctgccatgcagcccctagccccttccctcctcctggggcctccagcccctcacactgctgttcccagtgatatttgggatctgactgaagccagaggctctgtaaaatcagaccatagtggaagtcctcagccccctggccccttccgcaatctcctcccccagtctcccaaagagccatttcaacagagaagggaaatgacaaaggggcagctggccagataagctaggatgagagcagagactcagtgtgtgggtgtcccttcctgcttccccttcaggtcttggtttgttctgaagggacgttttatagtcactatccacatgccagtgtgaaatgggcatctatgacgtggtcagggtgtccattcctaatcatggggcagatgccacaagcattcagaaaggagtctgaaagggtggccacagccccacgtggtgtgccctggaggcttaggttggtctgaggttggcacctcaatctacaccagagcccagggagtcccagaggcaagtttcacagaattgtcaaatgatcccatttccttgagtctgtttttttttttgtttttttttgttttttttttggcagagataatcgtgtcttaaaagttgtttttaaatgacaataaaacaagccagaatgtc

SEQ ID NO: 51432 - DNA, 3660 bp, Homo sapiens
  misc_feature (6)..(6): n is a, c, g, or t
gaattnccggggcgcgccccacgcgcgcggaaaaattcagaaccttccctttccttctttctggaggcaaagggtgaaactttaaagcctgacagaacagaaggcagtttatctcagcagtgaagggatggcagtaatgggatggcagtcagggtggaccagcagaatgggtgaagagatgtattggattggctgacttgctaatcggagctattctttttttccccttttgaaatcaggtggagatgttacagccaaaaatatctggttggcagaaagtgttctggatatcctgacagagcaaagggagtgggtcctgaagagcagcatcctcattgccatggctgtttacacgtacctccgcctcatcgtggaccaccatgggactgcccagctccaggccctgcgacagaaggaagtagacttctgcatctcactgcttcgggaacggttcatggaatgtctgatgattggtcgggatctcgtaagactacttcagaatgttgctaggataccagaatttgaactgctttggaaagatattatccataatcctcaggccttgagtcctcagttcacaggtatcctacagcttcttcagtcaagaacatcccgaaaattcctagcatgtcgtctaaccccggacatggagactaaactcctcttcatgacatcccgggtgcgatttggtcaacaaaagcgataccaagattggttccagcgccagtacctgtcaactccagatagtcagtctctgcgctgtgacctcattcgctacatctgtggggtagtccacccttctaatgaagtactgagttcagatatcttgccccggtgggccatcattggttggctcctgacaacgtgcacgtcaaatgtcgctgcctccaatgccaagctggctttgttttatgactggctgttctttagtccagacaaggatagcattatgaacatagaaccagccatcctggtcatgcaccactccatgaagccccacccagccatcactgccacactcctggacttcatgtgccgcatcattcccaacttctatccaccattggagggccacgtgcggcagggtgtcttttcctccctcaaccacattgtggagaaacgggtcttggcacacctagctcccctgtttgacaaccctaagttggataaggagctgcgggcaatgctgagagagaagtttcctgagttctgcagctcaccctccccacctgtggaagtcaaaattgaggagccagtttccatggagatggacaaccatatgtcggataaggatgagagttgctatgacaatgcagaggcagccttcagtgacgatgaagaggatctcaacagcaaaggaaagaagagggagtttcgcttccaccctatcaaggagacagttgtggaggagccagttgatatcaccccttaccttgaccagttggatgagtccctgagggacaaagtactccagctacagaaggggagtgatacggaggcccagtgtgaggtcatgcaggaaattgtggaccaggtcctggaggaagactttgactcggagcagctgtctgtccttgcttcctgcctacaggagctcttcaaggcccactttcgaggggaggtcctgcctgaggagattactgaggagtccctggaggagtctgtaggaaagcctctgtacctaatatttaggaacctatgtcagatgcaggaagacaacagcagcttctctctacttctagaccttctctccgagctatatcagaagcagcccaagattggctaccacctgctctactacctgagggccagcaaagccgccgcagggaagatgaacctgtacgagtcatttgcccaggctacccagctgggcgatctgcacacctgcctgatgatggacatgaaggcctgccaggaggacgatgtgcggctcctgtgccacctcacgccctccatctacacagagtttccagatgaaaccttgaggagcggagagctgctgaacatgatcgtggctgttattgactctgcacagctccaggagctggtctgccacgtgatgatgggtaacctggttatgtttcgaaaagactcagttctcaacatactcattcagagcctagactgggagacctttgagcagtattgtgcctggcagctctttctggcccacaatattcccctggagaccataatccccatcctgcagcacctcaaatacaaggagcacccagaggccctgtcctgcctactgcttcaactccgaagagaaaagcccagcgaggagatggtgaagatggtgctgagccggccctgccatcctgacgaccagttcaccaccagcatcctgcggcactggtgcatgaaacatgacgagctgctggccgagcacatcaagtccctgctcatcaagaacaacagcctgcctcgcaagagacagagcctgaggagctctagcagcaagctggcccagctgactctggagcagatcctggagcacttggacaatctgcggctcaacctgaccaacaccaagcagaacttttttagccagacgccaattctccaggcgctgcagcatgtccaagcgagctgtgacgaagcccacaagatgaaattcagtgatctcttctccctggcggaggaatatgaggactcttccaccaagccacccaagagccggcgaaaagcagctctgtccagccctcgaagtcgaaagaatgccacacagccccccaatgccgaagaagagtcgggctccagcagtgcttcagaagaggaagacacgaaaccgaagcctaccaagcggaaacgaaaagggtcctctgcagtgggctctgacagtgactgaggccctgcattccccatcccacccccggctggactgccctctccttcttggtgattcaaaggttaatagaggctgaggagattgcaggggaaacacccttgctgcatccccaagctcccccggtggaaggaggagctttctcctctggctgagtttgagaagctgccatgcagcccctagccccttccctcctcctggggcctccagcccctcacactgctgttcccagtgatatttgggatctgactgaagccagaggctctgtaaaatcagaccatagtggaagtcctcagccccctggccccttccgcaatctcctcccccagtctcccaaagagccatttcaacagagaagggaaatgacaaaggggcagctggccagataagctaggatgagagcagagactcagtgtgtgggtgtcccttcctgcttccccttcaggtcttggtttgttctgaagggacgttttatagtcactatccacatgccagtgtgaaatgggcatctatgacgtggtcagggtgtccattcctaatcatggggcagatgccacaagcattcagaaaggagtctgaaagggtggccacagccccacgtggtgtgccctggaggcttaggttggtctgaggttggcacctcaatctacaccagagcccagggagtcccagaggcaagtttcacagaattgtcaaatgatcccatttccttgagtctgtttttttttttgtttttttttgttttttttttggcagagataatcgtgtcttaaaagttgtttttaaatgacaataaaacaagccagaatgtc

SEQ ID NO: 51433 - DNA, 3450 bp, Homo sapiens
tggtgttatttaagtttaagggattagagggcaaggggtccactgtgggtggggtgaggaccttatcctcagcttgctggctgatcacaaactttacttctcacagtgttaccgggacttagctctggtgagtcgtgatggcatgaatattgtcctcatcgtggaccaccatgggactgcccagctccaggccctgcgacagaaggaagtagacttctgcatctcactgcttcgggaacggttcatggaatgtctgatgattggtcgggatctcgtaagactacttcagaatgttgctaggataccagaatttgaactgctttggaaagatattatccataatcctcaggccttgagtcctcagttcacaggtatcctacagcttcttcagtcaagaacatcccgaaaattcctagcatgtcgtctaaccccggacatggagactaaactcctcttcatgacatcccgggtgcgatttggtcaacaaaagcgataccaagattggttccagcgccagtacctgtcaactccagatagtcagtctctgcgctgtgacctcattcgctacatctgtggggtagtccacccttctaatgaagtactgagttcagatatcttgccccggtgggccatcattggttggctcctgacaacgtgcacgtcaaatgtcgctgcctccaatgccaagctggctttgttttatgactggctgttctttagtccagacaaggatagcattatgaacatagaaccagccatcctggtcatgcaccactccatgaagccccacccagccatcactgccacactcctggacttcatgtgccgcatcattcccaacttctatccaccattggagggccacgtgcggcagggtgtcttttcctccctcaaccacattgtggagaaacgggtcttggcacacctagctcccctgtttgacaaccctaagttggataaggagctgcgggcaatgctgagagagaagtttcctgagttctgcagctcaccctccccacctgtggaagtcaaaattgaggagccagtttccatggagatggacaaccatatgtcggataaggatgagagttgctatgacaatgcagaggcagccttcagtgacgatgaagaggatctcaacagcaaaggaaagaagagggagtttcgcttccaccctatcaaggagacagttgtggaggagccagttgatatcaccccttaccttgaccagttggatgagtccctgagggacaaagtactccagctacagaaggggagtgatacggaggcccagtgtgaggtcatgcaggaaattgtggaccaggtcctggaggaagactttgactcggagcagctgtctgtccttgcttcctgcctacaggagctcttcaaggcccactttcgaggggaggtcctgcctgaggagattactgaggagtccctggaggagtctgtaggaaagcctctgtacctaatatttaggaacctatgtcagatgcaggaagacaacagcagcttctctctacttctagaccttctctccgagctatatcagaagcagcccaagattggctaccacctgctctactacctgagggccagcaaagccgccgcagggaagatgaacctgtacgagtcatttgcccaggctacccagctgggcgatctgcacacctgcctgatgatggacatgaaggcctgccaggaggacgatgtgcggctcctgtgccacctcacgccctccatctacacagagtttccagatgaaaccttgaggagcggagagctgctgaacatgatcgtggctgttattgactctgcacagctccaggagctggtctgccacgtgatgatgggtaacctggttatgtttcgaaaagactcagttctcaacatactcattcagagcctagactgggagacctttgagcagtattgtgcctggcagctctttctggcccacaatattcccctggagaccataatccccatcctgcagcacctcaaatacaaggagcacccagaggccctgtcctgcctactgcttcaactccgaagagaaaagcccagcgaggagatggtgaagatggtgctgagccggccctgccatcctgacgaccagttcaccaccagcatcctgcggcactggtgcatgaaacatgacgagctgctggccgagcacatcaagtccctgctcatcaagaacaacagcctgcctcgcaagagacagagcctgaggagctctagcagcaagctggcccagctgactctggagcagatcctggagcacttggacaatctgcggctcaacctgaccaacaccaagcagaacttttttagccagacgccaattctccaggcgctgcagcatgtccaagcgagctgtgacgaagcccacaagatgaaattcagtgatctcttctccctggcggaggaatatgaggactcttccaccaagccacccaagagccggcgaaaagcagctctgtccagccctcgaagtcgaaagaatgccacacagccccccaatgccgaagaagagtcgggctccagcagtgcttcagaagaggaagacacgaaaccgaagcctaccaagcggaaacgaaaagggtcctctgcagtgggctctgacagtgactgaggccctgcattccccatcccacccccggctggactgccctctccttcttggtgattcaaaggttaatagaggctgaggagattgcaggggaaacacccttgctgcatccccaagctcccccggtggaaggaggagctttctcctctggctgagtttgagaagctgccatgcagcccctagccccttccctcctcctggggcctccagcccctcacactgctgttcccagtgatatttgggatctgactgaagccagaggctctgtaaaatcagaccatagtggaagtcctcagccccctggccccttccgcaatctcctcccccagtctcccaaagagccatttcaacagagaagggaaatgacaaaggggcagctggccagataagctaggatgagagcagagactcagtgtgtgggtgtcccttcctgcttccccttcaggtcttggtttgttctgaagggacgttttatagtcactatccacatgccagtgtgaaatgggcatctatgacgtggtcagggtgtccattcctaatcatggggcagatgccacaagcattcagaaaggagtctgaaagggtggccacagccccacgtggtgtgccctggaggcttaggttggtctgaggttggcacctcaatctacaccagagcccagggagtcccagaggcaagtttcacagaattgtcaaatgatcccatttccttgagtctgtttttttttttgtttttttttgttttttttttggcagagataatcgtgtcttaaaagttgtttttaaatgacaataaaacaagccagaatgtc

SEQ ID NO: 51434 - DNA, 4306 bp, Homo sapiens
atattcaagcggctactcccaagattgcatgtgtttgtttaaaagtgacctgctactacctcaccattagcccactgggacttgcttcctctttaaaattttatgtaacactgatgctcctgttttgatgtgtatgaaccttaatctatgtgatatgtgactttgtgaacattgaattttttaattgagacctggggcaaggcatagttgtagctatttttatcctctttcctggcacttcttccctgtttggcacttccagcccctgcttcttatcccaagactggtatggcattgctgtgtgttaattctgccccacaaagtttcatagcaagcactaaagactgttacctggaaataagaaactcttggcctgttgggggcctcagtgcaggactcaggacatccagttgctagactgcagctgttgtcagccacctgtacttctcaggctctatctgagatatcatcctttctttccaactgtgggcttcttatatctacttctcagacgttcattttcaagggccaaaatgttcccactccaactcacaatctgtgggaaagtagcagctctggtttctagaaaaattcagaaccttccctttccttctttctggaggcaaagggtgaaactttaaagcctgacagaacagaaggcagtttatctcagcagtgaagggatggcagtaatgggatggcagtcagggtggaccagcagaatgggtgaagagatgtattggattggctgacttgctaatcggagctattctttttttccccttttgaaatcaggtggagatgttacagccaaaaatatctggttggcagaaagtgttctggatatcctgacagagcaaagggagtgggtcctgaagagcagcatcctcattgccatggctgtttacacgtacctccgcctcatcgtggaccaccatgggactgcccagctccaggccctgcgacagaaggaagtagacttctgcatctcactgcttcgggaacggttcatggaatgtctgatgattggtcgggatctcgtaagactacttcagaatgttgctaggataccagaatttgaactgctttggaaagatattatccataatcctcaggccttgagtcctcagttcacaggtatcctacagcttcttcagtcaagaacatcccgaaaattcctagcatgtcgtctaaccccggacatggagactaaactcctcttcatgacatcccgggtgcgatttggtcaacaaaagcgataccaagattggttccagcgccagtacctgtcaactccagatagtcagtctctgcgctgtgacctcattcgctacatctgtggggtagtccacccttctaatgaagtactgagttcagatatcttgccccggtgggccatcattggttggctcctgacaacgtgcacgtcaaatgtcgctgcctccaatgccaagctggctttgttttatgactggctgttctttagtccagacaaggatagcattatgaacatagaaccagccatcctggtcatgcaccactccatgaagccccacccagccatcactgccacactcctggacttcatgtgccgcatcattcccaacttctatccaccattggagggccacgtgcggcagggtgtcttttcctccctcaaccacattgtggagaaacgggtcttggcgtgtaaaaagtattggctctacctcagactgctgggcatatgtcttcttggctcttagaggaatttctctcctgccatcgtattacaaagacacctagctcccctgtttgacaaccctaagttggataaggagctgcgggcaatgctgagagagaagtttcctgagttctgcagctcaccctccccacctgtggaagtcaaaattgaggagccagtttccatggagatggacaaccatatgtcggataaggatgagagttgctatgacaatgcagaggcagccttcagtgacgatgaagaggatctcaacagcaaaggaaagaagagggagtttcgcttccaccctatcaaggagacagttgtggaggagccagttgatatcaccccttaccttgaccagttggatgagtccctgagggacaaagtactccagctacagaaggggagtgatacggaggcccagtgtgaggtcatgcaggaaattgtggaccaggtcctggaggaagactttgactcggagcagctgtctgtccttgcttcctgcctacaggagctcttcaaggcccactttcgaggggaggtcctgcctgaggagattactgaggagtccctggaggagtctgtaggaaagcctctgtacctaatatttaggaacctatgtcagatgcaggaagacaacagcagcttctctctacttctagaccttctctccgagctatatcagaagcagcccaagattggctaccacctgctctactacctgagggccagcaaagccgccgcagggaagatgaacctgtacgagtcatttgcccaggctacccagctgggcgatctgcacacctgcctgatgatggacatgaaggcctgccaggaggacgatgtgcggctcctgtgccacctcacgccctccatctacacagagtttccagatgaaaccttgaggagcggagagctgctgaacatgatcgtggctgttattgactctgcacagctccaggagctggtctgccacgtgatgatgggtaacctggttatgtttcgaaaagactcagttctcaacatactcattcagagcctagactgggagacctttgagcagtattgtgcctggcagctctttctggcccacaatattcccctggagaccataatccccatcctgcagcacctcaaatacaaggagcacccagaggccctgtcctgcctactgcttcaactccgaagagaaaagcccagcgaggagatggtgaagatggtgctgagccggccctgccatcctgacgaccagttcaccaccagcatcctgcggcactggtgcatgaaacatgacgagctgctggccgagcacatcaagtccctgctcatcaagaacaacagcctgcctcgcaagagacagagcctgaggagctctagcagcaagctggcccagctgactctggagcagatcctggagcacttggacaatctgcggctcaacctgaccaacaccaagcagaacttttttagccagacgccaattctccaggcgctgcagcatgtccaagcgagctgtgacgaagcccacaagatgaaattcagtgatctcttctccctggcggaggaatatgaggactcttccaccaagccacccaagagccggcgaaaagcagctctgtccagccctcgaagtcgaaagaatgccacacagccccccaatgccgaagaagagtcgggctccagcagtgcttcagaagaggaagacacgaaaccgaagcctaccaagcggaaacgaaaagggtcctctgcagtgggctctgacagtgactgaggccctgcattccccatcccacccccggctggactgccctctccttcttggtgattcaaaggttaatagaggctgaggagattgcaggggaaacacccttgctgcatccccaagctcccccggtggaaggaggagctttctcctctggctgagtttgagaagctgccatgcagcccctagccccttccctcctcctggggcctccagcccctcacactgctgttcccagtgatatttgggatctgactgaagccagaggctctgtaaaatcagaccatagtggaagtcctcagccccctggccccttccgcaatctcctcccccagtctcccaaagagccatttcaacagagaagggaaatgacaaaggggcagctggccagataagctaggatgagagcagagactcagtgtgtgggtgtcccttcctgcttccccttcaggtcttggtttgttctgaagggacgttttatagtcactatccacatgccagtgtgaaatgggcatctatgacgtggtcagggtgtccattcctaatcatggggcagatgccacaagcattcagaaaggagtctgaaagggtggccacagccccacgtggtgtgccctggaggcttaggttggtctgaggttggcacctcaatctacaccagagcccagggagtcccagaggcaagtttcacagaattgtcaaatgatcccatttccttgagtctgtttttttttttgtttttttttgttttttttttggcagagataatcgtgtcttaaaagttgtttttaaatgacaataaaacaagccagaatgtc

SEQ ID NO: 51435 - DNA, 2552 bp, Homo sapiens
gtgacactctgtctcaaaaaaaaataaaaataagagaagctctgatattgaccttcatcatgttccccatttagacacctagctcccctgtttgacaaccctaagttggataaggagctgcgggcaatgctgagagagaagtttcctgagttctgcagctcaccctccccacctgtggaagaggatgagagttgctatgacaatgcagaggcagccttcagtgacgatgaagaggatctcaacagcaaaggaaagaagagggagtttcgcttccaccctatcaaggagacagttgtggaggagccagttgatatcaccccttaccttgaccagttggatgagtccctgagggacaaagtactccagctacagaaggggagtgatacggaggcccagtgtgaggtcatgcaggaaattgtggaccaggtcctggaggaagactttgactcggagcagctgtctgtccttgcttcctgcctacaggagctcttcaaggcccactttcgaggggaggtcctgcctgaggagattactgaggagtccctggaggagtctgtaggaaagcctctgtacctaatatttaggaacctatgtcagatgcaggaagacaacagcagcttctctctacttctagaccttctctccgagctatatcagaagcagcccaagattggctaccacctgctctactacctgagggccagcaaagccgccgcagggaagatgaacctgtacgagtcatttgcccaggctacccagctgggcgatctgcacacctgcctgatgatggacatgaaggcctgccaggaggacgatgtgcggctcctgtgccacctcacgccctccatctacacagagtttccagatgaaaccttgaggagcggagagctgctgaacatgatcgtggctgttattgactctgcacagctccaggagctggtctgccacgtgatgatgggtaacctggttatgtttcgaaaagactcagttctcaacatactcattcagagcctagactgggagacctttgagcagtattgtgcctggcagctctttctggcccacaatattcccctggagaccataatccccatcctgcagcacctcaaatacaaggagcacccagaggccctgtcctgcctactgcttcaactccgaagagaaaagcccagcgaggagatggtgaagatggtgctgagccggccctgccatcctgacgaccagttcaccaccagcatcctgcggcactggtgcatgaaacatgacgagctgctggccgagcacatcaagtccctgctcatcaagaacaacagcctgcctcgcaagagacagagcctgaggagctctagcagcaagctggcccagctgactctggagcagatcctggagcacttggacaatctgcggctcaacctgaccaacaccaagcagaacttttttagccagacgccaattctccaggcgctgcagcatgtccaagcgagctgtgacgaagcccacaagatgaaattcagtgatctcttctccctggcggaggaatatgaggactcttccaccaagccacccaagagccggcgaaaagcagctctgtccagccctcgaagtcgaaagaatgccacacagccccccaatgccgaagaagagtcgggctccagcagtgcttcagaagaggaagacacgaaaccgaagcctaccaagcggaaacgaaaagggtcctctgcagtgggctctgacagtgactgaggccctgcattccccatcccacccccggctggactgccctctccttcttggtgattcaaaggttaatagaggctgaggagattgcaggggaaacacccttgctgcatccccaagctcccccggtggaaggaggagctttctcctctggctgagtttgagaagctgccatgcagcccctagccccttccctcctcctggggcctccagcccctcacactgctgttcccagtgatatttgggatctgactgaagccagaggctctgtaaaatcagaccatagtggaagtcctcagccccctggccccttccgcaatctcctcccccagtctcccaaagagccatttcaacagagaagggaaatgacaaaggggcagctggccagataagctaggatgagagcagagactcagtgtgtgggtgtcccttcctgcttccccttcaggtcttggtttgttctgaagggacgttttatagtcactatccacatgccagtgtgaaatgggcatctatgacgtggtcagggtgtccattcctaatcatggggcagatgccacaagcattcagaaaggagtctgaaagggtggccacagccccacgtggtgtgccctggaggcttaggttggtctgaggttggcacctcaatctacaccagagcccagggagtcccagaggcaagtttcacagaattgtcaaatgatcccatttccttgagtctgtttttttttttgtttttttttgttttttttttggcagagataatcgtgtcttaaaagttgtttttaaatgacaataaaacaagccagaatgtc

SEQ ID NO: 51436 - DNA, 4976 bp, Homo sapiens
atattcaagcggctactcccaagattgcatgtgtttgtttaaaagtgacctgctactacctcaccattagcccactgggacttgcttcctctttaaaattttatgtaacactgatgctcctgttttgatgtgtatgaaccttaatctatgtgatatgtgactttgtgaacattgaattttttaattgagacctggggcaaggcatagttgtagctatttttatcctctttcctggcacttcttccctgtttggcacttccagcccctgcttcttatcccaagactggtatggcattgctgtgtgttaattctgccccacaaagtttcatagcaagcactaaagactgttacctggaaataagaaactcttggcctgttgggggcctcagtgcaggactcaggacatccagttgctagactgcagctgttgtcagccacctgtacttctcaggctctatctgagatatcatcctttctttccaactgtgggcttcttatatctacttctcagacgttcattttcaagggccaaaatgttcccactccaactcacaatctgtgggaaagtagcagctctggtttctagaaaaattcagaaccttccctttccttctttctggaggcaaagggtgaaactttaaagcctgacagaacagaaggcagtttatctcagcagtgaagggatggcagtaatgggatggcagtcagggtggaccagcagaatgggtgaagagatgtattggattggctgacttgctaatcggagctattctttttttccccttttgaaatcaggtggagatgttacagccaaaaatatctggttggcagaaagtgttctggatatcctgacagagcaaagggagtgggtcctgaagagcagcatcctcattgccatggctgtttacacgtacctccgcctcatcgtggaccaccatgggactgcccagctccaggccctgcgacagaaggaagtagacttctgcatctcactgcttcgggaacggttcatggaatgtctgatgattggtcgggatctcgtaagactacttcagaatgttgctaggataccagaatttgaactgctttggaaagatattatccataatcctcaggccttgagtcctcagttcacaggtatcctacagcttcttcagtcaagaacatcccgaaaattcctagcatgtcgtctaaccccggacatggagactaaactcctcttcatgacatcccgggtgcgatttggtcaacaaaagcgataccaagattggttccagcgccagtacctgtcaactccagatagtcagtctctgcgctgtgacctcattcgctacatctgtggggtagtccacccttctaatgaagtactgagttcagatatcttgccccggtgggccatcattggttggctcctgacaacgtgcacgtcaaatgtcgctgcctccaatgccaagctggctttgttttatgactggctgttctttagtccagacaaggatagcattatgaacatagaaccagccatcctggtcatgcaccactccatgaagccccacccagccatcactgccacactcctggacttcatgtgccgcatcattcccaacttctatccaccattggagggccacgtgcggcagggtgtcttttcctccctcaaccacattgtggagaaacgggtcttggcgtgtaaaaagtattggctctacctcagactgctgggcatatgtcttcttggctcttagaggaatttctctcctgccatcgtattacaaagacacctagctcccctgtttgacaaccctaagttggataaggagctgcgggcaatgctgagagagaagtttcctgagttctgcagctcaccctccccacctgtggaagtcaaaattgaggagccagtttccatggagatggacaaccatatgtcggataaggatgagagttgctatgacaatgcagaggcagccttcagtgacgatgaagaggatctcaacagcaaaggaaagaagagggagtttcgcttccaccctatcaaggagacagttgtggaggagccagttgatatcaccccttaccttgaccagttggatgagtccctgagggacaaagtactccagctacagaaggggagtgatacggaggcccagtgtgaggtcatgcaggaaattgtggaccaggtcctggaggaagactttgactcggagcagctgtctgtccttgcttcctgcctacaggagctcttcaaggcccactttcgaggggaggtcctgcctgaggagattactgaggagtccctggaggagtctgtaggaaagcctctgtacctaatatttaggaacctatgtcagatgcaggaagacaacagcagcttctctctacttctagaccttctctccgagctatatcagaagcagcccaagattggctaccacctgctctactacctgagggccagcaaagccgccgcagggaagatgaacctgtacgagtcatttgcccaggctacccagctgggcgatctgcacacctgcctgatgatggacatgaaggcctgccaggaggacgatgtgcggctcctgtgccacctcacgccctccatctacacagagtttccagatgaaaccttgaggagcggagagctgctgaacatgatcgtggctgttattgactctgcacagctccaggagctggtctgccacgtgatgatgggtaacctggttatgtttcgaaaagactcagttctcaacatactcattcagagcctagactgggagacctttgagcagtattgtgcctggcagctctttctggcccacaatattcccctggagaccataatccccatcctgcagcacctcaaatacaaggagcacccagaggccctgtcctgcctactgcttcaactccgaagagaaaagcccagcgaggagatggtgaagatggtgctgagccggccctgccatcctgacgaccagttcaccaccagcatcctgcggcactggtgcatgaaacatgacgagctgctggccgagcacatcaagtccctgctcatcaagaacaacagcctgcctcgcaagagacagagcctgaggagctctagcagcaagctggcccagctgactctggagcagatcctggagcacttggacaatctgcggctcaacctgaccaacaccaagcagaacttttttagccagacgccaattctccaggcgctgcagcatgtccaagcgagctgtgacgaagcccacaagatgaaattcagtgatctcttctccctggcggaggaatatgaggactcttccaccaagccacccaagagccggcgaaaagcagctctgtccagccctcgaagtcgaaagaatgccacacagccccccaatgccgaagaagagtcgggctccagcagtgcttcagaagaggaagacacgaaaccgaagcctaccaagcggaaacgaaaagggtcctctgcagtgggctctgacagtgactgaggccctgcattccccatcccacccccggctggactgccctctccttcttggtgattcaaaggttaatagaggctgaggagattgcaggggaaacacccttgctgcatccccaagctcccccggtggaaggaggagctttctcctctggctgagtttgagaagctgccatgcagcccctagccccttccctcctcctggggcctccagcccctcacactgctgttcccagtgatatttgggatctgactgaagccagaggctctgtaaaatcagaccatagtggaagtcctcagccccctggccccttccgcaatctcctcccccagtctcccaaagagccatttcaacagagaagggaaatgacaaaggggcagctggccagataagctaggatgagagcagagactcagtgtgtgggtgtcccttcctgcttccccttcaggtcttggtttgttctgaagggacgttttatagtcactatccacatgccagtgtgaaatgggcatctatgacgtggtcagggtgtccattcctaatcatggggcagatgccacaagcattcagaaaggagtctgaaagggtggccacagccccacgtggtgtgccctggaggcttaggttggtctgaggttggcacctcaatctacaccagagcccagggagtcccagaggcaagtttcacagaattgtcaaatgatcccatttccttgagtctgtttttttttttgtttttttttgttttttttttggcagagataatcgtgtcttaaaagttgtttttaaatgacaataaaacaagccagaatgtcaaaaaaaaaaaaaaaaaaaaaaaaaaaaacaacaaaaaaaaataaacaaaaaacaaaaaaaaaaaaaaaaaaaaacaaaaaaaaaaacaacaaaaacaaaacaaaaaaaaaaaaacaaaaaaagaagggagcggggcgcggcgcgagaggagaagcatccacacaacgaggcgcgagggagcgaacgacgagaacaaaagacgaagcatagttagaagaggaagaggcgcggcgccgcaaacataggggagggaacgatagcgaagagaggcgagggaggagcgggagggtagaaagaaaacgaacgcacgaagggagagacgagagaaagaaaaaggaagtatgagctgagagaaggacagataatagggataagggaagggcagaaactaacacatgagtgtgagggaggaagaagaaacatcaggaggggcagcgagaaagatcacagacgtacagcgaaaggaggtaagagagggcgggagtagggagaaaagaataagagaaggaagtaaggaggagggatatgagagagagtgggagagcaacaagcaaaagagagatagtttatatgatgcggagaggtaggaggaaaagacggtagagggagacgagagcagtaggtgataatataagcaagaagacaaataatcatatacaaaggggaggg

SEQ ID NO: 51437 - DNA, 4978 bp, Homo sapiens
atattcaagcggctactcccaagattgcatgtgtttgtttaaaagtgacctgctactacctcaccattagcccactgggacttgcttcctctttaaaattttatgtaacactgatgctcctgttttgatgtgtatgaaccttaatctatgtgatatgtgactttgtgaacattgaattttttaattgagacctggggcaaggcatagttgtagctatttttatcctctttcctggcacttcttccctgtttggcacttccagcccctgcttcttatcccaagactggtatggcattgctgtgtgttaattctgccccacaaagtttcatagcaagcactaaagactgttacctggaaataagaaactcttggcctgttgggggcctcagtgcaggactcaggacatccagttgctagactgcagctgttgtcagccacctgtacttctcaggctctatctgagatatcatcctttctttccaactgtgggcttcttatatctacttctcagacgttcattttcaagggccaaaatgttcccactccaactcacaatctgtgggaaagtagcagctctggtttctagaaaaattcagaaccttccctttccttctttctggaggcaaagggtgaaactttaaagcctgacagaacagaaggcagtttatctcagcagtgaagggatggcagtaatgggatggcagtcagggtggaccagcagaatgggtgaagagatgtattggattggctgacttgctaatcggagctattctttttttccccttttgaaatcaggtggagatgttacagccaaaaatatctggttggcagaaagtgttctggatatcctgacagagcaaagggagtgggtcctgaagagcagcatcctcattgccatggctgtttacacgtacctccgcctcatcgtggaccaccatgggactgcccagctccaggccctgcgacagaaggaagtagacttctgcatctcactgcttcgggaacggttcatggaatgtctgatgattggtcgggatctcgtaagactacttcagaatgttgctaggataccagaatttgaactgctttggaaagatattatccataatcctcaggccttgagtcctcagttcacaggtatcctacagcttcttcagtcaagaacatcccgaaaattcctagcatgtcgtctaaccccggacatggagactaaactcctcttcatgacatcccgggtgcgatttggtcaacaaaagcgataccaagattggttccagcgccagtacctgtcaactccagatagtcagtctctgcgctgtgacctcattcgctacatctgtggggtagtccacccttctaatgaagtactgagttcagatatcttgccccggtgggccatcattggttggctcctgacaacgtgcacgtcaaatgtcgctgcctccaatgccaagctggctttgttttatgactggctgttctttagtccagacaaggatagcattatgaacatagaaccagccatcctggtcatgcaccactccatgaagccccacccagccatcactgccacactcctggacttcatgtgccgcatcattcccaacttctatccaccattggagggccacgtgcggcagggtgtcttttcctccctcaaccacattgtggagaaacgggtcttggcacacctagctcccctgtttgacaaccctaagttggataaggagctgcgggcaatgctgagagagaagtttcctgagttctgcagctcaccctccccacctgtggaagtcaaaattgaggagccagtttccatggagatggacaaccatatgtcggataaggatgagagttgctatgacaatgcagaggcagccttcagtgacgatgaagaggatctcaacagcaaaggaaagaagagggagtttcgcttccaccctatcaaggagacagttgtggaggagccagttgatatcaccccttaccttgaccagttggatgagtccctgagggacaaagtactccagctacagaaggggagtgatacggaggcccagtgtgaggtcatgcaggaaattgtggaccaggtcctggaggaagactttgactcggagcagctgtctgtccttgcttcctgcctacaggagctcttcaaggcccactttcgaggggaggtcctgcctgaggagattactgaggagtccctggaggagtctgtaggaaagcctctgtacctaatatttaggaacctatgtcagatgcaggaagacaacagcagcttctctctacttctagaccttctctccgagctatatcagaagcagcccaagattggctaccacctgctctactacctgagggccagcaaagccgccgcagggaagatgaacctgtacgagtcatttgcccaggctacccagctgggcgatctgcacacctgcctgatgatggacatgaaggcctgccaggaggacgatgtgcggctcctgtgccacctcacgccctccatctacacagagtttccagatgaaaccttgaggagcggagagctgctgaacatgatcgtggctgttattgactctgcacagctccaggagctggtctgccacgtgatgatgggtaacctggttatgtttcgaaaagactcagttctcaacatactcattcagagcctagactgggagacctttgagcagtattgtgcctggcagctctttctggcccacaatattcccctggagaccataatccccatcctgcagcacctcaaatacaaggagcacccagaggccctgtcctgcctactgcttcaactccgaagagaaaagcccagcgaggagatggtgaagatggtgctgagccggccctgccatcctgacgaccagttcaccaccagcatcctgcggcactggtgcatgaaacatgacgagctgctggccgagcacatcaagtccctgctcatcaagaacaacagcctgcctcgcaagagacagagcctgaggagctctagcagcaagctggcccagctgactctggagcagatcctggagcacttggacaatctgcggctcaacctgaccaacaccaagcagaacttttttagccagacgccaattctccaggcgctgcagcatgtccaagcgagctgtgacgaagcccacaagatgaaattcagtgatctcttctccctggcggaggaatatgaggactcttccaccaagccacccaagagccggcgaaaagcagctctgtccagccctcgaagtcgaaagaatgccacacagccccccaatgccgaagaagagtcgggctccagcagtgcttcagaagaggaagacacgaaaccgaagcctaccaagcggaaacgaaaagggtcctctgcagtgggctctgacagtgactgaggccctgcattccccatcccacccccggctggactgccctctccttcttggtgattcaaaggttaatagaggctgaggagattgcaggggaaacacccttgctgcatccccaagctcccccggtggaaggaggagctttctcctctggctgagtttgagaagctgccatgcagcccctagccccttccctcctcctggggcctccagcccctcacactgctgttcccagtgatatttgggatctgactgaagccagaggctctgtaaaatcagaccatagtggaagtcctcagccccctggccccttccgcaatctcctcccccagtctcccaaagagccatttcaacagagaagggaaatgacaaaggggcagctggccagataagctaggatgagagcagagactcagtgtgtgggtgtcccttcctgcttccccttcaggtcttggtttgttctgaagggacgttttatagtcactatccacatgccagtgtgaaatgggcatctatgacgtggtcagggtgtccattcctaatcatggggcagatgccacaagcattcagaaaggagtctgaaagggtggccacagccccacgtggtgtgccctggaggcttaggttggtctgaggttggcacctcaatctacaccagagcccagggagtcccagaggcaagtttcacagaattgtcaaatgatcccatttccttgagtctgtttttttttttgtttttttttgttttttttttggcagagataatcgtgtcttaaaagttgtttttaaatgacaataaaacaagccagaatgtcttttgtgctggagtgtctgctggcatttgccccgtgcatgtatagcttggtcttgatttgattggcacccctacttgtaaccgcagaacatccccctttcccttcctgttctgcccccacttttgtctagagcagaagggacttggctttggccactacccatccttcctgctgccactggaggtgggagccaggcactgatctgtctatgcagaaccatcccccgtaggatgaggcctgtccttactcatttctcaagaaacaagatgcttccaaaaggtctgtcatcctccagttgaagtctgtgtgcctaccaagaatggccggaggactccgctgcttgacgggagggatgctccagcttggtctccagggacaactgtacctggagataaagtctggataccagggagggacagagatgctcttccttccacagtgtggccacttgctgggccatgtgaaccagcagaggagagttccttggctatgctgttgttcccccgctgtccagggagaatggaggtggactgaggagtgaagtttgggcgaactgcacagagctgctcctcttcaccccgaaaatttgtctttttacagaatccaggttctcccctccctcatcactgctgttgcttcctttgaaagtctaaaccactggaggcttctttttccttcctctctccttccccagtttcctctgtcccaattaaaaccaggatggagagcaaaaaaaaaagaagacaacaacaaaaaaacagg

SEQ ID NO: 51438 - DNA, 4838 bp, Homo sapiens
atattcaagcggctactcccaagattgcatgtgtttgtttaaaagtgacctgctactacctcaccattagcccactgggacttgcttcctctttaaaattttatgtaacactgatgctcctgttttgatgtgtatgaaccttaatctatgtgatatgtgactttgtgaacattgaattttttaattgagacctggggcaaggcatagttgtagctatttttatcctctttcctggcacttcttccctgtttggcacttccagcccctgcttcttatcccaagactggtatggcattgctgtgtgttaattctgccccacaaagtttcatagcaagcactaaagactgttacctggaaataagaaactcttggcctgttgggggcctcagtgcaggactcaggacatccagttgctagactgcagctgttgtcagccacctgtacttctcaggctctatctgagatatcatcctttctttccaactgtgggcttcttatatctacttctcagacgttcattttcaagggccaaaatgttcccactccaactcacaatctgtgggaaagtagcagctctggtttctagaaaaattcagaaccttccctttccttctttctggaggcaaagggtgaaactttaaagcctgacagaacagaaggcagtttatctcagcagtgaagggatggcagtaatgggatggcagtcagggtggaccagcagaatgggtgaagagatgtattggattggctgacttgctaatcggagctattctttttttccccttttgaaatcaggtggagatgttacagccaaaaatatctggttggcagaaagtgttctggatatcctgacagagcaaagggagtgggtcctgaagagcagcatcctcattgccatggctgtttacacgtacctccgcctcatcgtggaccaccatgggactgcccagctccaggccctgcgacagaaggaagtagacttctgcatctcactgcttcgggaacggttcatggaatgtctgatgattggtcgggatctcgtaagactacttcagaatgttgctaggataccagaatttgaactgctttggaaagatattatccataatcctcaggccttgagtcctcagttcacaggtatcctacagcttcttcagtcaagaacatcccgaaaattcctagcatgtcgtctaaccccggacatggagactaaactcctcttcatgacatcccgggtgcgatttggtcaacaaaagcgataccaagattggttccagcgccagtacctgtcaactccagatagtcagtctctgcgctgtgacctcattcgctacatctgtggggtagtccacccttctaatgaagtactgagttcagatatcttgccccggtgggccatcattggttggctcctgacaacgtgcacgtcaaatgtcgctgcctccaatgccaagctggctttgttttatgactggctgttctttagtccagacaaggatagcattatgaacatagaaccagccatcctggtcatgcaccactccatgaagccccacccagccatcactgccacactcctggacttcatgtgccgcatcattcccaacttctatccaccattggagggccacgtgcggcagggtgtcttttcctccctcaaccacattgtggagaaacgggtcttggcacacctagctcccctgtttgacaaccctaagttggataaggagctgcgggcaatgctgagagagaagtttcctgagttctgcagctcaccctccccacctgtggaagtcaaaattgaggagccagtttccatggagatggacaaccatatgtcggataaggatgagagttgctatgacaatgcagaggcagccttcagtgacgatgaagaggatctcaacagcaaaggaaagaagagggagtttcgcttccaccctatcaaggagacagttgtggaggagccagttgatatcaccccttaccttgaccatgatacggaggcccagtgtgaggtcatgcaggaaattgtggaccaggtcctggaggaagactttgactcggagcagctgtctgtccttgcttcctgcctacaggagctcttcaaggcccactttcgaggggaggtcctgcctgaggagattactgaggagtccctggaggagtctgtaggaaagcctctgtacctaatatttaggaacctatgtcagatgcaggaagacaacagcagcttctctctacttctagaccttctctccgagctatatcagaagcagcccaagattggctaccacctgctctactacctgagggccagcaaagccgccgcagggaagatgaacctgtacgagtcatttgcccaggctacccagctgggcgatctgcacacctgcctgatgatggacatgaaggcctgccaggaggacgatgtgcggctcctgtgccacctcacgccctccatctacacagagtttccagatgaaaccttgaggagcggagagctgctgaacatgatcgtggctgttattgactctgcacagctccaggagctggtctgccacgtgatgatgggtaacctggttatgtttcgaaaagactcagttctcaacatactcattcagagcctagactgggagacctttgagcagtattgtgcctggcagctctttctggcccacaatattcccctggagaccataatccccatcctgcagcacctcaaatacaaggagcacccagaggccctgtcctgcctactgcttcaactccgaagagaaaagcccagcgaggagatggtgaagatggtgctgagccggccctgccatcctgacgaccagttcaccaccagcatcctgcggcactggtgcatgaaacatgacgagctgctggccgagcacatcaagtccctgctcatcaagaacaacagcctgcctcgcaagagacagagcctgaggagctctagcagcaagctggcccagctgactctggagcagatcctggagcacttggacaatctgcggctcaacctgaccaacaccaagcagaacttttttagccagacgccaattctccaggcgctgcagcatgtccaagcgagctgtgacgaagcccacaagatgaaattcagtgatctcttctccctggcggaggaatatgaggactcttccaccaagccacccaagagccggcgaaaagcagctctgtccagccctcgaagtcgaaagaatgccacacagccccccaatgccgaagaagagtcgggctccagcagtgcttcagaagaggaagacacgaaaccgaagcctaccaagcggaaacgaaaagggtcctctgcagtgggctctgacagtgactgaggccctgcattccccatcccacccccggctggactgccctctccttcttggtgattcaaaggttaatagaggctgaggagattgcaggggaaacacccttgctgcatccccaagctcccccggtggaaggaggagctttctcctctggctgagtttgagaagctgccatgcagcccctagccccttccctcctcctggggcctccagcccctcacactgctgttcccagtgatatttgggatctgactgaagccagaggctctgtaaaatcagaccatagtggaagtcctcagccccctggccccttccgcaatctcctcccccagtctcccaaagagccatttcaacagagaagggaaatgacaaaggggcagctggccagataagctaggatgagagcagagactcagtgtgtgggtgtcccttcctgcttccccttcaggtcttggtttgttctgaagggacgttttatagtcactatccacatgccagtgtgaaatgggcatctatgacgtggtcagggtgtccattcctaatcatggggcagatgccacaagcattcagaaaggagtctgaaagggtggccacagccccacgtggtgtgccctggaggcttaggttggtctgaggttggcacctcaatctacaccagagcccagggagtcccagaggcaagtttcacagaattgtcaaatgatcccatttccttgagtctgtttttttttttgtttttttttgttttttttttggcagagataatcgtgtcttaaaagttgtttttaaatgacaataaaacaagccagaatgtcaaaaaaaaaaaaaaaaaaaaaaaaaaaaacaacaaaaaaaaataaacaaaaaacaaaaaaaaaaaaaaaaaaaaacaaaaaaaaaaacaacaaaaacaaaacaaaaaaaaaaaaacaaaaaaagaagggagcggggcgcggcgcgagaggagaagcatccacacaacgaggcgcgagggagcgaacgacgagaacaaaagacgaagcatagttagaagaggaagaggcgcggcgccgcaaacataggggagggaacgatagcgaagagaggcgagggaggagcgggagggtagaaagaaaacgaacgcacgaagggagagacgagagaaagaaaaaggaagtatgagctgagagaaggacagataatagggataagggaagggcagaaactaacacatgagtgtgagggaggaagaagaaacatcaggaggggcagcgagaaagatcacagacgtacagcgaaaggaggtaagagagggcgggagtagggagaaaagaataagagaaggaagtaaggaggagggatatgagagagagtgggagagcaacaagcaaaagagagatagtttatatgatgcggagaggtaggaggaaaagacggtagagggagacgagagcagtaggtgataatataagcaagaagacaaataatcatatacaaaggggaggg

SEQ ID NO: 51439 - DNA, 5100 bp, Homo sapiens
atattcaagcggctactcccaagattgcatgtgtttgtttaaaagtgacctgctactacctcaccattagcccactgggacttgcttcctctttaaaattttatgtaacactgatgctcctgttttgatgtgtatgaaccttaatctatgtgatatgtgactttgtgaacattgaattttttaattgagacctggggcaaggcatagttgtagctatttttatcctctttcctggcacttcttccctgtttggcacttccagcccctgcttcttatcccaagactggtatggcattgctgtgtgttaattctgccccacaaagtttcatagcaagcactaaagactgttacctggaaataagaaactcttggcctgttgggggcctcagtgcaggactcaggacatccagttgctagactgcagctgttgtcagccacctgtacttctcaggctctatctgagatatcatcctttctttccaactgtgggcttcttatatctacttctcagacgttcattttcaagggccaaaatgttcccactccaactcacaatctgtgggaaagtagcagctctggtttctagaaaaattcagaaccttccctttccttctttctggaggcaaagggtgaaactttaaagcctgacagaacagaaggcagtttatctcagcagtgaagggatggcagtaatgggatggcagtcagggtggaccagcagaatgggtgaagagatgtattggattggctgacttgctaatcggagctattctttttttccccttttgaaatcaggtggagatgttacagccaaaaatatctggttggcagaaagtgttctggatatcctgacagagcaaagggagtgggtcctgaagagcagcatcctcattgccatggctgtttacacgtacctccgcctcatcgtggaccaccatgggactgcccagctccaggccctgcgacagaaggaagtagacttctgcatctcactgcttcgggaacggttcatggaatgtctgatgattggtcgggatctcgtaagactacttcagaatgttgctaggataccagaatttgaactgctttggaaagatattatccataatcctcaggccttgagtcctcagttcacaggtatcctacagcttcttcagtcaagaacatcccgaaaattcctagcatgtcgtctaaccccggacatggagactaaactcctcttcatgacatcccgggtgcgatttggtcaacaaaagcgataccaagattggttccagcgccagtacctgtcaactccagatagtcagtctctgcgctgtgacctcattcgctacatctgtggggtagtccacccttctaatgaagtactgagttcagatatcttgccccggtgggccatcattggttggctcctgacaacgtgcacgtcaaatgtcgctgcctccaatgccaagctggctttgttttatgactggctgttctttagtccagacaaggatagcattatgaacatagaaccagccatcctggtcatgcaccactccatgaagccccacccagccatcactgccacactcctggacttcatgtgccgcatcattcccaacttctatccaccattggagggccacgtgcggcagggtgtcttttcctccctcaaccacattgtggagaaacgggtcttggcacacctagctcccctgtttgacaaccctaagttggataaggagctgcgggcaatgctgagagagaagtttcctgagttctgcagctcaccctccccacctgtggaagtcaaaattgaggagccagtttccatggagatggacaaccatatgtcggataaggatgagagttgctatgacaatgcagaggcagccttcagtgacgatgaagaggatctcaacagcaaaggaaagaagagggagtttcgcttccaccctatcaaggagacagttgtggaggagccagttgatatcaccccttaccttgaccagttggatgagtccctgagggacaaagtactccagctacagaaggggagtgatacggaggcccagtgtgaggtcatgcaggaaattgtggaccaggtcctggaggaagactttgactcggagcagctgtctgtccttgcttcctgcctacaggagctcttcaaggcccactttcgaggggaggtcctgcctgaggagattactgaggagtccctggaggagtctgtaggaaagcctctgtacctaatatttaggaacctatgtcagatgcaggaagacaacagcagcttctctctacttctagaccttctctccgagctatatcagaagcagcccaagattggctaccacctgctctactacctgagggccagcaaagccgccgcagggaagatgaacctgtacgagtcatttgcccaggctacccagctgggcgatctgcacacctgcctgatgatggacatgaaggcctgccaggaggacgatgtgcggctcctgtgccacctcacgccctccatctacacagagtttccagatgaaaccttgaggagcggagagctgctgaacatgatcgtggctgttattgactctgcacagctccaggagctggtctgccacgtgatgatgggtaacctggttatgtttcgaaaagactcagttctcaacatactcattcagagcctagactgggagacctttgagcagtattgtgcctggcagctctttctggcccacaatattcccctggagaccataatccccatcctgcagcacctcaaatacaaggagcacccagaggccctgtcctgcctactgcttcaactccgaagagaaaagcccagcgaggagatggtgaagatggtgctgagccggccctgccatcctgacgaccagttcaccaccagcatcctgcggcactggtgcatgaaacatgacgagctgctggccgagcacatcaagtccctgctcatcaagaacaacagcctgcctcgcaagagacagagcctgaggagctctagcagcaagctggcccagctgactctggagcagatcctggagcacttggacaatctgcggctcaacctgaccaacaccaagcagaacttttttagccagacgccaattctccaggcgctgcagcatgtccaagcgagctgtgacgaagcccacaagatgaagtgaggctcctgccacttatgggccttggaaagtagtaggggaaaagcctaagggagaggaagcctgctagggacataaacgtaatggccagcaagaccttagggtccagggttgaagaaaaagaaggcctaggcctgggggcagagaagaggatgggaggtgccgtaggagcagcaggctcccactcaaagagctaccgctccttttccttagattcagtgatctcttctccctggcggaggaatatgaggactcttccaccaagccacccaagagccggcgaaaagcagctctgtccagccctcgaagtcgaaagaatgccacacagccccccaatgccgaagaagagtcgggctccagcagtgcttcagaagaggaagacacgaaaccgaagcctaccaagcggaaacgaaaagggtcctctgcagtgggctctgacagtgactgaggccctgcattccccatcccacccccggctggactgccctctccttcttggtgattcaaaggttaatagaggctgaggagattgcaggggaaacacccttgctgcatccccaagctcccccggtggaaggaggagctttctcctctggctgagtttgagaagctgccatgcagcccctagccccttccctcctcctggggcctccagcccctcacactgctgttcccagtgatatttgggatctgactgaagccagaggctctgtaaaatcagaccatagtggaagtcctcagccccctggccccttccgcaatctcctcccccagtctcccaaagagccatttcaacagagaagggaaatgacaaaggggcagctggccagataagctaggatgagagcagagactcagtgtgtgggtgtcccttcctgcttccccttcaggtcttggtttgttctgaagggacgttttatagtcactatccacatgccagtgtgaaatgggcatctatgacgtggtcagggtgtccattcctaatcatggggcagatgccacaagcattcagaaaggagtctgaaagggtggccacagccccacgtggtgtgccctggaggcttaggttggtctgaggttggcacctcaatctacaccagagcccagggagtcccagaggcaagtttcacagaattgtcaaatgatcccatttccttgagtctgtttttttttttgtttttttttgttttttttttggcagagataatcgtgtcttaaaagttgtttttaaatgacaataaaacaagccagaatgtcaaaaaaaaaaaaaaaaaaaaaaaaaaaaacaacaaaaaaaaataaacaaaaaacaaaaaaaaaaaaaaaaaaaaacaaaaaaaaaaacaacaaaaacaaaacaaaaaaaaaaaaacaaaaaaagaagggagcggggcgcggcgcgagaggagaagcatccacacaacgaggcgcgagggagcgaacgacgagaacaaaagacgaagcatagttagaagaggaagaggcgcggcgccgcaaacataggggagggaacgatagcgaagagaggcgagggaggagcgggagggtagaaagaaaacgaacgcacgaagggagagacgagagaaagaaaaaggaagtatgagctgagagaaggacagataatagggataagggaagggcagaaactaacacatgagtgtgagggaggaagaagaaacatcaggaggggcagcgagaaagatcacagacgtacagcgaaaggaggtaagagagggcgggagtagggagaaaagaataagagaaggaagtaaggaggagggatatgagagagagtgggagagcaacaagcaaaagagagatagtttatatgatgcggagaggtaggaggaaaagacggtagagggagacgagagcagtaggtgataatataagcaagaagacaaataatcatatacaaaggggaggg

SEQ ID NO: 51440 - DNA, 2673 bp, Homo sapiens
ggacgcgtgggtcgacccacgcgtccgatattcaggaacctatgtcagatgcaggaagacaacagcagcttctctctacttctagaccttctctccgagctatatcagaagcagcccaagattggctaccacctgctctactacctgagggccagcaaagccgccgcagggaagatgaacctgtacgagtcatttgcccaggctacccagctgggcgatctgcacacctgcctgatgatggacatgaaggcctgccaggaggacgatgtgcggctcctgtgccacctcacgccctccatctacacagagtttccagatgaaaccttgaggagcggagagctgctgaacatgatcgtggctgttattgactctgcacagctccaggagctggtctgccacgtgatgatgggtaacctggttatgtttcgaaaagactcagttctcaacatactcattcagagcctagactgggagacctttgagcagtattgtgcctggcagctctttctggcccacaatattcccctggagaccataatccccatcctgcagcacctcaaatacaaggagcacccagaggccctgtcctgcctactgcttcaactccgaagagaaaagcccagcgaggagatggtgaagatggtgctgagccggccctgccatcctgacgaccagttcaccaccagcatcctgcggcactggtgcatgaaacatgacgagctgctggccgagcacatcaagtccctgctcatcaagaacaacagcctgcctcgcaagagacagagcctgaggagctctagcagcaagctggcccagctgactctggagcagatcctggagcacttggacaatctgcggctcaacctgaccaacaccaagcagaacttttttagccagacgccaattctccaggcgctgcagcatgtccaagcgagctgtgacgaagcccacaagatgaaattcagtgatctcttctccctggcggaggaatatgaggactcttccaccaagccacccaagagccggcgaaaagcagctctgtccagccctcgaagtcgaaagaatgccacacagccccccaatgccgaagaagagtcgggctccagcagtgcttcagaagaggaagacacgaaaccgaagcctaccaagcggaaacgaaaagggtcctctgcagtgggctctgacagtgactgaggccctgcattccccatcccacccccggctggactgccctctccttcttggtgattcaaaggttaatagaggctgaggagattgcaggggaaacacccttgctgcatccccaagctcccccggtggaaggaggagctttctcctctggctgagtttgagaagctgccatgcagcccctagccccttccctcctcctggggcctccagcccctcacactgctgttcccagtgatatttgggatctgactgaagccagaggctctgtaaaatcagaccatagtggaagtcctcagccccctggccccttccgcaatctcctcccccagtctcccaaagagccatttcaacagagaagggaaatgacaaaggggcagctggccagataagctaggatgagagcagagactcagtgtgtgggtgtcccttcctgcttccccttcaggtcttggtttgttctgaagggacgttttatagtcactatccacatgccagtgtgaaatgggcatctatgacgtggtcagggtgtccattcctaatcatggggcagatgccacaagcattcagaaaggagtctgaaagggtggccacagccccacgtggtgtgccctggaggcttaggttggtctgaggttggcacctcaatctacaccagagcccagggagtcccagaggcaagtttcacagaattgtcaaatgatcccatttccttgagtctgtttttttttttgtttttttttgttttttttttggcagagataatcgtgtcttaaaagttgtttttaaatgacaataaaacaagccagaatgtcaaaaaaaaaaaaaaaaaaaaaaaaaaaaacaacaaaaaaaaataaacaaaaaacaaaaaaaaaaaaaaaaaaaaacaaaaaaaaaaacaacaaaaacaaaacaaaaaaaaaaaaacaaaaaaagaagggagcggggcgcggcgcgagaggagaagcatccacacaacgaggcgcgagggagcgaacgacgagaacaaaagacgaagcatagttagaagaggaagaggcgcggcgccgcaaacataggggagggaacgatagcgaagagaggcgagggaggagcgggagggtagaaagaaaacgaacgcacgaagggagagacgagagaaagaaaaaggaagtatgagctgagagaaggacagataatagggataagggaagggcagaaactaacacatgagtgtgagggaggaagaagaaacatcaggaggggcagcgagaaagatcacagacgtacagcgaaaggaggtaagagagggcgggagtagggagaaaagaataagagaaggaagtaaggaggagggatatgagagagagtgggagagcaacaagcaaaagagagatagtttatatgatgcggagaggtaggaggaaaagacggtagagggagacgagagcagtaggtgataatataagcaagaagacaaataatcatatacaaaggggaggg

SEQ ID NO: 51441 - DNA, 3908 bp, Homo sapiens
atattcaagcggctactcccaagattgcatgtgtttgtttaaaagtgacctgctactacctcaccattagcccactgggacttgcttcctctttaaaattttatgtaacactgatgctcctgttttgatgtgtatgaaccttaatctatgtgatatgtgactttgtgaacattgaattttttaattgagacctggggcaaggcatagttgtagctatttttatcctctttcctggcacttcttccctgtttggcacttccagcccctgcttcttatcccaagactggtatggcattgctgtgtgttaattctgccccacaaagtttcatagcaagcactaaagactgttacctggaaataagaaactcttggcctgttgggggcctcagtgcaggactcaggacatccagttgctagactgcagctgttgtcagccacctgtacttctcaggctctatctgagatatcatcctttctttccaactgtgggcttcttatatctacttctcagacgttcattttcaagggccaaaatgttcccactccaactcacaatctgtgggaaagtagcagctctggtttctagaaaaattcagaaccttccctttccttctttctggaggcaaagggtgaaactttaaagcctgacagaacagaaggcagtttatctcagcagtgaagggatggcagtaatgggatggcagtcagggtggaccagcagaatgggtgaagagatgtattggattggctgacttgctaatcggagctattctttttttccccttttgaaatcaggtggagatgttacagccaaaaatatctggttggcagaaagtgttctggatatcctgacagagcaaagggagtgggtcctgaagagcagcatcctcattgccatggctgtttacacgtacctccgcctcatcgtggaccaccatgggactgcccagctccaggccctgcgacagaaggaagtagacttctgcatctcactgcttcgggaacggttcatggaatgtctgatgattggtcgggatctcgtaagactacttcagaatgttgctaggataccagaatttgaactgctttggaaagatattatccataatcctcaggccttgagtcctcagttcacaggtatcctacagcttcttcagtcaagaacatcccgaaaattcctagcatgtcgtctaaccccggacatggagactaaactcctcttcatgacatcccgggtgcgatttggtcaacaaaagcgataccaagattggttccagcgccagtacctgtcaactccagatagtcagtctctgcgctgtgacctcattcgctacatctgtggggtagtccacccttctaatgaagtactgagttcagatatcttgccccggtgggccatcattggttggctcctgacaacgtgcacgtcaaatgtcgctgcctccaatgccaagctggctttgttttatgactggctgttctttagtccagacaaggatagcattatgaacatagaaccagccatcctggtcatgcaccactccatgaagccccacccagccatcactgccacactcctggacttcatgtgccgcatcattcccaacttctatccaccattggagggccacgtgcggcagggtgtcttttcctccctcaaccacattgtggagaaacgggtcttggcacacctagctcccctgtttgacaaccctaagttggataaggagctgcgggcaatgctgagagagaagtttcctgagttctgcagctcaccctccccacctgtggaagtcaaaattgaggagccagtttccatggagatggacaaccatatgtcggataaggatgagagttgctatgacaatgcagaggcagccttcagtgacgatgaagaggatctcaacagcaaaggaaagaagagggagtttcgcttccaccctatcaaggagacagttgtggaggagccagttgatatcaccccttaccttgaccagttggatgagtccctgagggacaaagtactccagctacagaaggggagtgatacggaggcccagtgtgaggtcatgcaggaaattgtggaccaggtcctggaggaagactttgactcggagcagctgtctgtccttgcttcctgcctacaggagctcttcaaggcccactttcgaggggaggtcctgcctgaggagattactgaggagtccctggaggagtctgtaggaaagcctctgtacctaatatttaggaacctatgtcagatgcaggaagacaacagcagcttctctctacttctagaccttctctccgagctatatcagaagcagcccaagattggctaccacctgctctactacctgagggccagcaaagccgccgcagggaagatgaacctgtacgagtcatttgcccaggctacccagctgggcgatctgcacacctgcctgatgatggacatgaaggcctgccaggaggacgatgtgcggctcctgtgccacctcacgccctccatctacacagagtttccagatgaaaccttgaggagcggagagctgctgaacatgatcgtggctgttattgactctgcacagctccaggagctggtctgccacgtgatgatgggtaacctggttatgtttcgaaaagactcagttctcaacatactcattcagagcctagactgggagacctttgagcagtattgtgcctggcagctctttctggcccacaatattcccctggagaccataatccccatcctgcagcacctcaaatacaaggagcacccagaggccctgtcctgcctactgcttcaactccgaagagaaaagcccagcgaggagatggtgaagatggtgctgagccggccctgccatcctgacgaccagttcaccaccagcatcctgcggcactggtgcatgaaacatgacgagctgctggccgagcacatcaagtccctgctcatcaagaacaacagcctgcctcgcaagagacagagcctgaggagctctagcagcaagctggcccagctgactctggagcagatcctggagcacttggacaatctgcggctcaacctgaccaacaccaagcagaacttttttagccagacgccaattctccaggcgctgcagcatgtccaagcgagctgtgacgaagcccacaagatgaaattcagtgatctcttctccctggcggaggaatatgaggactcttccaccaagccacccaagagccggcgaaaagcagctctgtccagccctcgaagtcgaaagaatgccacacagccccccaatgccgaagaagagtcgggctccagcagtgcttcagaagaggaagacacgaaaccgaagcctaccaagcggaaacgaaaagggtcctctgcagtgggctctgacagtgactgaggccctgcattccccatcccacccccggctggactgccctctccttcttggtgattcaaaggttaatagaggctgaggagattgcaggggaaacacccttgctgcatccccaagctcccccggtggaaggaggagctttctcctctggctgagtttgagaagctgccatgcagcccctagccccttccctcctcctggggcctccagcccctcacactgctgttcccagtgatatttgggatctgactgaagccagaggctctgtaaaatcagaccatagtggaagtcctcagccccctggccccttccgcaatctcctcccccagtctcccaaagagccatttcaacagagaagggaacagcagtgtgaggggctggaggccccaggaggagggaaggagctaggggctgcatagtcagccttctcaaactcagccagaggagaaaagctcctccttccaccggggaagcatggggatgcagcaagtgtagacctggggt

SEQ ID NO: 51442 - DNA, 3791 bp, Homo sapiens
atattcaagcggctactcccaagattgcatgtgtttgtttaaaagtgacctgctactacctcaccattagcccactgggacttgcttcctctttaaaattttatgtaacactgatgctcctgttttgatgtgtatgaaccttaatctatgtgatatgtgactttgtgaacattgaattttttaattgagacctggggcaaggcatagttgtagctatttttatcctctttcctggcacttcttccctgtttggcacttccagcccctgcttcttatcccaagactggtatggcattgctgtgtgttaattctgccccacaaagtttcatagcaagcactaaagactgttacctggaaataagaaactcttggcctgttgggggcctcagtgcaggactcaggacatccagttgctagactgcagctgttgtcagccacctgtacttctcaggctctatctgagatatcatcctttctttccaactgtgggcttcttatatctacttctcagacgttcattttcaagggccaaaatgttcccactccaactcacaatctgtgggaaagtagcagctctggtttctagaaaaattcagaaccttccctttccttctttctggaggcaaagggtgaaactttaaagcctgacagaacagaaggcagtttatctcagcagtgaagggatggcagtaatgggatggcagtcagggtggaccagcagaatgggtgaagagatgtattggattggctgacttgctaatcggagctattctttttttccccttttgaaatcaggtggagatgttacagccaaaaatatctggttggcagaaagtgttctggatatcctgacagagcaaagggagtgggtcctgaagagcagcatcctcattgccatggctgtttacacgtacctccgcctcatcgtggaccaccatgggactgcccagctccaggccctgcgacagaaggaagtagacttctgcatctcactgcttcgggaacggttcatggaatgtctgatgattggtcgggatctcgtaagactacttcagaatgttgctaggataccagaatttgaactgctttggaaagatattatccataatcctcaggccttgagtcctcagttcacaggtatcctacagcttcttcagtcaagaacatcccgaaaattcctagcatgtcgtctaaccccggacatggagactaaactcctcttcatgacatcccgggtgcgatttggtcaacaaaagcgataccaagattggttccagcgccagtacctgtcaactccagatagtcagtctctgcgctgtgacctcattcgctacatctgtggggtagtccacccttctaatgaagtactgagttcagatatcttgccccggtgggccatcattggttggctcctgacaacgtgcacgtcaaatgtcgctgcctccaatgccaagctggctttgttttatgactggctgttctttagtccagacaaggatagcattatgaacatagaaccagccatcctggtcatgcaccactccatgaagccccacccagccatcactgccacactcctggacttcatgtgccgcatcattcccaacttctatccaccattggagggccacgtgcggcagggtgtcttttcctccctcaaccacattgtggagaaacgggtcttggcacacctagctcccctgtttgacaaccctaagttggataaggagctgcgggcaatgctgagagagaagtttcctgagttctgcagctcaccctccccacctgtggaagtcaaaattgaggagccagtttccatggagatggacaaccatatgtcggataaggatgagagttgctatgacaatgcagaggcagccttcagtgacgatgaagaggatctcaacagcaaaggaaagaagagggagtttcgcttccaccctatcaaggagacagttgtggaggagccagttgatatcaccccttaccttgaccagttggatgagtccctgagggacaaagtactccagctacagaaggggagtgatacggaggcccagtgtgaggtcatgcaggaaattgtggaccaggtcctggaggaagactttgactcggagcagctgtctgtccttgcttcctgcctacaggagctcttcaaggcccactttcgaggggaggtcctgcctgaggagattactgaggagtccctggaggagtctgtaggaaagcctctgtacctaatatttaggaacctatgtcagatgcaggaagacaacagcagcttctctctacttctagaccttctctccgagctatatcagaagcagcccaagattggctaccacctgctctactacctgagggccagcaaagccgccgcagggaagatgaacctgtacgagtcatttgcccaggctacccagctgggcgatctgcacacctgcctgatgatggacatgaaggcctgccaggaggacgatgtgcggctcctgtgccacctcacgccctccatctacacagagtttccagatgaaaccttgaggagcggagagctgctgaacatgatcgtggctgttattgactctgcacagctccaggagctggtctgccacgtgatgatgggtaacctggttatgtttcgaaaagactcagttctcaacatactcattcagagcctagactgggagacctttgagcagtattgtgcctggcagctctttctggcccacaatattcccctggagaccataatccccatcctgcagcacctcaaatacaaggagcacccagaggccctgtcctgcctactgcttcaactccgaagagaaaagcccagcgaggagatggtgaagatggtgctgagccggccctgccatcctgacgaccagttcaccaccagcatcctgcggcactggtgcatgaaacatgacgagctgctggccgagcacatcaagtccctgctcatcaagaacaacagcctgcctcgcaagagacagagcctgaggagctctagcagcaagctggcccagctgactctggagcagatcctggagcacttggacaatctgcggctcaacctgaccaacaccaagcagaacttttttagccagacgccaattctccaggcgctgcagcatgtccaagcgagctgtgacgaagcccacaagatgaaattcagtgatctcttctccctggcggaggaatatgaggactcttccaccaagccacccaagagccggcgaaaagcagctctgtccagccctcgaagtcgaaagaatgccacacagccccccaatgccgaagaagagtcgggctccagcagtgcttcagaagaggaagacacgaaaccgaagcctaccaagcggaaacgaaaagggtcctctgcagtgggctctgacagtgactgaggccctgcattccccatcccacccccggctggactgccctctccttcttggtgattcaaagtgtggccacttgctgggccatgtgaaccagcagaggagagttccttggctatgctgttgttcccccgctgtccagggagaatggaggtggactgaggagtgaagtttgggcgaactgcacagagctgctcctcttcaccccgaaaatttgtctttttacagaatccaggttctcccctccctcatcactgctgttgcttcctttgaaagtctaaaccactggaggcttctttttccttcctctctccttccccagtttcctctgtcccaattaaaaccaggatggagagcaaaaaaaaaagaagacaacaacaaaaaaacagg

SEQ ID NO: 51443 - DNA, 2418 bp, Homo sapiens
caagagtgcgagtagaggccggtgtgaattcggagaggctccatctacacagagtttccagatgaaaccttgaggagcggagagctgctgaacatgatcgtggctgttattgactctgcacagctccaggagctggtctgccacgtgatgatgggtaacctggttatgtttcgaaaagactcagttctcaacatactcattcagagcctagactgggagacctttgagcagtattgtgcctggcagctctttctggcccacaatattcccctggagaccataatccccatcctgcagcacctcaaatacaaggagcacccagaggccctgtcctgcctactgcttcaactccgaagagaaaagcccagcgaggagatggtgaagatggtgctgagccggccctgccatcctgacgaccagttcaccaccagcatcctgcggcactggtgcatgaaacatgacgagctgctggccgagcacatcaagtccctgctcatcaagaacaacagcctgcctcgcaagagacagagcctgaggagctctagcagcaagctggcccagctgactctggagcagatcctggagcacttggacaatctgcggctcaacctgaccaacaccaagcagaacttttttagccagacgccaattctccaggcgctgcagcatgtccaagcgagctgtgacgaagcccacaagatgaaattcagtgatctcttctccctggcggaggaatatgaggactcttccaccaagccacccaagagccggcgaaaagcagctctgtccagccctcgaagtcgaaagaatgccacacagccccccaatgccgaagaagagtcgggctccagcagtgcttcagaagaggaagacacgaaaccgaagcctaccaagcggaaacgaaaagggtcctctgcagtgggctctgacagtgactgaggccctgcattccccatcccacccccggctggactgccctctccttcttggtgattcaaaggttaatagaggctgaggagattgcaggggaaacacccttgctgcatccccaagctcccccggtggaaggaggagctttctcctctggctgagtttgagaagctgccatgcagcccctagccccttccctcctcctggggcctccagcccctcacactgctgttcccagtgatatttgggatctgactgaagccagaggctctgtaaaatcagaccatagtggaagtcctcagccccctggccccttccgcaatctcctcccccagtctcccaaagagccatttcaacagagaagggaaatgacaaaggggcagctggccagataagctaggatgagagcagagactcagtgtgtgggtgtcccttcctgcttccccttcaggtcttggtttgttctgaagggacgttttatagtcactatccacatgccagtgtgaaatgggcatctatgacgtggtcagggtgtccattcctaatcatggggcagatgccacaagcattcagaaaggagtctgaaagggtggccacagccccacgtggtgtgccctggaggcttaggttggtctgaggttggcacctcaatctacaccagagcccagggagtcccagaggcaagtttcacagaattgtcaaatgatcccatttccttgagtctgtttttttttttgtttttttttgttttttttttggcagagataatcgtgtcttaaaagttgtttttaaatgacaataaaacaagccagaatgtcaaaaaaaaaaaaaaaaaaaaaaaaaaaaacaacaaaaaaaaataaacaaaaaacaaaaaaaaaaaaaaaaaaaaacaaaaaaaaaaacaacaaaaacaaaacaaaaaaaaaaaaacaaaaaaagaagggagcggggcgcggcgcgagaggagaagcatccacacaacgaggcgcgagggagcgaacgacgagaacaaaagacgaagcatagttagaagaggaagaggcgcggcgccgcaaacataggggagggaacgatagcgaagagaggcgagggaggagcgggagggtagaaagaaaacgaacgcacgaagggagagacgagagaaagaaaaaggaagtatgagctgagagaaggacagataatagggataagggaagggcagaaactaacacatgagtgtgagggaggaagaagaaacatcaggaggggcagcgagaaagatcacagacgtacagcgaaaggaggtaagagagggcgggagtagggagaaaagaataagagaaggaagtaaggaggagggatatgagagagagtgggagagcaacaagcaaaagagagatagtttatatgatgcggagaggtaggaggaaaagacggtagagggagacgagagcagtaggtgataatataagcaagaagacaaataatcatatacaaaggggaggg

SEQ ID NO: 51444 - DNA, 2513 bp, Homo sapiens
tgacgtttatgaagcagattgcaggtggagatgttacagccaaaaatatctggttggcagaaagtgttctggatatcctgacagagcaaagggagtgggtcctgaagagcagcatcctcattgccatggctgtttacacgtacctccgctttccagatgaaaccttgaggagcggagagctgctgaacatgatcgtggctgttattgactctgcacagctccaggagctggtctgccacgtgatgatgggtaacctggttatgtttcgaaaagactcagttctcaacatactcattcagagcctagactgggagacctttgagcagtattgtgcctggcagctctttctggcccacaatattcccctggagaccataatccccatcctgcagcacctcaaatacaaggagcacccagaggccctgtcctgcctactgcttcaactccgaagagaaaagcccagcgaggagatggtgaagatggtgctgagccggccctgccatcctgacgaccagttcaccaccagcatcctgcggcactggtgcatgaaacatgacgagctgctggccgagcacatcaagtccctgctcatcaagaacaacagcctgcctcgcaagagacagagcctgaggagctctagcagcaagctggcccagctgactctggagcagatcctggagcacttggacaatctgcggctcaacctgaccaacaccaagcagaacttttttagccagacgccaattctccaggcgctgcagcatgtccaagcgagctgtgacgaagcccacaagatgaaattcagtgatctcttctccctggcggaggaatatgaggactcttccaccaagccacccaagagccggcgaaaagcagctctgtccagccctcgaagtcgaaagaatgccacacagccccccaatgccgaagaagagtcgggctccagcagtgcttcagaagaggaagacacgaaaccgaagcctaccaagcggaaacgaaaagggtcctctgcagtgggctctgacagtgactgaggccctgcattccccatcccacccccggctggactgccctctccttcttggtgattcaaaggttaatagaggctgaggagattgcaggggaaacacccttgctgcatccccaagctcccccggtggaaggaggagctttctcctctggctgagtttgagaagctgccatgcagcccctagccccttccctcctcctggggcctccagcccctcacactgctgttcccagtgatatttgggatctgactgaagccagaggctctgtaaaatcagaccatagtggaagtcctcagccccctggccccttccgcaatctcctcccccagtctcccaaagagccatttcaacagagaagggaaatgacaaaggggcagctggccagataagctaggatgagagcagagactcagtgtgtgggtgtcccttcctgcttccccttcaggtcttggtttgttctgaagggacgttttatagtcactatccacatgccagtgtgaaatgggcatctatgacgtggtcagggtgtccattcctaatcatggggcagatgccacaagcattcagaaaggagtctgaaagggtggccacagccccacgtggtgtgccctggaggcttaggttggtctgaggttggcacctcaatctacaccagagcccagggagtcccagaggcaagtttcacagaattgtcaaatgatcccatttccttgagtctgtttttttttttgtttttttttgttttttttttggcagagataatcgtgtcttaaaagttgtttttaaatgacaataaaacaagccagaatgtcaaaaaaaaaaaaaaaaaaaaaaaaaaaaacaacaaaaaaaaataaacaaaaaacaaaaaaaaaaaaaaaaaaaaacaaaaaaaaaaacaacaaaaacaaaacaaaaaaaaaaaaacaaaaaaagaagggagcggggcgcggcgcgagaggagaagcatccacacaacgaggcgcgagggagcgaacgacgagaacaaaagacgaagcatagttagaagaggaagaggcgcggcgccgcaaacataggggagggaacgatagcgaagagaggcgagggaggagcgggagggtagaaagaaaacgaacgcacgaagggagagacgagagaaagaaaaaggaagtatgagctgagagaaggacagataatagggataagggaagggcagaaactaacacatgagtgtgagggaggaagaagaaacatcaggaggggcagcgagaaagatcacagacgtacagcgaaaggaggtaagagagggcgggagtagggagaaaagaataagagaaggaagtaaggaggagggatatgagagagagtgggagagcaacaagcaaaagagagatagtttatatgatgcggagaggtaggaggaaaagacggtagagggagacgagagcagtaggtgataatataagcaagaagacaaataatcatatacaaaggggaggg

SEQ ID NO: 51445 - DNA, 3249 bp, Homo sapiens
atattcaagcggctactcccaagattgcatgtgtttgtttaaaagtgacctgctactacctcaccattagcccactgggacttgcttcctctttaaaattttatgtaacactgatgctcctgttttgatgtgtatgaaccttaatctatgtgatatgtgactttgtgaacattgaattttttaattgagacctggggcaaggcatagttgtagctatttttatcctctttcctggcacttcttccctgtttggcacttccagcccctgcttcttatcccaagactggtatggcattgctgtgtgttaattctgccccacaaagtttcatagcaagcactaaagactgttacctggaaataagaaactcttggcctgttgggggcctcagtgcaggactcaggacatccagttgctagactgcagctgttgtcagccacctgtacttctcaggctctatctgagatatcatcctttctttccaactgtgggcttcttatatctacttctcagacgttcattttcaagggccaaaatgttcccactccaactcacaatctgtgggaaagtagcagctctggtttctagaaaaattcagaaccttccctttccttctttctggaggcaaagggtgaaactttaaagcctgacagaacagaaggcagtttatctcagcagtgaagggatggcagtaatgggatggcagtcagggtggaccagcagaatgggtgaagagatgtattggattggctgacttgctaatcggagctattctttttttccccttttgaaatcaggtggagatgttacagccaaaaatatctggttggcagaaagtgttctggatatcctgacagagcaaagggagtgggtcctgaagagcagcatcctcattgccatggctgtttacacgtacctccgcctcatcgtggaccaccatgggactgcccagctccaggccctgcgacagaaggaagtagacttctgcatctcactgcttcgggaacggttcatggaatgtctgatgattggtcgggatctcgtaagactacttcagaatgttgctaggataccagaatttgaactgctttggaaagatattatccataatcctcaggccttgagtcctcagttcacaggtatcctacagcttcttcagtcaagaacatcccgaaaattcctagcatgtcgtctaaccccggacatggagactaaactcctcttcatgacatcccgggtgcgatttggtcaacaaaagcgataccaagattggttccagcgccagtacctgtcaactccagatagtcagtctctgcgctgtgacctcattcgctacatctgtggggtagtccacccttctaatgaagtactgagttcagatatcttgccccggtgggccatcattggttggctcctgacaacgtgcacgtcaaatgtcgctgcctccaatgccaagctggctttgttttatgactggctgttctttagtccagacaaggatagcattatgaacatagaaccagccatcctggtcatgcaccactccatgaagccccacccagccatcactgccacactcctggacttcatgtgccgcatcattcccaacttctatccaccattggagggccacgtgcggcagggtgtcttttcctccctcaaccacattgtggagaaacgggtcttggcacacctagctcccctgtttgacaaccctaagttggataaggagctgcgggcaatgctgagagagaagtttcctgagttctgcagctcaccctccccacctgtggaagtcaaaattgaggagccagtttccatggagatggacaaccatatgtcggataaggatgagagttgctatgacaatgcagaggcagccttcagtgacgatgaagaggatctcaacagcaaaggaaagaagagggagtttcgcttccaccctatcaaggagacagttgtggaggagccagttgatatcaccccttaccttgaccagttggatgagtccctgagggacaaagtactccagctacagaaggggagtgatacggaggcccagtgtgaggtcatgcaggaaattgtggaccaggtcctggaggaagactttgactcggagcagctgtctgtccttgcttcctgcctacaggagctcttcaaggcccactttcgaggggaggtcctgcctgaggagattactgaggagtccctggaggagtctgtaggaaagcctctgtacctaatatttaggaacctatgtcagatgcaggaagacaacagcagcttctctctacttctagaccttctctccgagctatatcagaagcagcccaagattggctaccacctgctctactacctgagggccagcaaagccgccgcagggaagatgaacctgtacgagtcatttgcccaggctacccagctgggcgatctgcacacctgcctgatgatggacatgaaggcctgccaggaggacgatgtgcggctcctgtgccacctcacgccctccatctacacagagtttccagatgaaaccttgaggagcggagagctgctgaacatgatcgtggctgttattgactctgcacagctccaggagctggtctgccacgtgatgatgggtaacctggttatgtttcgaaaagactcagttctcaacatactcattcagagcctagactgggagacctttgagcagtattgtgcctggcagctctttctggcccacaatattcccctggagaccataatccccatcctgcagcacctcaaatacaaggagcacccagaggccctgtcctgcctactgcttcaactccgaagagaaaagcccagcgaggagatggtgaagatggtgctgagccggccctgccatcctgacgaccagttcaccaccagcatcctgcggcactggtgcatgaaacatgacgagctgctggccgagcacatcaagtccctgctcatcaagaacaacagcctgcctcgcaagagacagagcctgaggagctctagcagcaagctggcccagctgactctggagcagatcctggagcacttggacaatctgcggctcaacctgaccaacaccaagcagaacttttttagccagacgccaattctccaggcgctgcagcatgtccaagcgagctgtgacgaagcccacaagatgaaattcagtgatctcttctccctggcggaggaatatgaggactcttccaccaaatcgacatgttcgggggtcctctagg

SEQ ID NO: 51446 - DNA, 1989 bp, Homo sapiens
aacctgcgacctttacacagggaacagctttagcctgttatcgaatggccacaacgatagcgtgaggctcctgccacttatgggccttggaaagtagtaggggaaaagcctaagggagaggaagcctgctagggacataaacgtaatggccagcaagaccttagggtccagggttgaagaaaaagaaggcctaggcctgggggcagagaagaggatgggaggtgccgtaggagcagcaggctcccactcaaagagctaccgctccttttccttagattcagtgatctcttctccctggcggaggaatatgaggactcttccaccaagccacccaagagccggcgaaaagcagctctgtccagccctcgaagtcgaaagaatgccacacagccccccaatgccgaagaagagtcgggctccagcagtgcttcagaagaggaagacacgaaaccgaagcctaccaagcggaaacgaaaagggtcctctgcagtgggctctgacagtgactgaggccctgcattccccatcccacccccggctggactgccctctccttcttggtgattcaaaggttaatagaggctgaggagattgcaggggaaacacccttgctgcatccccaagctcccccggtggaaggaggagctttctcctctggctgagtttgagaagctgccatgcagcccctagccccttccctcctcctggggcctccagcccctcacactgctgttcccagtgatatttgggatctgactgaagccagaggctctgtaaaatcagaccatagtggaagtcctcagccccctggccccttccgcaatctcctcccccagtctcccaaagagccatttcaacagagaagggaaatgacaaaggggcagctggccagataagctaggatgagagcagagactcagtgtgtgggtgtcccttcctgcttccccttcaggtcttggtttgttctgaagggacgttttatagtcactatccacatgccagtgtgaaatgggcatctatgacgtggtcagggtgtccattcctaatcatggggcagatgccacaagcattcagaaaggagtctgaaagggtggccacagccccacgtggtgtgccctggaggcttaggttggtctgaggttggcacctcaatctacaccagagcccagggagtcccagaggcaagtttcacagaattgtcaaatgatcccatttccttgagtctgtttttttttttgtttttttttgttttttttttggcagagataatcgtgtcttaaaagttgtttttaaatgacaataaaacaagccagaatgtcaaaaaaaaaaaaaaaaaaaaaaaaaaaaacaacaaaaaaaaataaacaaaaaacaaaaaaaaaaaaaaaaaaaaacaaaaaaaaaaacaacaaaaacaaaacaaaaaaaaaaaaacaaaaaaagaagggagcggggcgcggcgcgagaggagaagcatccacacaacgaggcgcgagggagcgaacgacgagaacaaaagacgaagcatagttagaagaggaagaggcgcggcgccgcaaacataggggagggaacgatagcgaagagaggcgagggaggagcgggagggtagaaagaaaacgaacgcacgaagggagagacgagagaaagaaaaaggaagtatgagctgagagaaggacagataatagggataagggaagggcagaaactaacacatgagtgtgagggaggaagaagaaacatcaggaggggcagcgagaaagatcacagacgtacagcgaaaggaggtaagagagggcgggagtagggagaaaagaataagagaaggaagtaaggaggagggatatgagagagagtgggagagcaacaagcaaaagagagatagtttatatgatgcggagaggtaggaggaaaagacggtagagggagacgagagcagtaggtgataatataagcaagaagacaaataatcatatacaaaggggaggg

SEQ ID NO: 51447 - DNA, 3021 bp, Homo sapiens
atattcaagcggctactcccaagattgcatgtgtttgtttaaaagtgacctgctactacctcaccattagcccactgggacttgcttcctctttaaaattttatgtaacactgatgctcctgttttgatgtgtatgaaccttaatctatgtgatatgtgactttgtgaacattgaattttttaattgagacctggggcaaggcatagttgtagctatttttatcctctttcctggcacttcttccctgtttggcacttccagcccctgcttcttatcccaagactggtatggcattgctgtgtgttaattctgccccacaaagtttcatagcaagcactaaagactgttacctggaaataagaaactcttggcctgttgggggcctcagtgcaggactcaggacatccagttgctagactgcagctgttgtcagccacctgtacttctcaggctctatctgagatatcatcctttctttccaactgtgggcttcttatatctacttctcagacgttcattttcaagggccaaaatgttcccactccaactcacaatctgtgggaaagtagcagctctggtttctagaaaaattcagaaccttccctttccttctttctggaggcaaagggtgaaactttaaagcctgacagaacagaaggcagtttatctcagcagtgaagggatggcagtaatgggatggcagtcagggtggaccagcagaatgggtgaagagatgtattggattggctgacttgctaatcggagctattctttttttccccttttgaaatcaggtggagatgttacagccaaaaatatctggttggcagaaagtgttctggatatcctgacagagcaaagggagtgggtcctgaagagcagcatcctcattgccatggctgtttacacgtacctccgcctcatcgtggaccaccatgggactgcccagctccaggccctgcgacagaaggaagtagacttctgcatctcactgcttcgggaacggttcatggaatgtctgatgattggtcgggatctcgtaagactacttcagaatgttgctaggataccagaatttgaactgctttggaaagatattatccataatcctcaggccttgagtcctcagttcacaggtatcctacagcttcttcagtcaagaacatcccgaaaattcctagcatgtcgtctaaccccggacatggagactaaactcctcttcatgacatcccgggtgcgatttggtcaacaaaagcgataccaagattggttccagcgccagtacctgtcaactccagatagtcagtctctgcgctgtgacctcattcgctacatctgtggggtagtccacccttctaatgaagtactgagttcagatatcttgccccggtgggccatcattggttggctcctgacaacgtgcacgtcaaatgtcgctgcctccaatgccaagctggctttgttttatgactggctgttctttagtccagacaaggatagcattatgaacatagaaccagccatcctggtcatgcaccactccatgaagccccacccagccatcactgccacactcctggacttcatgtgccgcatcattcccaacttctatccaccattggagggccacgtgcggcagggtgtcttttcctccctcaaccacattgtggagaaacgggtcttggcacacctagctcccctgtttgacaaccctaagttggataaggagctgcgggcaatgctgagagagaagtttcctgagttctgcagctcaccctccccacctgtggaagtcaaaattgaggagccagtttccatggagatggacaaccatatgtcggataaggatgagagttgctatgacaatgcagaggcagccttcagtgacgatgaagaggatctcaacagcaaaggaaagaagagggagtttcgcttccaccctatcaaggagacagttgtggaggagccagttgatatcaccccttaccttgaccagttggatgagtccctgagggacaaagtactccagctacagaaggggagtgatacggaggcccagtgtgaggtcatgcaggaaattgtggaccaggtcctggaggaagactttgactcggagcagctgtctgtccttgcttcctgcctacaggagctcttcaaggcccactttcgaggggaggtcctgcctgaggagattactgaggagtccctggaggagtctgtaggaaagcctctgtacctaatatttaggaacctatgtcagatgcaggaagacaacagcagcttctctctacttctagaccttctctccgagctatatcagaagcagcccaagattggctaccacctgctctactacctgagggccagcaaagccgccgcagggaagatgaacctgtacgagtcatttgcccaggctacccagctgggcgatctgcacacctgcctgatgatggacatgaaggcctgccaggaggacgatgtgcggctcctgtgccacctcacgccctccatctacacagagtttccagatgaaaccttgaggagcggagagctgctgaacatgatcgtggctgttattgactctgcacagtcccaggagctgggtctgccagtgatgatgggtacctgggtatgttcggaaagatccagtctcaaattatcattcagagcctaactgggaaaccttgtgcagtttggccggagacctttggcacaaaattcccgtgggacaataattcccagaacgggagacgaccataaatatagggacccccaaggcgccgcgcggggacaagcggacaccaccaaaaaaagcagcgggacgacgctacatagcagttggtcgcgacgcgacacctaacatacaaaaccaaccatcggcagggcacaataacgaaggtggcagcaaaaccactcaagaagcgggcgacacagagcgaacagacgcgtcgacaaagcagagtggaccgacaaacaagccatgagcagaggagcacaacgaaccgatagcccgtagagta

SEQ ID NO: 51448 - DNA, 2628 bp, Homo sapiens
atattcaagcggctactcccaagattgcatgtgtttgtttaaaagtgacctgctactacctcaccattagcccactgggacttgcttcctctttaaaattttatgtaacactgatgctcctgttttgatgtgtatgaaccttaatctatgtgatatgtgactttgtgaacattgaattttttaattgagacctggggcaaggcatagttgtagctatttttatcctctttcctggcacttcttccctgtttggcacttccagcccctgcttcttatcccaagactggtatggcattgctgtgtgttaattctgccccacaaagtttcatagcaagcactaaagactgttacctggaaataagaaactcttggcctgttgggggcctcagtgcaggactcaggacatccagttgctagactgcagctgttgtcagccacctgtacttctcaggctctatctgagatatcatcctttctttccaactgtgggcttcttatatctacttctcagacgttcattttcaagggccaaaatgttcccactccaactcacaatctgtgggaaagtagcagctctggtttctagaaaaattcagaaccttccctttccttctttctggaggcaaagggtgaaactttaaagcctgacagaacagaaggcagtttatctcagcagtgaagggatggcagtaatgggatggcagtcagggtggaccagcagaatgggtgaagagatgtattggattggctgacttgctaatcggagctattctttttttccccttttgaaatcaggtggagatgttacagccaaaaatatctggttggcagaaagtgttctggatatcctgacagagcaaagggagtgggtcctgaagagcagcatcctcattgccatggctgtttacacgtacctccgcctcatcgtggaccaccatgggactgcccagctccaggccctgcgacagaaggaagtagacttctgcatctcactgcttcgggaacggttcatggaatgtctgatgattggtcgggatctcgtaagactacttcagaatgttgctaggataccagaatttgaactgctttggaaagatattatccataatcctcaggccttgagtcctcagttcacaggtatcctacagcttcttcagtcaagaacatcccgaaaattcctagcatgtcgtctaaccccggacatggagactaaactcctcttcatgacatcccgggtgcgatttggtcaacaaaagcgataccaagattggttccagcgccagtacctgtcaactccagatagtcagtctctgcgctgtgacctcattcgctacatctgtggggtagtccacccttctaatgaagtactgagttcagatatcttgccccggtgggccatcattggttggctcctgacaacgtgcacgtcaaatgtcgctgcctccaatgccaagctggctttgttttatgactggctgttctttagtccagacaaggatagcattatgaacatagaaccagccatcctggtcatgcaccactccatgaagccccacccagccatcactgccacactcctggacttcatgtgccgcatcattcccaacttctatccaccattggagggccacgtgcggcagggtgtcttttcctccctcaaccacattgtggagaaacgggtcttggcacacctagctcccctgtttgacaaccctaagttggataaggagctgcgggcaatgctgagagagaagtttcctgagttctgcagctcaccctccccacctgtggaagtcaaaattgaggagccagtttccatggagatggacaaccatatgtcggataaggatgagagttgctatgacaatgcagaggcagccttcagtgacgatgaagaggatctcaacagcaaaggaaagaagagggagtttcgcttccaccctatcaaggagacagttgtggaggagccagttgatatcaccccttaccttgaccagttggatgagtccctgagggacaaagtactccagctacagaaggggagtgatacggaggcccagtgtgaggtcatgcaggaaattgtggaccaggtcctggaggaagactttgactcggagcagctgtctgtccttgcttcctgcctacaggagctcttcaaggcccactttcgaggggaggtcctgcctgaggagattactgaggagtccctggaggagtctgtaggaaagcctctgtacctaatatttaggaacctatgtcagatgcaggaagacaacagcagcttctctctacttctagaccttctctccgagctatatcagaagcagcccaagattggctaccacctgctctactacctgagggccagcaaagccgccgcagggaagatgaacctgtacgagtcatttgcccaggctacccagctgggcgatctgcacacctgccgcatgagagagactgactgtcggcaaaaacaaaaccaaaaccaacctttacccacttctcctaaacacccctaaaaaactgctctgaaaagcagggaatatcattgtgcaaactgattccttgtgttgtacacggctgtcatgtgatcacgtactcactggtatacctgtttcctgcattacc

SEQ ID NO: 51449 - DNA, 1126 bp, Homo sapiens
agtcagagctctgatagcgcattgtatattcacaataatgtgtaccgagcgcgatgttcataaactacgtgtacctggtgtccattcctaatcatggggcagatgccacaagcattcagaaaggagtctgaaagggtggccacagccccacgtggtgtgccctggaggcttaggttggtctgaggttggcacctcaatctacaccagagcccagggagtcccagaggcaagtttcacagaattgtcaaatgatcccatttccttgagtctgtttttttttttgtttttttttgttttttttttggcagagataatcgtgtcttaaaagttgtttttaaatgacaataaaacaagccagaatgtcttttgtgctggagtgtctgctggcatttgccccgtgcatgtatagcttggtcttgatttgattggcacccctacttgtaaccgcagaacatccccctttcccttcctgttctgcccccacttttgtctagagcagaagggacttggctttggccactacccatccttcctgctgccactggaggtgggagccaggcactgatctgtctatgcagaaccatcccccgtaggatgaggcctgtccttactcatttctcaagaaacaagatgcttccaaaaggtctgtcatcctccagttgaagtctgtgtgcctaccaagaatggccggaggactccgctgcttgacgggagggatgctccagcttggtctccagggacaactgtacctggagataaagtctggataccagggagggacagagatgctcttccttccacagtgtggccacttgctgggccatgtgaaccagcagaggagagttccttggctatgctgttgttcccccgctgtccagggagaatggaggtggactgaggagtgaagtttgggcgaactgcacagagctgctcctcttcaccccgaaaatttgtctttttacagaatccaggttctcccctccctcatcactgctgttgcttcctttgaaagtctaaaccactggaggcttctttttccttcctctctccttccccagtttcctctgtcccaattaaaaccaggatggagagcaaaaaaaaaagaagacaacaacaaaaaaacagg

SEQ ID NO: 51450 - DNA, 716 bp, Homo sapiens
  misc_feature (41)..(41): n is a, c, g, or t
  misc_feature (45)..(46): n is a, c, g, or t
attaactgggcagcgagcttttgcatctccggcacatatcntttnnacagttgtggaggagccagttgatatcaccccttaccttgaccagttggatgagtccctgagggacaaagtactccagctacagaaggggagtgatacggaggcccagtgtgaggtcatgcaggaaattgtggaccaggtcctggaggaagactttgactcggagcagctgtctgtccttgcttcctgcctacaggagctcttcaaggcccactttcgaggggaggtcctgcctgaggagattactgaggagtccctggaggagtctgtaggaaagcctctgtacctaatatttaggaacctatgtcagatgcaggaagacaacagcagcttctctctacttctagaccttctctccgagctatatcagaagcagcccaagattggctaccacctgctctactacctgagggccagcaaagccgccgcagggaagatgaacctgtacgagtcatttgcccaggctacccagctgggcgatctgcacacctgccgcatgagagagactgactgtcggcaaaaacaaaaccaaaaccaacctttacccacttctcctaaacacccctaaaaaactgctctgaaaagcagggaatatcattgtgcaagtaagttgttttttccacgggtctgtctgcataaaacttgccacttagagctcgcctgcaccatcg

SEQ ID NO: 51451 - DNA, 1962 bp, Homo sapiens
atattcaagcggctactcccaagattgcatgtgtttgtttaaaagtgacctgctactacctcaccattagcccactgggacttgcttcctctttaaaattttatgtaacactgatgctcctgttttgatgtgtatgaaccttaatctatgtgatatgtgactttgtgaacattgaattttttaattgagacctggggcaaggcatagttgtagctatttttatcctctttcctggcacttcttccctgtttggcacttccagcccctgcttcttatcccaagactggtatggcattgctgtgtgttaattctgccccacaaagtttcatagcaagcactaaagactgttacctggaaataagaaactcttggcctgttgggggcctcagtgcaggactcaggacatccagttgctagactgcagctgttgtcagccacctgtacttctcaggctctatctgagatatcatcctttctttccaactgtgggcttcttatatctacttctcagacgttcattttcaagggccaaaatgttcccactccaactcacaatctgtgggaaagtagcagctctggtttctagaaaaattcagaaccttccctttccttctttctggaggcaaagggtgaaactttaaagcctgacagaacagaaggcagtttatctcagcagtgaagggatggcagtaatgggatggcagtcagggtggaccagcagaatgggtgaagagatgtattggattggctgacttgctaatcggagctattctttttttccccttttgaaatcaggtggagatgttacagccaaaaatatctggttggcagaaagtgttctggatatcctgacagagcaaagggagtgggtcctgaagagcagcatcctcattgccatggctgtttacacgtacctccgcctcatcgtggaccaccatgggactgcccagctccaggccctgcgacagaaggaagtagacttctgcatctcactgcttcgggaacggttcatggaatgtctgatgattggtcgggatctcgtaagactacttcagaatgttgctaggataccagaatttgaactgctttggaaagatattatccataatcctcaggccttgagtcctcagttcacaggtatcctacagcttcttcagtcaagaacatcccgaaaattcctagcatgtcgtctaaccccggacatggagactaaactcctcttcatgacatcccgggtgcgatttggtcaacaaaagcgataccaagattggttccagcgccagtacctgtcaactccagatagtcagtctctgcgctgtgacctcattcgctacatctgtggggtagtccacccttctaatgaagtactgagttcagatatcttgccccggtgggccatcattggttggctcctgacaacgtgcacgtcaaatgtcgctgcctccaatgccaagctggctttgttttatgactggctgttctttagtccagacaaggatagcattatgaacatagaaccagccatcctggtcatgcaccactccatgaagccccacccagccatcactgccacactcctggacttcatgtgccgcatcattcccaacttctatccaccattggagggccacgtgcggcagggtgtcttttcctccctcaaccacattgtggagaaacgggtcttggcacacctagctcccctgtttgacaaccctaagttggataaggagctgcgggcaatgctgagagagaagtttcctgagttctgcagctcaccctccccacctgtggaagtcaaaattgaggagccagtttccatggagatggacaaccatatgtcggatattttacacagcaggaaagatatgaacaatacggagacggctttcagtgccgtatgaagttaggattttaacagctataggataagtgagagggagatgcgattccctctcatttcgg

SEQ ID NO: 51452 - DNA, 1493 bp, Homo sapiens
atattcaagcggctactcccaagattgcatgtgtttgtttaaaagtgacctgctactacctcaccattagcccactgggacttgcttcctctttaaaattttatgtaacactgatgctcctgttttgatgtgtatgaaccttaatctatgtgatatgtgactttgtgaacattgaattttttaattgagacctggggcaaggcatagttgtagctatttttatcctctttcctggcacttcttccctgtttggcacttccagcccctgcttcttatcccaagactggtatggcattgctgtgtgttaattctgccccacaaagtttcatagcaagcactaaagactgttacctggaaataagaaactcttggcctgttgggggcctcagtgcaggactcaggacatccagttgctagactgcagctgttgtcagccacctgtacttctcaggctctatctgagatatcatcctttctttccaactgtgggcttcttatatctacttctcagacgttcattttcaagggccaaaatgttcccactccaactcacaatctgtgggaaagtagcagctctggtttctagaaaaattcagaaccttccctttccttctttctggaggcaaagggtgaaactttaaagcctgacagaacagaaggcagtttatctcagcagtgaagggatggcagtaatgggatggcagtcagggtggaccagcagaatgggtgaagagatgtattggattggctgacttgctaatcggagctattctttttttccccttttgaaatcaggtggagatgttacagccaaaaatatctggttggcagaaagtgttctggatatcctgacagagcaaagggagtgggtcctgaagagcagcatcctcattgccatggctgtttacacgtacctccgcctcatcgtggaccaccatgggactgcccagctccaggccctgcgacagaaggaagtagacttctgcatctcactgcttcgggaacggttcatggaatgtctgatgattggtcgggatctcgtaagactacttcagaatgttgctaggataccagaatttgaactgctttggaaagatattatccataatcctcaggccttgagtcctcagttcacaggtatcctacagcttcttcagtcaagaacatcccgaaaattcctagcatgtcgtctaaccccggacatggagactaaactcctcttcatgacatcccgggtgcgatttggtcaacaaaagcgataccaagattggttccagcgccagtacctgtcaactccagatagtcagtctctgcgctgtgacctcattcgctacatctgtggggtagtccacccttctaatgaagtactgagttcagatatcttgccccggtgggccatcattggttggctcctgacaacgtgcacggtgagggcaaaagatactgggtggtgaagggtgcctcttccatggtgttcccatgtttccattctt

SEQ ID NO: 51453 - DNA, 689 bp, Homo sapiens
tagactgattgtgcttagacctatctcaactccatgttgagttagaaatgagaagctctggccagacacagtggctcatgcctgtaatcccagcactttgggaggccaaggtgggcagatcacctgaggttaggaatttgagacctgcctggccaacatggcaaaacccgtgtctactaaaaatacaaaaattagccaggtgtgatggtgcacacctgtaatcctagctacttgagaggctgaggcacaagaatcgcttgaatccgggaggtggaggttgcagtgagccgagattgtgccactgcactccagcctaggtgatgagagtgacactctgtctcaaaaaaaaataaaaataagagaagctctgatattgaccttcatcatgttccccatttagacacctagctcccctgtttgacaaccctaagttggataaggagctgcgggcaatgctgagagagaagtttcctgagttctgcagctcaccctccccacctgtggaaggtatgaggcccgcccattccatcacctgtgtcaaaagaggggcaagacaaccaggccttcaggccagagcccctttcaggatgtcccacacagttctccacttccgtgacactgtccatcacagtttttccttcctcagtttatcttttttattcatttttgtgttgtctgtcttgattctc

SEQ ID NO: 51454 - DNA, 354 bp, Homo sapiens
tagcacagggcatctggagccagcaaagcagttttagagcgggagcctgcttcggggatgcttgaaggtgggcactggggtcaggctgctggctcaggcccagctggtcttgcagcaaagccgccgcagggaagatgaacctgtacgagtcatttgcccaggctacccagctgggcgatctgcacacctgcctgatgatggacatgaaggcctgccaggaggacgatgtgcggctcctgtgccacctcacgccctccatctacacagaggtcagtgcctgcatccgtatctgtgccggggggctcacaggaacacacctcagtgaacactctgagtacacacaaccctgaaccc

SEQ ID NO: 51455 - DNA, 393 bp, Homo sapiens
cggctactcccaagattgcatgtgtttgtttaaaagtgacctgctactacctcaccattagcccactgggacttgcttcctctttaaaattttatgtaacactgatgctcctgttttgatgtgtatgaaccttaatctatgtgatatgtgactttgtgaacattgaattttttaattgagacctggggcaaggcatagttgtagctatttttatcctctttcctggcacttcttccctgtttggcacttccagcccctgcttcttatcccaagactggtatggcattgctgtgtgttaattctgccccacaaagtttcatagcaagcactaaagactgttacctggaaataagaaactcttggcctgttgggggcctcagtgcaggactcagg

SEQ ID NO: 51456 - DNA, 393 bp, Homo sapiens
attctttttttccccttttgaaatcaggtggagatgttacagccaaaaatatctggttggcagaaagtgttctggatatcctgacagagcaaaggtagcatccaccacgaagggtggggtacaggccagataatggccattaggagtgtgggtgtgggaaatggggatgaaaggattgtgtggcccaagaacaccttaagttagagagggggaggcaaggagagggagagacaagtgtattgttggcaagtgaagaaattaatgcccaaggaatgaaggaatgggaaagaggtctttgccaaaatatcgcatagcccagaaaaactggcttcatctgataagggtttatttttgatccagacctccttggaatgtttatcttagggggaagtt

SEQ ID NO: 51457 - DNA, 664 bp, Homo sapiens
cccgcccttccactatggccgcttctgtgtggtgtggggagacgctggtcctccccgtcctcccatagcgcttattgcctcaccctcaccccctaggggccggatccaaaggcgctgcactccccaagccttggggcatcagccaggaagtccctggcaatccagagatcccgatatctaggactgtccatccatccactccctgaccttttcccggctcctggctgcagccatggagttgcagaagggaaaaggggcggcagcagcagcagctgcttcgggagcagcgggaggtggaggaggaggagcgggagcaggagccccaggaggggggaggctgctactttcaaccagtttggatgccaaggatgagttataggagagattggaaaggtgtatgagcattgtgacatcgatgactgctggtgtctcggagagagaagccaatgatgccctcaatgcgtatgtgtgcaaaggcctcccccagcatgaagaaatctgcctgggcctgtttactctcatcctcactgaacctgcccaagcccagaagtgttaccgggacttagctctggtgagtcgtgatggcatgaatattgtcctgaataaaatcaaccagatacttatggagaagtacctgaagctgcaggatacctgccgtactcag

SEQ ID NO: 51458 - DNA, 4235 bp, Homo sapiens
cccgcccttccactatggccgcttctgtgtggtgtggggagacgctggtcctccccgtcctcccatagcgcttattgcctcaccctcaccccctaggggccggatccaaaggcgctgcactccccaagccttggggcatcagccaggaaggtttcctacctcctaattcaggggcaggactcctcttttccccccacggggaaaagaggcagaaacttaggggtttccctcctttcttagggtcagacgctcttagggtccacttcttcaggggcggaagcctctcctacccttcccataggggcacaggcctttaccccactgtacttcggagccaacgcctttccctcagcactgccaccccagagtcaggacccagaggactgtgccttcgcccccaacgcaggcgcggccttttggagaggagggaggagtggagaggacaggggcccttgctctcccctccccaacttgttcctcttgccccccagtccctggcaatccagagatcccgatatctaggactgtccatccatccactccctgaccttttcccggctcctggctgcagccatggagttgcagaagggaaaaggggcggcagcagcagcagctgcttcgggagcagcgggaggtggaggaggaggagcgggagcaggagccccaggaggggggaggctgctactttcaaccagtttggatgccaaggatgagttataggagagattggaaaggtgtatgagcattgtgacatcgatgactgctggtgtctcggagagagaagccaatgatgccctcaatgcgtatgtgtgcaaaggcctcccccagcatgaagaaatctgcctgggcctgtttactctcatcctcactgaacctgcccaagcccagaagtgttaccgggacttagctctggtgagtcgtgatggcatgaatattgtcctcatcgtggaccaccatgggactgcccagctccaggccctgcgacagaaggaagtagacttctgcatctcactgcttcgggaacggttcatggaatgtctgatgattggtcgggatctcgtaagactacttcagaatgttgctaggataccagaatttgaactgctttggaaagatattatccataatcctcaggccttgagtcctcagttcacaggtatcctacagcttcttcagtcaagaacatcccgaaaattcctagcatgtcgtctaaccccggacatggagactaaactcctcttcatgacatcccgggtgcgatttggtcaacaaaagcgataccaagattggttccagcgccagtacctgtcaactccagatagtcagtctctgcgctgtgacctcattcgctacatctgtggggtagtccacccttctaatgaagtactgagttcagatatcttgccccggtgggccatcattggttggctcctgacaacgtgcacgtcaaatgtcgctgcctccaatgccaagctggctttgttttatgactggctgttctttagtccagacaaggatagcattatgaacatagaaccagccatcctggtcatgcaccactccatgaagccccacccagccatcactgccacactcctggacttcatgtgccgcatcattcccaacttctatccaccattggagggccacgtgcggcagggtgtcttttcctccctcaaccacattgtggagaaacgggtcttggcacacctagctcccctgtttgacaaccctaagttggataaggagctgcgggcaatgctgagagagaagtttcctgagttctgcagctcaccctccccacctgtggaagtcaaaattgaggagccagtttccatggagatggacaaccatatgtcggataaggatgagagttgctatgacaatgcagaggcagccttcagtgacgatgaagaggatctcaacagcaaaggaaagaagagggagtttcgcttccaccctatcaaggagacagttgtggaggagccagttgatatcaccccttaccttgaccagttggatgagtccctgagggacaaagtactccagctacagaaggggagtgatacggaggcccagtgtgaggtcatgcaggaaattgtggaccaggtcctggaggaagactttgactcggagcagctgtctgtccttgcttcctgcctacaggagctcttcaaggcccactttcgaggggaggtcctgcctgaggagattactgaggagtccctggaggagtctgtaggaaagcctctgtacctaatatttaggaacctatgtcagatgcaggaagacaacagcagcttctctctacttctagaccttctctccgagctatatcagaagcagcccaagattggctaccacctgctctactacctgagggccagcaaagccgccgcagggaagatgaacctgtacgagtcatttgcccaggctacccagctgggcgatctgcacacctgcctgatgatggacatgaaggcctgccaggaggacgatgtgcggctcctgtgccacctcacgccctccatctacacagagtttccagatgaaaccttgaggagcggagagctgctgaacatgatcgtggctgttattgactctgcacagctccaggagctggtctgccacgtgatgatgggtaacctggttatgtttcgaaaagactcagttctcaacatactcattcagagcctagactgggagacctttgagcagtattgtgcctggcagctctttctggcccacaatattcccctggagaccataatccccatcctgcagcacctcaaatacaaggagcacccagaggccctgtcctgcctactgcttcaactccgaagagaaaagcccagcgaggagatggtgaagatggtgctgagccggccctgccatcctgacgaccagttcaccaccagcatcctgcggcactggtgcatgaaacatgacgagctgctggccgagcacatcaagtccctgctcatcaagaacaacagcctgcctcgcaagagacagagcctgaggagctctagcagcaagctggcccagctgactctggagcagatcctggagcacttggacaatctgcggctcaacctgaccaacaccaagcagaacttttttagccagacgccaattctccaggcgctgcagcatgtccaagcgagctgtgacgaagcccacaagatgaaattcagtgatctcttctccctggcggaggaatatgaggactcttccaccaagccacccaagagccggcgaaaagcagctctgtccagccctcgaagtcgaaagaatgccacacagccccccaatgccgaagaagagtcgggctccagcagtgcttcagaagaggaagacacgaaaccgaagcctaccaagcggaaacgaaaagggtcctctgcagtgggctctgacagtgactgaggccctgcattccccatcccacccccggctggactgccctctccttcttggtgattcaaaggttaatagaggctgaggagattgcaggggaaacacccttgctgcatccccaagctcccccggtggaaggaggagctttctcctctggctgagtttgagaagctgccatgcagcccctagccccttccctcctcctggggcctccagcccctcacactgctgttcccagtgatatttgggatctgactgaagccagaggctctgtaaaatcagaccatagtggaagtcctcagccccctggccccttccgcaatctcctcccccagtctcccaaagagccatttcaacagagaagggaaatgacaaaggggcagctggccagataagctaggatgagagcagagactcagtgtgtgggtgtcccttcctgcttccccttcaggtcttggtttgttctgaagggacgttttatagtcactatccacatgccagtgtgaaatgggcatctatgacgtggtcagggtgtccattcctaatcatggggcagatgccacaagcattcagaaaggagtctgaaagggtggccacagccccacgtggtgtgccctggaggcttaggttggtctgaggttggcacctcaatctacaccagagcccagggagtcccagaggcaagtttcacagaattgtcaaatgatcccatttccttgagtctgtttttttttttgtttttttttgttttttttttggcagagataatcgtgtcttaaaagttgtttttaaatgacaataaaacaagccagaatgtc

SEQ ID NO: 51459 - DNA, 3122 bp, Homo sapiens
tcggcacgaggaatcctcaggccttgagtcctcagttgcacaggtatcctacagcttcttcagtcaagaacatcccgaaaattcctagcatgtcgtctaaccccggacatggagactaaactcctcttcatgacatcccgggtgcgatttggtcaacaaaagcgataccaagattggttccagcgccagtacctgtcaactccagatagtcagtctctgcgctgtgacctcattcgctacatctgtggggtagtccacccttctaatgaagtactgagttcagatatcttgccccggtgggccatcattggttggctcctgacaacgtgcacgtcaaatgtcgctgcctccaatgccaagctggctttgttttatgactggctgttctttagtccagacaaggatagcattatgaacatagaaccagccatcctggtcatgcaccactccatgaagccccacccagccatcactgccacactcctggacttcatgtgccgcatcattcccaacttctatccaccattggagggccacgtgcggcagggtgtcttttcctccctcaaccacattgtggagaaacgggtcttggcacacctagctcccctgtttgacaaccctaagttggataaggagctgcgggcaatgctgagagagaagtttcctgagttctgcagctcaccctccccacctgtggaagtcaaaattgaggagccagtttccatggagatggacaaccatatgtcggataaggatgagagttgctatgacaatgcagaggcagccttcagtgacgatgaagaggatctcaacagcaaaggaaagaagagggagtttcgcttccaccctatcaaggagacagttgtggaggagccagttgatatcaccccttaccttgaccagttggatgagtccctgagggacaaagtactccagctacagaaggggagtgatacggaggcccagtgtgaggtcatgcaggaaattgtggaccaggtcctggaggaagactttgactcggagcagctgtctgtccttgcttcctgcctacaggagctcttcaaggcccactttcgaggggaggtcctgcctgaggagattactgaggagtccctggaggagtctgtaggaaagcctctgtacctaatatttaggaacctatgtcagatgcaggaagacaacagcagcttctctctacttctagaccttctctccgagctatatcagaagcagcccaagattggctaccacctgctctactacctgagggccagcaaagccgccgcagggaagatgaacctgtacgagtcatttgcccaggctacccagctgggcgatctgcacacctgcctgatgatggacatgaaggcctgccaggaggacgatgtgcggctcctgtgccacctcacgccctccatctacacagagtttccagatgaaaccttgaggagcggagagctgctgaacatgatcgtggctgttattgactctgcacagctccaggagctggtctgccacgtgatgatgggtaacctggttatgtttcgaaaagactcagttctcaacatactcattcagagcctagactgggagacctttgagcagtattgtgcctggcagctctttctggcccacaatattcccctggagaccataatccccatcctgcagcacctcaaatacaaggagcacccagaggccctgtcctgcctactgcttcaactccgaagagaaaagcccagcgaggagatggtgaagatggtgctgagccggccctgccatcctgacgaccagttcaccaccagcatcctgcggcactggtgcatgaaacatgacgagctgctggccgagcacatcaagtccctgctcatcaagaacaacagcctgcctcgcaagagacagagcctgaggagctctagcagcaagctggcccagctgactctggagcagatcctggagcacttggacaatctgcggctcaacctgaccaacaccaagcagaacttttttagccagacgccaattctccaggcgctgcagcatgtccaagcgagctgtgacgaagcccacaagatgaaattcagtgatctcttctccctggcggaggaatatgaggactcttccaccaagccacccaagagccggcgaaaagcagctctgtccagccctcgaagtcgaaagaatgccacacagccccccaatgccgaagaagagtcgggctccagcagtgcttcagaagaggaagacacgaaaccgaagcctaccaagcggaaacgaaaagggtcctctgcagtgggctctgacagtgactgaggccctgcattccccatcccacccccggctggactgccctctccttcttggtgattcaaaggttaatagaggctgaggagattgcaggggaaacacccttgctgcatccccaagctcccccggtggaaggaggagctttctcctctggctgagtttgagaagctgccatgcagcccctagccccttccctcctcctggggcctccagcccctcacactgctgttcccagtgatatttgggatctgactgaagccagaggctctgtaaaatcagaccatagtggaagtcctcagccccctggccccttccgcaatctcctcccccagtctcccaaagagccatttcaacagagaagggaaatgacaaaggggcagctggccagataagctaggatgagagcagagactcagtgtgtgggtgtcccttcctgcttccccttcaggtcttggtttgttctgaagggacgttttatagtcactatccacatgccagtgtgaaatgggcatctatgacgtggtcagggtgtccattcctaatcatggggcagatgccacaagcattcagaaaggagtctgaaagggtggccacagccccacgtggtgtgccctggaggcttaggttggtctgaggttggcacctcaatctacaccagagcccagggagtcccagaggcaagtttcacagaattgtcaaatgatcccatttccttgagtctgtttttttttttgtttttttttgttttttttttggcagagataatcgtgtcttaaaagttgtttttaaatgacaataaaacaagccagaatgtc

SEQ ID NO: 51460 - DNA, 2832 bp, Homo sapiens
catccggtaccactagtcacggttggctctgacaacgtgcacgtcaaatgtcgctgcctccaatgccaagctggctttgttttatgactggctgttctttagtccagacaaggatagcattatgaacatagaaccagccatcctggtcatgcaccactccatgaagccccacccagccatcactgccacactcctggacttcatgtgccgcatcattcccaacttctatccaccattggagggccacgtgcggcagggtgtcttttcctccctcaaccacattgtggagaaacgggtcttggcacacctagctcccctgtttgacaaccctaagttggataaggagctgcgggcaatgctgagagagaagtttcctgagttctgcagctcaccctccccacctgtggaagtcaaaattgaggagccagtttccatggagatggacaaccatatgtcggataaggatgagagttgctatgacaatgcagaggcagccttcagtgacgatgaagaggatctcaacagcaaaggaaagaagagggagtttcgcttccaccctatcaaggagacagttgtggaggagccagttgatatcaccccttaccttgaccagttggatgagtccctgagggacaaagtactccagctacagaaggggagtgatacggaggcccagtgtgaggtcatgcaggaaattgtggaccaggtcctggaggaagactttgactcggagcagctgtctgtccttgcttcctgcctacaggagctcttcaaggcccactttcgaggggaggtcctgcctgaggagattactgaggagtccctggaggagtctgtaggaaagcctctgtacctaatatttaggaacctatgtcagatgcaggaagacaacagcagcttctctctacttctagaccttctctccgagctatatcagaagcagcccaagattggctaccacctgctctactacctgagggccagcaaagccgccgcagggaagatgaacctgtacgagtcatttgcccaggctacccagctgggcgatctgcacacctgcctgatgatggacatgaaggcctgccaggaggacgatgtgcggctcctgtgccacctcacgccctccatctacacagagtttccagatgaaaccttgaggagcggagagctgctgaacatgatcgtggctgttattgactctgcacagctccaggagctggtctgccacgtgatgatgggtaacctggttatgtttcgaaaagactcagttctcaacatactcattcagagcctagactgggagacctttgagcagtattgtgcctggcagctctttctggcccacaatattcccctggagaccataatccccatcctgcagcacctcaaatacaaggagcacccagaggccctgtcctgcctactgcttcaactccgaagagaaaagcccagcgaggagatggtgaagatggtgctgagccggccctgccatcctgacgaccagttcaccaccagcatcctgcggcactggtgcatgaaacatgacgagctgctggccgagcacatcaagtccctgctcatcaagaacaacagcctgcctcgcaagagacagagcctgaggagctctagcagcaagctggcccagctgactctggagcagatcctggagcacttggacaatctgcggctcaacctgaccaacaccaagcagaacttttttagccagacgccaattctccaggcgctgcagcatgtccaagcgagctgtgacgaagcccacaagatgaaattcagtgatctcttctccctggcggaggaatatgaggactcttccaccaagccacccaagagccggcgaaaagcagctctgtccagccctcgaagtcgaaagaatgccacacagccccccaatgccgaagaagagtcgggctccagcagtgcttcagaagaggaagacacgaaaccgaagcctaccaagcggaaacgaaaagggtcctctgcagtgggctctgacagtgactgaggccctgcattccccatcccacccccggctggactgccctctccttcttggtgattcaaaggttaatagaggctgaggagattgcaggggaaacacccttgctgcatccccaagctcccccggtggaaggaggagctttctcctctggctgagtttgagaagctgccatgcagcccctagccccttccctcctcctggggcctccagcccctcacactgctgttcccagtgatatttgggatctgactgaagccagaggctctgtaaaatcagaccatagtggaagtcctcagccccctggccccttccgcaatctcctcccccagtctcccaaagagccatttcaacagagaagggaaatgacaaaggggcagctggccagataagctaggatgagagcagagactcagtgtgtgggtgtcccttcctgcttccccttcaggtcttggtttgttctgaagggacgttttatagtcactatccacatgccagtgtgaaatgggcatctatgacgtggtcagggtgtccattcctaatcatggggcagatgccacaagcattcagaaaggagtctgaaagggtggccacagccccacgtggtgtgccctggaggcttaggttggtctgaggttggcacctcaatctacaccagagcccagggagtcccagaggcaagtttcacagaattgtcaaatgatcccatttccttgagtctgtttttttttttgtttttttttgttttttttttggcagagataatcgtgtcttaaaagttgtttttaaatgacaataaaacaagccagaatgtc

SEQ ID NO: 51461 - DNA, 2676 bp, Homo sapiens
gagacagagtctcgctgtgtcgcccaggctggagtacatgttgctcttattcctggcaacatccctctgcaggtcatggagggttgtgaggacaagaggtttgtcaagaggtttgtcctcccagggtcagtattccatttagatgataaactccttattctctcacttgccctccattctcccttcctagaagcatggggcatgttagaggacccaggaggccattaaatgccttatctttttttactcccaagtcaaaattgaggagccagtttccatggagatggacaaccatatgtcggataaggatgagagttgctatgacaatgcagaggcagccttcagtgacgatgaagaggatctcaacagcaaaggaaagaagagggagtttcgcttccaccctatcaaggagacagttgtggaggagccagttgatatcaccccttaccttgaccagttggatgagtccctgagggacaaagtactccagctacagaaggggagtgatacggaggcccagtgtgaggtcatgcaggaaattgtggaccaggtcctggaggaagactttgactcggagcagctgtctgtccttgcttcctgcctacaggagctcttcaaggcccactttcgaggggaggtcctgcctgaggagattactgaggagtccctggaggagtctgtaggaaagcctctgtacctaatatttaggaacctatgtcagatgcaggaagacaacagcagcttctctctacttctagaccttctctccgagctatatcagaagcagcccaagattggctaccacctgctctactacctgagggccagcaaagccgccgcagggaagatgaacctgtacgagtcatttgcccaggctacccagctgggcgatctgcacacctgcctgatgatggacatgaaggcctgccaggaggacgatgtgcggctcctgtgccacctcacgccctccatctacacagagtttccagatgaaaccttgaggagcggagagctgctgaacatgatcgtggctgttattgactctgcacagctccaggagctggtctgccacgtgatgatgggtaacctggttatgtttcgaaaagactcagttctcaacatactcattcagagcctagactgggagacctttgagcagtattgtgcctggcagctctttctggcccacaatattcccctggagaccataatccccatcctgcagcacctcaaatacaaggagcacccagaggccctgtcctgcctactgcttcaactccgaagagaaaagcccagcgaggagatggtgaagatggtgctgagccggccctgccatcctgacgaccagttcaccaccagcatcctgcggcactggtgcatgaaacatgacgagctgctggccgagcacatcaagtccctgctcatcaagaacaacagcctgcctcgcaagagacagagcctgaggagctctagcagcaagctggcccagctgactctggagcagatcctggagcacttggacaatctgcggctcaacctgaccaacaccaagcagaacttttttagccagacgccaattctccaggcgctgcagcatgtccaagcgagctgtgacgaagcccacaagatgaaattcagtgatctcttctccctggcggaggaatatgaggactcttccaccaagccacccaagagccggcgaaaagcagctctgtccagccctcgaagtcgaaagaatgccacacagccccccaatgccgaagaagagtcgggctccagcagtgcttcagaagaggaagacacgaaaccgaagcctaccaagcggaaacgaaaagggtcctctgcagtgggctctgacagtgactgaggccctgcattccccatcccacccccggctggactgccctctccttcttggtgattcaaaggttaatagaggctgaggagattgcaggggaaacacccttgctgcatccccaagctcccccggtggaaggaggagctttctcctctggctgagtttgagaagctgccatgcagcccctagccccttccctcctcctggggcctccagcccctcacactgctgttcccagtgatatttgggatctgactgaagccagaggctctgtaaaatcagaccatagtggaagtcctcagccccctggccccttccgcaatctcctcccccagtctcccaaagagccatttcaacagagaagggaaatgacaaaggggcagctggccagataagctaggatgagagcagagactcagtgtgtgggtgtcccttcctgcttccccttcaggtcttggtttgttctgaagggacgttttatagtcactatccacatgccagtgtgaaatgggcatctatgacgtggtcagggtgtccattcctaatcatggggcagatgccacaagcattcagaaaggagtctgaaagggtggccacagccccacgtggtgtgccctggaggcttaggttggtctgaggttggcacctcaatctacaccagagcccagggagtcccagaggcaagtttcacagaattgtcaaatgatcccatttccttgagtctgtttttttttttgtttttttttgttttttttttggcagagataatcgtgtcttaaaagttgtttttaaatgacaataaaacaagccagaatgtc

SEQ ID NO: 51462 - DNA, 4203 bp, Homo sapiens
atattcaagcggctactcccaagattgcatgtgtttgtttaaaagtgacctgctactacctcaccattagcccactgggacttgcttcctctttaaaattttatgtaacactgatgctcctgttttgatgtgtatgaaccttaatctatgtgatatgtgactttgtgaacattgaattttttaattgagacctggggcaaggcatagttgtagctatttttatcctctttcctggcacttcttccctgtttggcacttccagcccctgcttcttatcccaagactggtatggcattgctgtgtgttaattctgccccacaaagtttcatagcaagcactaaagactgttacctggaaataagaaactcttggcctgttgggggcctcagtgcaggactcaggacatccagttgctagactgcagctgttgtcagccacctgtacttctcaggctctatctgagatatcatcctttctttccaactgtgggcttcttatatctacttctcagacgttcattttcaagggccaaaatgttcccactccaactcacaatctgtgggaaagtagcagctctggtttctagaaaaattcagaaccttccctttccttctttctggaggcaaagggtgaaactttaaagcctgacagaacagaaggcagtttatctcagcagtgaagggatggcagtaatgggatggcagtcagggtggaccagcagaatgggtgaagagatgtattggattggctgacttgctaatcggagctattctttttttccccttttgaaatcaggtggagatgttacagccaaaaatatctggttggcagaaagtgttctggatatcctgacagagcaaagggagtgggtcctgaagagcagcatcctcattgccatggctgtttacacgtacctccgcctcatcgtggaccaccatgggactgcccagctccaggccctgcgacagaaggaagtagacttctgcatctcactgcttcgggaacggttcatggaatgtctgatgattggtcgggatctcgtaagactacttcagaatgttgctaggataccagaatttgaactgctttggaaagatattatccataatcctcaggccttgagtcctcagttcacaggtatcctacagcttcttcagtcaagaacatcccgaaaattcctagcatgtcgtctaaccccggacatggagactaaactcctcttcatgacatcccgggtgcgatttggtcaacaaaagcgataccaagattggttccagcgccagtacctgtcaactccagatagtcagtctctgcgctgtgacctcattcgctacatctgtggggtagtccacccttctaatgaagtactgagttcagatatcttgccccggtgggccatcattggttggctcctgacaacgtgcacgtcaaatgtcgctgcctccaatgccaagctggctttgttttatgactggctgttctttagtccagacaaggatagcattatgaacatagaaccagccatcctggtcatgcaccactccatgaagccccacccagccatcactgccacactcctggacttcatgtgccgcatcattcccaacttctatccaccattggagggccacgtgcggcagggtgtcttttcctccctcaaccacattgtggagaaacgggtcttggcacacctagctcccctgtttgacaaccctaagttggataaggagctgcgggcaatgctgagagagaagtttcctgagttctgcagctcaccctccccacctgtggaagtcaaaattgaggagccagtttccatggagatggacaaccatatgtcggataaggatgagagttgctatgacaatgcagaggcagccttcagtgacgatgaagaggatctcaacagcaaaggaaagaagagggagtttcgcttccaccctatcaaggagacagttgtggaggagccagttgatatcaccccttaccttgaccagttggatgagtccctgagggacaaagtactccagctacagaaggggagtgatacggaggcccagtgtgaggtcatgcaggaaattgtggaccaggtcctggaggaagactttgactcggagcagctgtctgtccttgcttcctgcctacaggagctcttcaaggcccactttcgaggggaggtcctgcctgaggagattactgaggagtccctggaggagtctgtaggaaagcctctgtacctaatatttaggaacctatgtcagatgcaggaagacaacagcagcttctctctacttctagaccttctctccgagctatatcagaagcagcccaagattggctaccacctgctctactacctgagggccagcaaagccgccgcagggaagatgaacctgtacgagtcatttgcccaggctacccagctgggcgatctgcacacctgcctgatgatggacatgaaggcctgccaggaggacgatgtgcggctcctgtgccacctcacgccctccatctacacagagtttccagatgaaaccttgaggagcggagagctgctgaacatgatcgtggctgttattgactctgcacagctccaggagctggtctgccacgtgatgatgggtaacctggttatgtttcgaaaagactcagttctcaacatactcattcagagcctagactgggagacctttgagcagtattgtgcctggcagctctttctggcccacaatattcccctggagaccataatccccatcctgcagcacctcaaatacaaggagcacccagaggccctgtcctgcctactgcttcaactccgaagagaaaagcccagcgaggagatggtgaagatggtgctgagccggccctgccatcctgacgaccagttcaccaccagcatcctgcggcactggtgcatgaaacatgacgagctgctggccgagcacatcaagtccctgctcatcaagaacaacagcctgcctcgcaagagacagagcctgaggagctctagcagcaagctggcccagctgactctggagcagatcctggagcacttggacaatctgcggctcaacctgaccaacaccaagcagaacttttttagccagacgccaattctccaggcgctgcagcatgtccaagcgagctgtgacgaagcccacaagatgaaattcagtgatctcttctccctggcggaggaatatgaggactcttccaccaagccacccaagagccggcgaaaagcagctctgtccagccctcgaagtcgaaagaatgccacacagccccccaatgccgaagaagagtcgggctccagcagtgcttcagaagaggaagacacgaaaccgaagcctaccaagcggaaacgaaaagggtcctctgcagtgggctctgacagtgactgaggccctgcattccccatcccacccccggctggactgccctctccttcttggtgattcaaaggttaatagaggctgaggagattgcaggggaaacacccttgctgcatccccaagctcccccggtggaaggaggagctttctcctctggctgagtttgagaagctgccatgcagcccctagccccttccctcctcctggggcctccagcccctcacactgctgttcccagtgatatttgggatctgactgaagccagaggctctgtaaaatcagaccatagtggaagtcctcagccccctggccccttccgcaatctcctcccccagtctcccaaagagccatttcaacagagaagggaaatgacaaaggggcagctggccagataagctaggatgagagcagagactcagtgtgtgggtgtcccttcctgcttccccttcaggtcttggtttgttctgaagggacgttttatagtcactatccacatgccagtgtgaaatgggcatctatgacgtggtcagggtgtccattcctaatcatggggcagatgccacaagcattcagaaaggagtctgaaagggtggccacagccccacgtggtgtgccctggaggcttaggttggtctgaggttggcacctcaatctacaccagagcccagggagtcccagaggcaagtttcacagaattgtcaaatgatcccatttccttgagtctgtttttttttttgtttttttttgttttttttttttttttttttttttttttatattttttttttatacaaaaaaaaagggc

SEQ ID NO: 51463 - DNA, 5084 bp, Homo sapiens
atattcaagcggctactcccaagattgcatgtgtttgtttaaaagtgacctgctactacctcaccattagcccactgggacttgcttcctctttaaaattttatgtaacactgatgctcctgttttgatgtgtatgaaccttaatctatgtgatatgtgactttgtgaacattgaattttttaattgagacctggggcaaggcatagttgtagctatttttatcctctttcctggcacttcttccctgtttggcacttccagcccctgcttcttatcccaagactggtatggcattgctgtgtgttaattctgccccacaaagtttcatagcaagcactaaagactgttacctggaaataagaaactcttggcctgttgggggcctcagtgcaggactcaggacatccagttgctagactgcagctgttgtcagccacctgtacttctcaggctctatctgagatatcatcctttctttccaactgtgggcttcttatatctacttctcagacgttcattttcaagggccaaaatgttcccactccaactcacaatctgtgggaaagtagcagctctggtttctagaaaaattcagaaccttccctttccttctttctggaggcaaagggtgaaactttaaagcctgacagaacagaaggcagtttatctcagcagtgaagggatggcagtaatgggatggcagtcagggtggaccagcagaatgggtgaagagatgtattggattggctgacttgctaatcggagctattctttttttccccttttgaaatcaggtggagatgttacagccaaaaatatctggttggcagaaagtgttctggatatcctgacagagcaaagggagtgggtcctgaagagcagcatcctcattgccatggctgtttacacgtacctccgcctcatcgtggaccaccatgggactgcccagctccaggccctgcgacagaaggaagtagacttctgcatctcactgcttcgggaacggttcatggaatgtctgatgattggtcgggatctcgtaagactacttcagaatgttgctaggataccagaatttgaactgctttggaaagatattatccataatcctcaggccttgagtcctcagttcacaggtatcctacagcttcttcagtcaagaacatcccgaaaattcctagcatgtcgtctaaccccggacatggagactaaactcctcttcatgacatcccgggtgcgatttggtcaacaaaagcgataccaagattggttccagcgccagtacctgtcaactccagatagtcagtctctgcgctgtgacctcattcgctacatctgtggggtagtccacccttctaatgaagtactgagttcagatatcttgccccggtgggccatcattggttggctcctgacaacgtgcacgtcaaatgtcgctgcctccaatgccaagctggctttgttttatgactggctgttctttagtccagacaaggatagcattatgaacatagaaccagccatcctggtcatgcaccactccatgaagccccacccagccatcactgccacactcctggacttcatgtgccgcatcattcccaacttctatccaccattggagggccacgtgcggcagggtgtcttttcctccctcaaccacattgtggagaaacgggtcttggcacacctagctcccctgtttgacaaccctaagttggataaggagctgcgggcaatgctgagagagaagtttcctgagttctgcagctcaccctccccacctgtggaagtcaaaattgaggagccagtttccatggagatggacaaccatatgtcggataaggatgagagttgctatgacaatgcagaggcagccttcagtgacgatgaagaggatctcaacagcaaaggaaagaagagggagtttcgcttccaccctatcaaggagacagttgtggaggagccagttgatatcaccccttaccttgaccagttggatgagtccctgagggacaaagtactccagctacagaaggggagtgatacggaggcccagtgtgaggtcatgcaggaaattgtggaccaggtcctggaggaagactttgactcggagcagctgtctgtccttgcttcctgcctacaggagctcttcaaggcccactttcgaggggaggtcctgcctgaggagattactgaggagtccctggaggagtctgtaggaaagcctctgtacctaatatttaggaacctatgtcagatgcaggaagacaacagcagcttctctctacttctagaccttctctccgagctatatcagaagcagcccaagattggctaccacctgctctactacctgagggccagcaaagccgccgcagggaagatgaacctgtacgagtcatttgcccaggctacccagctgggcgatctgcacacctgcctgatgatggacatgaaggcctgccaggaggacgatgtgcggctcctgtgccacctcacgccctccatctacacagagtttccagatgaaaccttgaggagcggagagctgctgaacatgatcgtggctgttattgactctgcacagctccaggagctggtctgccacgtgatgatgggtaacctggttatgtttcgaaaagactcagttctcaacatactcattcagagcctagactgggagacctttgagcagtattgtgcctggcagctctttctggcccacaatattcccctggagaccataatccccatcctgcagcacctcaaatacaaggagcacccagaggccctgtcctgcctactgcttcaactccgaagagaaaagcccagcgaggagatggtgaagatggtgctgagccggccctgccatcctgacgaccagttcaccaccagcatcctgcggcactggtgcatgaaacatgacgagctgctggccgagcacatcaagtccctgctcatcaagaacaacagcctgcctcgcaagagacagagcctgaggagctctagcagcaagctggcccagctgactctggagcagatcctggagcacttggacaatctgcggctcaacctgaccaacaccaagcagaactgtatgccttccaccctcggcgtccagtgtagacggtgctgccctggcccagactatgcctggagccaggctgggggcaggggcaggacacccggggccacaacccacactcgggataaaacaacctgtgcgtgctgtttaataagctcccagacatctgattgtttttccttccctgctctcccttttcttcctctagtttttagccagacgccaattctccaggcgctgcagcatgtccaagcgagctgtgacgaagcccacaagatgaaattcagtgatctcttctccctggcggaggaatatgaggactcttccaccaagccacccaagagccggcgaaaagcagctctgtccagccctcgaagtcgaaagaatgccacacagccccccaatgccgaagaagagtcgggctccagcagtgcttcagaagaggaagacacgaaaccgaagcctaccaagcggaaacgaaaagggtcctctgcagtgggctctgacagtgactgaggccctgcattccccatcccacccccggctggactgccctctccttcttggtgattcaaaggttaatagaggctgaggagattgcaggggaaacacccttgctgcatccccaagctcccccggtggaaggaggagctttctcctctggctgagtttgagaagctgccatgcagcccctagccccttccctcctcctggggcctccagcccctcacactgctgttcccagtgatatttgggatctgactgaagccagaggctctgtaaaatcagaccatagtggaagtcctcagccccctggccccttccgcaatctcctcccccagtctcccaaagagccatttcaacagagaagggaaatgacaaaggggcagctggccagataagctaggatgagagcagagactcagtgtgtgggtgtcccttcctgcttccccttcaggtcttggtttgttctgaagggacgttttatagtcactatccacatgccagtgtgaaatgggcatctatgacgtggtcagggtgtccattcctaatcatggggcagatgccacaagcattcagaaaggagtctgaaagggtggccacagccccacgtggtgtgccctggaggcttaggttggtctgaggttggcacctcaatctacaccagagcccagggagtcccagaggcaagtttcacagaattgtcaaatgatcccatttccttgagtctgtttttttttttgtttttttttgttttttttttggcagagataatcgtgtcttaaaagttgtttttaaatgacaataaaacaagccagaatgtcaaaaaaaaaaaaaaaaaaaaaaaaaaaaacaacaaaaaaaaataaacaaaaaacaaaaaaaaaaaaaaaaaaaaacaaaaaaaaaaacaacaaaaacaaaacaaaaaaaaaaaaacaaaaaaagaagggagcggggcgcggcgcgagaggagaagcatccacacaacgaggcgcgagggagcgaacgacgagaacaaaagacgaagcatagttagaagaggaagaggcgcggcgccgcaaacataggggagggaacgatagcgaagagaggcgagggaggagcgggagggtagaaagaaaacgaacgcacgaagggagagacgagagaaagaaaaaggaagtatgagctgagagaaggacagataatagggataagggaagggcagaaactaacacatgagtgtgagggaggaagaagaaacatcaggaggggcagcgagaaagatcacagacgtacagcgaaaggaggtaagagagggcgggagtagggagaaaagaataagagaaggaagtaaggaggagggatatgagagagagtgggagagcaacaagcaaaagagagatagtttatatgatgcggagaggtaggaggaaaagacggtagagggagacgagagcagtaggtgataatataagcaagaagacaaataatcatatacaaaggggaggg

SEQ ID NO: 51464 - DNA, 2342 bp, Homo sapiens
ctagaggatacccgaaacactgtcgatggctgttatgactctgcacactccaggagctggtctgccacgtgatgatgggtaacctggttatgtttcgaaaagactcagttctcaacatactcattcagagcctagactgggagacctttgagcagtattgtgcctggcagctctttctggcccacaatattcccctggagaccataatccccatcctgcagcacctcaaatacaaggagcacccagaggccctgtcctgcctactgcttcaactccgaagagaaaagcccagcgaggagatggtgaagatggtgctgagccggccctgccatcctgacgaccagttcaccaccagcatcctgcggcactggtgcatgaaacatgacgagctgctggccgagcacatcaagtccctgctcatcaagaacaacagcctgcctcgcaagagacagagcctgaggagctctagcagcaagctggcccagctgactctggagcagatcctggagcacttggacaatctgcggctcaacctgaccaacaccaagcagaacttttttagccagacgccaattctccaggcgctgcagcatgtccaagcgagctgtgacgaagcccacaagatgaaattcagtgatctcttctccctggcggaggaatatgaggactcttccaccaagccacccaagagccggcgaaaagcagctctgtccagccctcgaagtcgaaagaatgccacacagccccccaatgccgaagaagagtcgggctccagcagtgcttcagaagaggaagacacgaaaccgaagcctaccaagcggaaacgaaaagggtcctctgcagtgggctctgacagtgactgaggccctgcattccccatcccacccccggctggactgccctctccttcttggtgattcaaaggttaatagaggctgaggagattgcaggggaaacacccttgctgcatccccaagctcccccggtggaaggaggagctttctcctctggctgagtttgagaagctgccatgcagcccctagccccttccctcctcctggggcctccagcccctcacactgctgttcccagtgatatttgggatctgactgaagccagaggctctgtaaaatcagaccatagtggaagtcctcagccccctggccccttccgcaatctcctcccccagtctcccaaagagccatttcaacagagaagggaaatgacaaaggggcagctggccagataagctaggatgagagcagagactcagtgtgtgggtgtcccttcctgcttccccttcaggtcttggtttgttctgaagggacgttttatagtcactatccacatgccagtgtgaaatgggcatctatgacgtggtcagggtgtccattcctaatcatggggcagatgccacaagcattcagaaaggagtctgaaagggtggccacagccccacgtggtgtgccctggaggcttaggttggtctgaggttggcacctcaatctacaccagagcccagggagtcccagaggcaagtttcacagaattgtcaaatgatcccatttccttgagtctgtttttttttttgtttttttttgttttttttttggcagagataatcgtgtcttaaaagttgtttttaaatgacaataaaacaagccagaatgtcaaaaaaaaaaaaaaaaaaaaaaaaaaaaacaacaaaaaaaaataaacaaaaaacaaaaaaaaaaaaaaaaaaaaacaaaaaaaaaaacaacaaaaacaaaacaaaaaaaaaaaaacaaaaaaagaagggagcggggcgcggcgcgagaggagaagcatccacacaacgaggcgcgagggagcgaacgacgagaacaaaagacgaagcatagttagaagaggaagaggcgcggcgccgcaaacataggggagggaacgatagcgaagagaggcgagggaggagcgggagggtagaaagaaaacgaacgcacgaagggagagacgagagaaagaaaaaggaagtatgagctgagagaaggacagataatagggataagggaagggcagaaactaacacatgagtgtgagggaggaagaagaaacatcaggaggggcagcgagaaagatcacagacgtacagcgaaaggaggtaagagagggcgggagtagggagaaaagaataagagaaggaagtaaggaggagggatatgagagagagtgggagagcaacaagcaaaagagagatagtttatatgatgcggagaggtaggaggaaaagacggtagagggagacgagagcagtaggtgataatataagcaagaagacaaataatcatatacaaaggggaggg

SEQ ID NO: 51465 - DNA, 2622 bp, Homo sapiens
atattcaagcggctactcccaagattgcatgtgtttgtttaaaagtgacctgctactacctcaccattagcccactgggacttgcttcctctttaaaattttatgtaacactgatgctcctgttttgatgtgtatgaaccttaatctatgtgatatgtgactttgtgaacattgaattttttaattgagacctggggcaaggcatagttgtagctatttttatcctctttcctggcacttcttccctgtttggcacttccagcccctgcttcttatcccaagactggtatggcattgctgtgtgttaattctgccccacaaagtttcatagcaagcactaaagactgttacctggaaataagaaactcttggcctgttgggggcctcagtgcaggactcaggacatccagttgctagactgcagctgttgtcagccacctgtacttctcaggctctatctgagatatcatcctttctttccaactgtgggcttcttatatctacttctcagacgttcattttcaagggccaaaatgttcccactccaactcacaatctgtgggaaagtagcagctctggtttctagaaaaattcagaaccttccctttccttctttctggaggcaaagggtgaaactttaaagcctgacagaacagaaggcagtttatctcagcagtgaagggatggcagtaatgggatggcagtcagggtggaccagcagaatgggtgaagagatgtattggattggctgacttgctaatcggagctattctttttttccccttttgaaatcaggtggagatgttacagccaaaaatatctggttggcagaaagtgttctggatatcctgacagagcaaagggagtgggtcctgaagagcagcatcctcattgccatggctgtttacacgtacctccgcctcatcgtggaccaccatgggactgcccagctccaggccctgcgacagaaggaagtagacttctgcatctcactgcttcgggaacggttcatggaatgtctgatgattggtcgggatctcgtaagactacttcagaatgttgctaggataccagaatttgaactgctttggaaagatattatccataatcctcaggccttgagtcctcagttcacaggtatcctacagcttcttcagtcaagaacatcccgaaaattcctagcatgtcgtctaaccccggacatggagactaaactcctcttcatgacatcccgggtgcgatttggtcaacaaaagcgataccaagattggttccagcgccagtacctgtcaactccagatagtcagtctctgcgctgtgacctcattcgctacatctgtggggtagtccacccttctaatgaagtactgagttcagatatcttgccccggtgggccatcattggttggctcctgacaacgtgcacgtcaaatgtcgctgcctccaatgccaagctggctttgttttatgactggctgttctttagtccagacaaggatagcattatgaacatagaaccagccatcctggtcatgcaccactccatgaagccccacccagccatcactgccacactcctggacttcatgtgccgcatcattcccaacttctatccaccattggagggccacgtgcggcagggtgtcttttcctccctcaaccacattgtggagaaacgggtcttggcacacctagctcccctgtttgacaaccctaagttggataaggagctgcgggcaatgctgagagagaagtttcctgagttctgcagctcaccctccccacctgtggaagtcaaaattgaggagccagtttccatggagatggacaaccatatgtcggataaggatgagagttgctatgacaatgcagaggcagccttcagtgacgatgaagaggatctcaacagcaaaggaaagaagagggagtttcgcttccaccctatcaaggagacagttgtggaggagccagttgatatcaccccttaccttgaccagttggatgagtccctgagggacaaagtactccagctacagaaggggagtgatacggaggcccagtgtgaggtcatgcaggaaattgtggaccaggtcctggaggaagactttgactcggagcagctgtctgtccttgcttcctgcctacaggagctcttcaaggcccactttcgaggggaggtcctgcctgaggagattactgaggagtccctggaggagtctgtaggaaagcctctgtacctaatatttaggaacctatgtcagatgcaggaagacaacagcagcttctctctacttctagaccttctctccgagctatatcagaagcagcccaagattggctaccacctgctctactacctgagggccagcaaagccgccgcagggaagatgaacctgtacgagtcatttgcccaggctacccagctgggcgatctgcacacctgccgcatgagagagactgactgtcggcaaaaacaaaaccaaaaccaacctttacccacttctcctaaacacccctaaaaaactgctctgaaaagcagggaatatcattgtgcaagtaagttgttttttccacgggtctgtctgcataaaacttgccacttagagctcgcctgcaccatcg

SEQ ID NO: 51466 - DNA, 2551 bp, Homo sapiens
atattcaagcggctactcccaagattgcatgtgtttgtttaaaagtgacctgctactacctcaccattagcccactgggacttgcttcctctttaaaattttatgtaacactgatgctcctgttttgatgtgtatgaaccttaatctatgtgatatgtgactttgtgaacattgaattttttaattgagacctggggcaaggcatagttgtagctatttttatcctctttcctggcacttcttccctgtttggcacttccagcccctgcttcttatcccaagactggtatggcattgctgtgtgttaattctgccccacaaagtttcatagcaagcactaaagactgttacctggaaataagaaactcttggcctgttgggggcctcagtgcaggactcaggacatccagttgctagactgcagctgttgtcagccacctgtacttctcaggctctatctgagatatcatcctttctttccaactgtgggcttcttatatctacttctcagacgttcattttcaagggccaaaatgttcccactccaactcacaatctgtgggaaagtagcagctctggtttctagaaaaattcagaaccttccctttccttctttctggaggcaaagggtgaaactttaaagcctgacagaacagaaggcagtttatctcagcagtgaagggatggcagtaatgggatggcagtcagggtggaccagcagaatgggtgaagagatgtattggattggctgacttgctaatcggagctattctttttttccccttttgaaatcaggtggagatgttacagccaaaaatatctggttggcagaaagtgttctggatatcctgacagagcaaagggagtgggtcctgaagagcagcatcctcattgccatggctgtttacacgtacctccgcctcatcgtggaccaccatgggactgcccagctccaggccctgcgacagaaggaagtagacttctgcatctcactgcttcgggaacggttcatggaatgtctgatgattggtcgggatctcgtaagactacttcagaatgttgctaggataccagaatttgaactgctttggaaagatattatccataatcctcaggccttgagtcctcagttcacaggtatcctacagcttcttcagtcaagaacatcccgaaaattcctagcatgtcgtctaaccccggacatggagactaaactcctcttcatgacatcccgggtgcgatttggtcaacaaaagcgataccaagattggttccagcgccagtacctgtcaactccagatagtcagtctctgcgctgtgacctcattcgctacatctgtggggtagtccacccttctaatgaagtactgagttcagatatcttgccccggtgggccatcattggttggctcctgacaacgtgcacgtcaaatgtcgctgcctccaatgccaagctggctttgttttatgactggctgttctttagtccagacaaggatagcattatgaacatagaaccagccatcctggtcatgcaccactccatgaagccccacccagccatcactgccacactcctggacttcatgtgccgcatcattcccaacttctatccaccattggagggccacgtgcggcagggtgtcttttcctccctcaaccacattgtggagaaacgggtcttggcacacctagctcccctgtttgacaaccctaagttggataaggagctgcgggcaatgctgagagagaagtttcctgagttctgcagctcaccctccccacctgtggaagtcaaaattgaggagccagtttccatggagatggacaaccatatgtcggataaggatgagagttgctatgacaatgcagaggcagccttcagtgacgatgaagaggatctcaacagcaaaggaaagaagagggagtttcgcttccaccctatcaaggagacagttgtggaggagccagttgatatcaccccttaccttgaccagttggatgagtccctgagggacaaagtactccagctacagaaggggagtgatacggaggcccagtgtgaggtcatgcaggaaattgtggaccaggtcctggaggaagactttgactcggagcagctgtctgtccttgcttcctgcctacaggagctcttcaaggcccactttcgaggggaggtcctgcctgaggagattactgaggagtccctggaggagtctgtaggaaagcctctgtacctaatatttaggaacctatgtcagatgcaggaagacaacagcagcttctctctacttctagaccttctctccgagctatatcagaagcagcccaagattggctaccacctgctctactacctgagggccagcaaagccgccgcagggaagatgaacctgtacgagtcatttgcccaggctacccagctgggcgatctgcacacctgctccgccctgcgcatgagagagactgactagtcggcttccacggtccaaaactaaccccacacactgctcctaactaaacctttttcctggtctgaaaagcaggcact

SEQ ID NO: 51467 - DNA, 2101 bp, Homo sapiens
atattcaagcggctactcccaagattgcatgtgtttgtttaaaagtgacctgctactacctcaccattagcccactgggacttgcttcctctttaaaattttatgtaacactgatgctcctgttttgatgtgtatgaaccttaatctatgtgatatgtgactttgtgaacattgaattttttaattgagacctggggcaaggcatagttgtagctatttttatcctctttcctggcacttcttccctgtttggcacttccagcccctgcttcttatcccaagactggtatggcattgctgtgtgttaattctgccccacaaagtttcatagcaagcactaaagactgttacctggaaataagaaactcttggcctgttgggggcctcagtgcaggactcaggacatccagttgctagactgcagctgttgtcagccacctgtacttctcaggctctatctgagatatcatcctttctttccaactgtgggcttcttatatctacttctcagacgttcattttcaagggccaaaatgttcccactccaactcacaatctgtgggaaagtagcagctctggtttctagaaaaattcagaaccttccctttccttctttctggaggcaaagggtgaaactttaaagcctgacagaacagaaggcagtttatctcagcagtgaagggatggcagtaatgggatggcagtcagggtggaccagcagaatgggtgaagagatgtattggattggctgacttgctaatcggagctattctttttttccccttttgaaatcaggtggagatgttacagccaaaaatatctggttggcagaaagtgttctggatatcctgacagagcaaagggagtgggtcctgaagagcagcatcctcattgccatggctgtttacacgtacctccgcctcatcgtggaccaccatgggactgcccagctccaggccctgcgacagaaggaagtagacttctgcatctcactgcttcgggaacggttcatggaatgtctgatgattggtcgggatctcgtaagactacttcagaatgttgctaggataccagaatttgaactgctttggaaagatattatccataatcctcaggccttgagtcctcagttcacaggtatcctacagcttcttcagtcaagaacatcccgaaaattcctagcatgtcgtctaaccccggacatggagactaaactcctcttcatgacatcccgggtgcgatttggtcaacaaaagcgataccaagattggttccagcgccagtacctgtcaactccagatagtcagtctctgcgctgtgacctcattcgctacatctgtggggtagtccacccttctaatgaagtactgagttcagatatcttgccccggtgggccatcattggttggctcctgacaacgtgcacgtcaaatgtcgctgcctccaatgccaagctggctttgttttatgactggctgttctttagtccagacaaggatagcattatgaacataggtatgtgaccaagaccaggcggctccacttccccatccccctaagcccccactgccttccttagtgatagcagtcataaatctcagggcaccgtggagtggaggcagtttatctgggagcagctctgttgttcctcatcagttttcccttgacctagaaagagaattgctttgataaggctaagccatcactgtacctcctccccacagtcttcaggatgcatggtcttcaggaggggagggcatgggcaaaggaaaaggctgtaccatgtcctgcttctcctcacctattacttcccttctcaaagctgaatgctgggaacaagaagggaaatgagggctacaagctgtttcggggcctgtctgctcttgggtctgctcagtggaaatggggggaatagacatagcacttcccagagccattcatgtatattgacatcccattttatggagatagaaacagactgactttagcctggcgtggtggcgcacacctgtaattccagctgctggggaggttgaggcatgagattcgcttgaacctgggaggcagaggcttcagtgagctgagatcgtaccatttgcac

SEQ ID NO: 51468 - DNA, 145 bp, Homo sapiens
tggtgattcctgcacagcctgaggagctctagcagcaagctggcccagctgactctggagcagatcctggagcacttggacaatctgcggctcaacctgaccaacaccaagcagaactgtatgccttccaccctcggcgtccagt

SEQ ID NO: 51469 - DNA, 526 bp, Homo sapiens
tttcagtgagaccctgacagtaaatgaaggtgtgtttgaaaaccaaacccaggacagtaaatgaaggtgtgtttgaaaaccagccctaggacagtaaatgaagccatcttctcactgcataaactgcacccagatctttgcccatccttctcagtatttcacttcacccattgtttactgtctcaatgactggggaaatgtctggggaaatgctcccgtaattgcacagtggcgtttttcctggaaaatcccaccatggctctagataagacctatttttcttaaaggtatctaaaatttccagcataaattctgtctgaaacacctgaattttaatcagtactggagcccggagggcatctccagttgccacatagctctgagcattcagtggtgtgttgagggctgctcccggaagtgcctgcagagtcagggctccccagcctcatctagtgaggcagtggaagggcctgtggggatttggagagctggcctgggtctctgaagtgatagtgacagctgcttg

SEQ ID NO: 51470 - DNA, 389 bp, Homo sapiens
cttagagatgctgcagtccaggcctaaatttatagagggagaccctgacacccaagaaagacaagtgccttccccaggatttcatagctcaggggaaagctttcacattttgcccttactatctgatggcaaactttaaacctcagaaagaaaagcaactaccatttggaaagaaacaacagcacctcattcgacaatgttttgcaattttttttgcaaggaaatattgtattaaggttaaaattaaaggctaaatataaaagtcccatattttgacatttaattcagatgccattttgtggttgctagaatggaggaaagcctattgcagtgtaaattaggatgattttgctcacactaaagaggacatggtcccagcctgaggccat

SEQ ID NO: 51471 - DNA, 207 bp, Homo sapiens
aatatgtttatcaggttcatacgtcaaaattacatatatacatattttgacagtctacagatggtatccatgagataagaatatactagatgtttgaaattacagctagttgtgaaggctttgccactaattcagtgtgacacgtgggcaagactgtcttctctggatctcattttcttatggaaaactgggatggttaaaactagg

SEQ ID NO: 51472 - DNA, 195 bp, Homo sapiens
taaaggacaaacattctaaccatagcaggagttccctatttccattaagacaaatttcaggattttagaaatgattgtttctgcttttggtttgtgcctttccacagtaacattattacagcattgttccaaactatctacaccaaatcaacagtaacgattttagctgtcagataatttacagcctgagtattt

SEQ ID NO: 51473 - DNA, 2121 bp, Homo sapiens
cacttaacacactcttgatgacatatggcaggttcttggtattgacacccgtgtggctgcaggtggcatgaatcatgcatggcttgtctggatctgtcttctgcagagcccattctctctgtcttttgctagtctggactggagagcaacttccctgagtcaggactcttgctgctaattgcagaaaaccagcagtctctgtgaagttgtggtgttctcagagttcagctgtaaaatatagaatcctcattaattgtatttacaactatattgagcaaaccaatgttgttctttattaatgtacagaccaaaaaagacacctcaaaagaaaggacgtacgcgtttcttgtaaacacgaggcaccccaagataagaagacagatagagcaagggatggacatggtcatctcctcagtgattggagaaagttaccggcttcagtttgattttcaagaggcagtgaagaatttcttccccccaggaaatgaagtggttaatggagaaaatttaagctttgcatatgaattcaaagctgatgcattatttgatttcttctattggtttgggctcagtaattccgttgtaaaagtaaatggaaaagttcaatagatgatgtttttaactgcaatctgtcacccagatcatctctgacagagcctcttttggcagaattaccatttccaagtgttctggaatctgaagagacacccaaccaatttatctgattgaactgaacattgtagcagttgctcccgcactccaggcctgtgctagactataggctggggggagggtaggaggtgggaggcagatacttccacctgcgtgtcaatctccggctcctccatggcttctatggaggactcctctcttctgcttctgtggatgtgatgccctggcaggcccagggcagctgattcccctaaaacttatgattaccaggatggaaaggccttggtcccatggcactgggtggggctgggggatattctctactttgaacacttctccaaagaggcagaagggccacagagttctgccaccctgaacatttttctcagttccctgggagtttttgtggcagcctttgtgggagtggtctgactggctgttgacctagcatgcttcataaatcagggtttggccctctgcttggagcatccaaccccttgaactcaaacctgtcgagcaaggggttaagagttctgttctcttgccaacctggctgggcaaaagcctgtgccatctttcactgggaggcaaatatgtttttcatcctgccatatgacacctatgagaaacgttcacagtgaggagtagccaggttgctaggacagtaaccctgccacacactgcctgaaatcggaactcccttggcctccctcttaactaagtgacccatgtagaaggaagccaggagatatggtaccgaacaatgacaggggaagggtattggacacggcagcgtcctccttattgaaaacacattatgtcagttgggaattttaaataagcttttagcaaacctaacactaaaagcaaaatagaagaaagctataccattaccataatacatttttcatctcatggctacaatggaattcttgaaaaggaaaaaaaaatcctatctacatataaaaacctgcatgaatgaatcactacatatgcttataatgaggaagagttatgggtcctgagtgtaattttttatcctttcttaaaaagtttctgtattatgcattttgataacactactgatgatccttccacttatatttgaaatgttatgtaccacatttgcacaattaaaacttttcttagcattcaacctagaattgattaaatttatgactgaggcttcatgtgagctttccattgtggtttgtgggtgttgtatttgccttgtaacttactgaattacaataagaattgtgggttttcatagccactttctcaagaagcgccttttgaagaacaaggctatgaagtatttgaagaaaggaaataaaatttgatactgatctttcagaaaagagaaggggaatgctacttaataacagaagatgttaaacatttattattacactcaataaaaaatgaagagtattaacaataaactaa

SEQ ID NO: 51474 - DNA, 2521 bp, Homo sapiens
agcgagtggcagcttgggaggggccgcccgggcggtcagactggcacctgagcggccaccgcgtcccggccaggcgggcagaccgaccccctcctcacctcgcgcgcggctgacgcaggcagggcgcccggcccctcctggggaccatcaggtgccggctgggggctgtaggcaccggacggaagcaggcggtgtgaggaccgacgacgcgggcatggcgggggcggcctgcgagccggtggccaggccgagcctgacctccatctcgtctggggagcttcgcagcctgtggacctgcgactgcgagctggccctgctgccgctggctcagctgctgcgcctgcagcccggtgccttccagctgagcggcgaccagctcgtggtggccgggcccggggagccggcggcggcgcgggggggcttcaacgtcttcggtgacggcctcgtgcgcctcgacgggcagctctaccgcctcagcagctacatcaagaggtatgtggaactgaccaactactgtgattataaagactacagggaaactatattgagcaaaccaatgttgttctttattaatgtacagaccaaaaaagacacctcaaaagaaaggacgtacgcgtttcttgtaaacacgaggcaccccaagataagaagacagatagagcaagggatggacatggtcatctcctcagtgattggagaaagttaccggcttcagtttgattttcaagaggcagtgaagaatttcttccccccaggaaatgaagtggttaatggagaaaatttaagctttgcatatgaattcaaagctgatgcattatttgatttcttctattggtttgggctcagtaattccgttgtaaaagtaaatggaaaagttctgaatttgtcaagtacaagtccagaaaagaaggagacgattaagttatttctggaaaaaatgagtgagcctttaatccgaagagcagtttctctgaccgaaagttcagtgtaacttccagaggttcaatagatgatgtttttaactgcaatctgtcacccagatcatctctgacagagcctcttttggcagaattaccatttccaagtgttctggaatctgaagagacacccaaccaatttatctgattgaactgaacattgtagcagttgctcccgcactccaggcctgtgctagactataggctggggggagggtaggaggtgggaggcagatacttccacctgcgtgtcaatctccggctcctccatggcttctatggaggactcctctcttctgcttctgtggatgtgatgccctggcaggcccagggcagctgattcccctaaaacttatgattaccaggatggaaaggccttggtcccatggcactgggtggggctgggggatattctctactttgaacacttctccaaagaggcagaagggccacagagttctgccaccctgaacatttttctcagttccctgggagtttttgtggcagcctttgtgggagtggtctgactggctgttgacctagcatgcttcataaatcagggtttggccctctgcttggagcatccaaccccttgaactcaaacctgtcgagcaaggggttaagagttctgttctcttgccaacctggctgggcaaaagcctgtgccatctttcactgggaggcaaatatgtttttcatcctgccatatgacacctatgagaaacgttcacagtgaggagtagccaggttgctaggacagtaaccctgccacacactgcctgaaatcggaactcccttggcctccctcttaactaagtgacccatgtagaaggaagccaggagatatggtaccgaacaatgacaggggaagggtattggacacggcagcgtcctccttattgaaaacacattatgtcagttgggaattttaaataagcttttagcaaacctaacactaaaagcaaaatagaagaaagctataccattaccataatacatttttcatctcatggctacaatggaattcttgaaaaggaaaaaaaaatcctatctacatataaaaacctgcatgaatgaatcactacatatgcttataatgaggaagagttatgggtcctgagtgtaattttttatcctttcttaaaaagtttctgtattatgcattttgataacactactgatgatccttccacttatatttgaaatgttatgtaccacatttgcacaattaaaacttttcttagcattcaacctagaattgattaaatttatgactgaggcttcatgtgagctttccattgtggtttgtgggtgttgtatttgccttgtaacttactgaattacaataagaattgtgggttttcatagccactttctcaagaagcgccttttgaagaacaaggctatgaagtatttgaagaaaggaaataaaatttgatactgatctttcagaaaagagaaggggaatgctacttaataacagaagatgttaaacatttattattacactcaataaaaaatgaagagtattaacaataaactaa

SEQ ID NO: 51475 - DNA, 2548 bp, Homo sapiens
agcgagtggcagcttgggaggggccgcccgggcggtcagactggcacctgagcggccaccgcgtcccggccaggcgggcagaccgaccccctcctcacctcgcgcgcggctgacgcaggcagggcgcccggcccctcctggggaccatcaggtgccggctgggggctgtaggcaccggacggaagcaggcggtgtgaggaccgacgacgcgggcatggcgggggcggcctgcgagccggtggccaggccgagcctgacctccatctcgtctggggagcttcgcagcctgtggacctgcgactgcgagctggccctgctgccgctggctcagctgctgcgcctgcagcccggtgccttccagctgagcggcgaccagctcgtggtggccgggcccggggagccggcggcggcgcgggggggcttcaacgtcttcggtgacggcctcgtgcgcctcgacgggcagctctaccgcctcagcagctacatcaagaggtatgtggaactgaccaactactgtgattataaagactacagggaaactatattgagcaaaccaatgttgttctttattaatgtacagaccaaaaaagacacctcaaaagaaaggacgtacgcgtttcttgtaaacacgaggcaccccaagataagaagacagatagagcaagggatggacatggtcatctcctcagtgattggagaaagttaccggcttcagtcaatgcaatgttcctctctctttcagtttgattttcaagaggcagtgaagaatttcttccccccaggaaatgaagtggttaatggagaaaatttaagctttgcatatgaattcaaagctgatgcattatttgatttcttctattggtttgggctcagtaattccgttgtaaaagtaaatggaaaagttctgaatttgtcaagtacaagtccagaaaagaaggagacgattaagttatttctggaaaaaatgagtgagcctttaatccgaagagcagtttctctgaccgaaagttcagtgtaacttccagaggttcaatagatgatgtttttaactgcaatctgtcacccagatcatctctgacagagcctcttttggcagaattaccatttccaagtgttctggaatctgaagagacacccaaccaatttatctgattgaactgaacattgtagcagttgctcccgcactccaggcctgtgctagactataggctggggggagggtaggaggtgggaggcagatacttccacctgcgtgtcaatctccggctcctccatggcttctatggaggactcctctcttctgcttctgtggatgtgatgccctggcaggcccagggcagctgattcccctaaaacttatgattaccaggatggaaaggccttggtcccatggcactgggtggggctgggggatattctctactttgaacacttctccaaagaggcagaagggccacagagttctgccaccctgaacatttttctcagttccctgggagtttttgtggcagcctttgtgggagtggtctgactggctgttgacctagcatgcttcataaatcagggtttggccctctgcttggagcatccaaccccttgaactcaaacctgtcgagcaaggggttaagagttctgttctcttgccaacctggctgggcaaaagcctgtgccatctttcactgggaggcaaatatgtttttcatcctgccatatgacacctatgagaaacgttcacagtgaggagtagccaggttgctaggacagtaaccctgccacacactgcctgaaatcggaactcccttggcctccctcttaactaagtgacccatgtagaaggaagccaggagatatggtaccgaacaatgacaggggaagggtattggacacggcagcgtcctccttattgaaaacacattatgtcagttgggaattttaaataagcttttagcaaacctaacactaaaagcaaaatagaagaaagctataccattaccataatacatttttcatctcatggctacaatggaattcttgaaaaggaaaaaaaaatcctatctacatataaaaacctgcatgaatgaatcactacatatgcttataatgaggaagagttatgggtcctgagtgtaattttttatcctttcttaaaaagtttctgtattatgcattttgataacactactgatgatccttccacttatatttgaaatgttatgtaccacatttgcacaattaaaacttttcttagcattcaacctagaattgattaaatttatgactgaggcttcatgtgagctttccattgtggtttgtgggtgttgtatttgccttgtaacttactgaattacaataagaattgtgggttttcatagccactttctcaagaagcgccttttgaagaacaaggctatgaagtatttgaagaaaggaaataaaatttgatactgatctttcagaaaagagaaggggaatgctacttaataacagaagatgttaaacatttattattacactcaataaaaaatgaagagtattaacaataaactaa

SEQ ID NO: 51476 - DNA, 334 bp, Homo sapiens
gtggcattattgctaccaataaaatgagtttagttcttagcaacctattagaaatgggtaagaataaatgtaattttggccaagcagttcagaatttttagatggaatatgatgcaaatgcaaagttttgttagaaaaaataaagacaacagtttaaaaatatgtgtgagagtgaaagggaaataagaggtgtgatgttttggatatttaggcggttgttagttctacaatgtcaacaggatacttatgtccattaagtcaatgcaatgttcctctctctttcagtttgattttcaagaggcagtgaagaatttcttccccccaggaaatgaag

SEQ ID NO: 51477 - DNA, 621 bp, Homo sapiens
  misc_feature (47)..(47): n is a, c, g, or t
  misc_feature (104)..(104): n is a, c, g, or t
  misc_feature (148)..(148): n is a, c, g, or t
  misc_feature (240)..(240): n is a, c, g, or t
cacagtggttaatactgcaagctctgtagccaacctgcctgggtcangatacacctcaggttcttaattgctgtgttacctgaggcaagttccttaaactctcncgtgtttcaatttgcttatctctaaaataggataattaactgcnacctgcctcatagggccttgggagaattcaatgaatgagcatacaaaaagatcttagaacacctggcacatagcaagtaaattttttaaaancgttagttaatatgattaatacaatgatccacataaccacgctgcgggatgaggagacacactgctgttatctgatttgattgatggaaactgaggcagagagagatggaccgagcagaagcaccaagccagcaccagcctcttctgtccccacaagtcggcaagcaccatgccacatcactgaaattccttcaagccggggggctctttactaagctgaatataatcacaaatactacccacctctgatatttcccatctctgtgatgaggatggatgatacattgtaaagtgctgagagcacctcacagacaagtgtgatataaattccaaatgtcattttaacgttctcattattattattaaaatggccaaaatgcg

SEQ ID NO: 51478 - DNA, 639 bp, Homo sapiens
ctttttctccacaacctttctaattaaacagaaagaacaaagtctaagtagagtgggccaaatggatgaagtattattgtgagatatgagcacctgctttatctacaacagggctccaggagcctcttacattccttagggaagaatagcccatactgggccctaaggcaaatccacaagtagagctacagctcaatcaggacaggcattcccccgctccccgatcgatctctgtaatgggtagcagatggcgatggttccctggattactagagaagggtttcttttttatttattcgtatttcgtctgttgggttttgtactatttaaagaaaccaccttcagtaggacagattttgcagtccaggggaaaaattcagaatatgggccatcccaagtatagatgaaacattgttggaattctcctcacctggctgtatttttaaaattcagtaaatacgctgtgttcctctcaaagcctttcttaagtgtgcaagtaaaagagagctgtttttctatggatatgatctgacctctcgtaggacacttagcactttccactatgtgctgtgcttatgtagatgacttctctctccttctggaaaacagaaaccatgtgtcagcttcaaaattgcattc

SEQ ID NO: 51479 - DNA, 373 bp, Homo sapiens
cacaaacacacatgcacacacacatgcacacacgcacaaacacaaaaccatacacacatacacacattcacacaaacatgcacaaacacgtgcacaaatacacacacacacacacagacacacgaaaaggacaagtctcctgatgcttgtccagcgtgcctcctcaccccgggcatgcagttcccagacatgctggctgaggtcctggaacacatacccagccacccaaccatcagaattcacactcccaggccaagagagactccagagagtgctgacatgcatcactaccagggaccctacaggacttaggtccaaggtcctggacaagcacttcataatatttagtgacttttgagttgtgcaatttctt

SEQ ID NO: 51480 - DNA, 346 bp, Homo sapiens
gacaggaggccccattgtgcaacctcttatatagcaaattagagtttaccaggaagtttctgcccttcaggccctctgctctcacagaaactctatgaaggagaggtcatcttgtctatgtttgtaagaagtcacattgagagaaatgacatcttagctcctcttatgtgccaagtagtttgtctgcgttatcttcttagattggctccatctctcaggtgaggaaacagacttggaaaggtgaagtgacttgcccacctagttagaagcacatcatcttctgattcctgtctcatttcatttcaccgcttgtttgccctctctgtggtcttgcccacggacttgt

SEQ ID NO: 51481 - DNA, 517 bp, Homo sapiens
ttcctgctaaaggttttgaatttatcctgaagcctattaggagctattcaaaaatttttaagtgtgaaggtgatatgatcagattgcatttagaaaaatctctttgacatcatgatgaatgatacagctgtagagagatcagttgtaggaacttaagaaatgatgagggctgggaataggtaattacaatagacttgaaaggaagtgaataaattccaaaagtattaagatgggttagaaaaaactagatgctgaattgaatatgaagcaggatgataatgtaatttattgaagcattcattgagatagggaaataggttgataatcaggattggataggagtaggggtgggaaggaatatgtcctgcccatgagtcatcaggtggaactatccagaagcaagtacttattcaggtccaggtcctatcaagaaatgtggcttaccaggagtttgaggctgcaaagagctatggtcacaccactgcactccagcctgggtgagagagaccctgtctct

SEQ ID NO: 51482 - DNA, 628 bp, Homo sapiens
gaatgatttacacttaacaagccttgaatttgtaaaaagaaaagccatatttaactggtgcaaactgctccatgaacttaggattcaaatgtcacaattagtatttttaaaaattaatcactcaaatatccacttgccttattagcagaaagtacaccatctttctcttggaatttctgcttttctctgaattcttccagaactttagtgacttacactgactgggttaatcagtggcctccatatccaagatgggtgtgggtcgtgtatccatgcatctgtatatatgtatgtgagggagacacactagagtctgttcagtccaccactgccaccgtacttccctgccccatggtagaatgttgaaaaccagtcttaaactgttcaacaggagctataggttcactgttgactcagatgtttgtgcaggccaccacagtgcatcagggagggatcttccggtgctaagctcggtcctttatggttgagcacccaagattacaactattagcacccagctcttagagttcacatcatggaaacttctcaactattgttctaagtgcactgtaaacactgagtcaggactagttctaacatctaccacctcatacccttagaaccatat

SEQ ID NO: 51483 - DNA, 939 bp, Homo sapiens
aattgagtatctggcaagagtaagattaagcagtaatttgttccaaagaagaatcttctaccaaggagcaactttaaagaatgaaattaactttcttcttgggcctgttggctcttatttcatgtttcacatgaatcaaagattctccagaagaccatatctacctggccagctgccaccacctccactctacaggccaagatgggttccaccaagtcccccacctccctatgactcaagacttaattcaccactttctcttccctttgtcccagggcgagttccaccatcttctttctctcgatttagccaagcagtcattctatctcaactctttccattggaatctattagacaacctcgactctttccgggttatccaaacctacatttcccactaagaccttactatgtaggacctattaggatattaaaacccccatttcctcctattcctttttttcttgctatttaccttcctatctctaaccctgagccccaaataaacatcaccaccgcagatacaacaatcaccacaaatccccccaccactgcaacagcaaccaccagcacttccacaaaacccacaatgacgatcagctcctcaacagtacctatctcttcaacaccagagcctgccacctccatatcagcagcaacccccgcagcatctactgaaaatactactcaaattctcgccaaccgtcctcacacagtattgctcaatgccactgtccaagttacgacttccaaccaaactatattaagcagcccagcctttaaaagtttttggcaaaaactctttgccatttttggttgaacatgcaataaatgatattttccaaactgctctgatatcttagaagaaataaactgcaatgattttgatggaaccaaccctgatctaaccagcacactaaataaagtatttgagcaata

SEQ ID NO: 51484 - DNA, 883 bp, Homo sapiens
cgcgcccgccggccgactaatccaacctaacacacaccccgaggtgacacgagcgagcaagctagcggctacaaatgaatcaaagattctccagaagaccatatctacctggccagctgccaccacctccactctacaggccaagatgggttccaccaagtcccccacctccctatgactcaagacttaattcaccactttctcttccctttgtcccagggcgagttccaccatcttctttctctcgatttagccaagcagtcattctatctcaactctttccattggaatctattagacaacctcgactctttccgggttatccaaacctacatttcccactaagaccttactatgtaggacctattaggatattaaaacccccatttcctcctattcctttttttcttgctatttaccttcctatctctaaccctgagccccaaataaacatcaccaccgcagatacaacaatcaccacaaatccccccaccactgcaacagcaaccaccagcacttccacaaaacccacaatgacgatcagctcctcaacagtacctatctcttcaacaccagagcctgccacctccatatcagcagcaacccccgcagcatctactgaaaatactactcaaattctcgccaaccgtcctcacacagtattgctcaatgccactgtccaagttacgacttccaaccaaactatattaagcagcccagcctttaaaagtttttggcaaaaactctttgccatttttggttgaacatgcaataaatgatattttccaaactgctctgatatcttagaagaaataaactgcaatgattttgatggaaccaaccctgatctaaccagcacactaaataaagtatttgagcaata

SEQ ID NO: 51485 - DNA, 828 bp, Homo sapiens
  misc_feature (44)..(46): n is a, c, g, or t
  misc_feature (68)..(68): n is a, c, g, or t
atgatatacagatgaacaatgtatcacacacaattaaaaatacnnnggccgcctttgcaggatgcagnatgaatcaaagattctccagaagaccatatctacctggccagctgccaccacctccactctacaggccaagatgggttccaccaagtcccccacctccctatgactcaagacttaattcaccactttctcttccctttgtcccagggcgagttccaccatcttctttctctcgatttagccaagcagtcattctatctcaactctttccattggaatctattagacaacctcgactctttccgggttatccaaacctacatttcccactaagaccttactatgtaggacctattaggatattaaaacccccatttcctcctattcctttttttcttgctatttaccttcctatctctaaccctgagccccaaataaacatcaccaccgcagatacaacaatcaccacaaatccccccaccactgcaacagcaaccaccagcacttccacaaaacccacaatgacgatcagctcctcaacagtacctatctcttcaacaccagagcctgccacctccatatcagcagcaacccccgcagcatctactgaaaatactactcaaattctcgccaaccgtcctcacacagtattgctcaatgccactgtccaagttacgacttccaaccaaactatattaagcagcccagcctttaaaagtttttggcaaaaactctttgccatttttggttgaacatgcaataaatgatattttccaaacacaaaaaattcggctcgttggccctcacggcggagctctgcgg

SEQ ID NO: 51486 - DNA, 829 bp, Homo sapiens
  misc_feature (69)..(69): n is a, c, g, or t
ctataatctaatatacaacttatcctccacgatattgtcataaacactgtccccttggcaggatacagnatgaatcaaagattctccagaagaccatatctacctggccagctgccaccacctccactctacaggccaagatgggttccaccaagtcccccacctccctatgactcaagacttaattcaccactttctcttccctttgtcccagggcgagttccaccatcttctttctctcgatttagccaagcagtcattctatctcaactctttccattggaatctattagacaacctcgactctttccgggttatccaaacctacatttcccactaagaccttactatgtaggacctattaggatattaaaacccccatttcctcctattcctttttttcttgctatttaccttcctatctctaaccctgagccccaaataaacatcaccaccgcagatacaacaatcaccacaaatccccccaccactgcaacagcaaccaccagcacttccacaaaacccacaatgacgatcagctcctcaacagtacctatctcttcaacaccagagcctgccacctccatatcagcagcaacccccgcagcatctactgaaaatactactcaaattctcgccaaccgtcctcacacagtattgctcaatgccactgtccaagttacgacttccaaccaaactatattaagcagcccagcctttaaaagtttttggcaaaaactctttgccatttttggttgaacatgcaataaatgatattttccaaacacaaaaaattcggctcgttggccctcacggcggagctctgcgg

SEQ ID NO: 51487 - DNA, 420 bp, Homo sapiens
caagttcaagcccaggactggggaatgagactgcttaggagttcattcatccagccaacacttctttaggccagatgctgtgtggggactggggaatgagactgcttaggagttcattcatccagccaacacttctttaggccagatgctgtgtggggcactgggaaatcaacagcgaccataatgcaatccctgcccttgagttgaccccgtcacctaaccccaggctagtgagaggggagaaataaaataaacagataacagatattagaagtaagatctggtaggagccaggtgagaggtgtgcaaagggcatttggtggcaaaagaagaggagcaagtgagctgagatcatgctactgcattctagcctgggcagcatagtgagactccatctcaaaaacaaaaacaaaaacaaaa

SEQ ID NO: 51488 - DNA, 596 bp, Homo sapiens
ttttcccatttatggaagtagcataaagcctggtgtccagcagaggggtgcaaaaagggaggagaattgggaagccagagtgttttggcaaagggctgacaatgtgcctcatggagaggattcctatgccactgggtagggccgttgacctttaaatgccatgtgctctccagaccaagggcagagagagacctcactatggggagaggaggggaagacccactgttcctagaaaatcacaaaaatggcattgccttgagctctacctcagttactacggtatttcctgatcttgcctaacaggattacttccttgaactgtaaaaattcccactgcttcagaatgttctccccagcaagcctgtcccccaagtcttgtaaggctgccagccacactaatcatttttaaatagctgaagggggcccagtatttgatttgattttaaaatggaggccaagaaccttgaaatgaaaggacatggttgaggtccactcctgtcctcactgttctgatgatgataccttgatcccacctggggccccaaaatgaagcagtgtcgttcatctggggtaagacccaaggatcattgcctcat

SEQ ID NO: 51489 - DNA, 166 bp, Homo sapiens
tagattatctataattggatatcatctatattgccatacataaaaatagctatagaaatatgttcattcaagcagaaggaatggtgcttgaagaaatacctaggtggaaagacaagtgagccatgtaatgacagatatgtttggtttgtgcaaataatacaacaaa

SEQ ID NO: 51490 - DNA, 116 bp, Homo sapiens
gtatttttatgtcatccaagttaacactccagaaagcctgaaagatgaacatcatcagcaacattttccagaagaaaagctgggactcaaagaagaagttatgtgacttgccaaag

SEQ ID NO: 51491 - DNA, 347 bp, Homo sapiens
aaaaaaaaaagcatggtgtcctggcctgtgtgtcacactcagcatttggcatttgacttcttcacactcttaaaagctattgaggcagttccaagatggctgaataggaacagctccagtctacagttcccagcatgagcgacacagaagatgggtgatttctgcatttccaactgaggggcttgaatggcaaagatgaaaccaagaatgcaaatatcttatccagaaaaaatatatggcatgaggcctacttgtctgcactaagtgtctcaaggggcatggctttagtcaaaccacaactccatgggaactttaattgaagccagagcacttttagtgaaaaagag

SEQ ID NO: 51492 - DNA, 572 bp, Homo sapiens
ttgtcctatagttgattgggttagtggcacctgaaggaaagagatttgccggcattctagtcctcctccttcgtcccccaacctcgaataatcagagggcttagcagcgaggccttttcagctaccaggttctgtcaacctagttaacgctgtgagaaacaggaaaaacgacctgcacgggacactgctttgctaacttcattgggggaacctcagatgcgcctcgcgaactcggagttgcgaacttcgcatcgaacggagatcggcggcagcaaaatgcacgtgggtaccgaatacccggggagggcgtcccgccgtgtccggggcaactacaccgaaggccgagcggcggcttcacggtaccggccgggcaccgccggaggggcccaagccggagctgggagagccgcggcatcctggagcccggcgggcgggagagcctcgtcccatcgctccgggattcctcccagagggaagaaagcgtccgagggccacggcggccggtccgcccagcctcagcgtctcggggagccgggtcctggcccggccttcggcgttgggggcgcgcggcc

SEQ ID NO: 51493 - DNA, 198 bp, Homo sapiens
aaatactttcatcttggtgataaaaatttaggtatcagagcacagtcatttgattaaaaaaagctggactgatataaatgattgaataaaacaaatggggagaagagataaatctccagtgtataattccaagtaattcatatagttatttatccctcaaggaagtagagcataattcaccaccccttaagttgtgcc

SEQ ID NO: 51494 - DNA, 730 bp, Homo sapiens
ggagaccctgaaggaggagcaagttcagtggggaaaaaacaaatttatttttgaacatgttgaatttaaggagtttgtgagcaattcatgcagtgatgagaggtcagttaaatatgcaaatctggtgttccaataagagatctgggctgaaaatacaaatttggaagtctttagaatatgggtggtaattgacaatattggagtgcatctgagcatgtagggagaaagctcagagtgagaaaacagaggcctgatagagtcctgcagacactaaaatgtgatagtttcatacaagaggaggagctttgaaaagagcctggaagtgaccaacgagttggagaaacccaggagagtttgtgttaaaaatgccaggaaagagaatgtctcaagagagtaattgctgctgagacgatgattagtagaactgagaagtgcccattggttttggtgagatagaggtcagacattaccttagcactttttggggaccaagtcgaatcaaagtatattggggagcaaaacttttcaagcttggccatgaagggtagaagagggaatggaagctacagaggggtgtgagattaaggtaaagttgtttttattttattcgaagatattagaaattatgtctttcatgagaaagaactgagtttaaagaaagagaagaaaaaacggttattaatagtgtaggtttttggagatgggaggcaaggctgggaaccagagcagc

SEQ ID NO: 51495 - DNA, 411 bp, Homo sapiens
tgttcatatcctttgcccactttttgatggagagtttgtgttaaaaatgccaggaaagagaatgtctcaagagagtaattgctgctgagacgatgattagtagaactgagaagtgcccattggttttggtgagatagaggtcagacattaccttagcactttttggggaccaagtcgaatcaaagtatattggggagcaaaacttttcaagcttggccatgaagggtagaagagggaatggaagctacagaggggtgtgagattaaggtaaagttgtttttattttattcgaagatattagaaattatgtctttcatgagaaagaactgagtttaaagaaagagaagaaaaaacggttattaatagtgtaggtttttggagatgggaggcaaggctgggaaccagagcagc

SEQ ID NO: 51496 - DNA, 190 bp, Homo sapiens
agcattatcttctccatgagtgaattcatctacttcagaatcaccataactattcatgttacgaattattttaaattataattattgactactattttcaggcaattaatcccttgttcatagcttcagttctttcaaccatcagaaatcttcccctgcatatgctagagatacatcaagtattaaatgc

SEQ ID NO: 51497 - DNA, 440 bp, Homo sapiens
gtttagtcaactttgtcttttctgttctaagttggacacctataagccttcccagtaggacctcttctagctcctttttatcgcatttgtcccccccctctggctgctctccagacactgcagaagtcaggcaccccatccccagcacattcccatgacagccaaatgggcctttggccaaccagacattactctccgtgccctgttcctgcacctcaccccctcggcttggtcctggcaggcatccaagtgactacttagtctcaggcaggttgccctggctggccatctgcaattttttctccaccaaaaataactgatcctgaaacacaacacccttcccccaacaactgggttaattctccagccacttttggtgccaacttacacccccacgcaccagaagggaggtgccagtcgatacaagatttaataacaga

SEQ ID NO: 51498 - DNA, 368 bp, Homo sapiens
tgatccctcacaacaggagttgggggttcttgaccaccattttgcatcatgaccccacccccacctctaaccacagctgatggaactgggatgacacctgtccccaagtaggcgaagtactttctcttagaactaggagtgagagctgctgtttctgtctgggattcttgctggagctcaagtgacacaggcctggggaggtccagagcagtcatcttccatccatcatgtagacaggggagaagagaaatccgctctggaaggagagacgtatgcaaccttcagagagcagagatgagggcagggaccgttcctgctggttccagggctccatacgtcctggcttccaggccctggagaggccccat

SEQ ID NO: 51499 - DNA, 143 bp, Homo sapiens
atggggcctggcagctgctggattaaccttccaaccaaccactgggctgatgtcctgagtcctggtacctccccttcccacaggcccccacctcaacctacagcagaggagtggtctctaaggacctcagtacccagatcggg

SEQ ID NO: 51500 - DNA, 641 bp, Homo sapiens
cccgggtctagttcatttccactcatatctatttctgctaatagattgacagcaacctttggtttaatgctgtgttctctagctacaccaacaagttatatattcctttccaatattaaccaagtatttattttatgttagcctatgactgagttttatctatgcttgcacatatatagaatgtaaaaatataattctccatgtttaatgtatccatataaaaatgaaaatacccattttctgcattcttaaagggttaagaaaagtaacatgtaataagcacatggaggactttagaccatttcttgtgttagaggagactttatacattgtgaggttttctgtcttttggtccttttatgttcttagtccatttcattattgttttaatatttctaccaaggaatgaccaagaaaagagaaaggaagaaaaaaaatgtgttaatcattttcttttaatggtatgtcagcagaaggggttctgactgtaagctaatgtgcacttgtgcctgtcctctttgtcttaaactaaagttggtggtatgaatcgaaaaatgtgtattggtttaaaaagcagtttatgatatgaaacagtcttccagtttttatatcaactcctttgctttcaacagtcagttcaa

SEQ ID NO: 51501 - DNA, 428 bp, Homo sapiens
gggatagaataaatagcctgccaagtaactgaagttatcaaggaaataagtcagaggaggctagtccatttagtccataaaagacctttcattcacagggcttactcaggcaatttctgagaaatcatttttggtttaatttcctcctttgggggaaggagcctggtcaaatctctcaggacagaatactgtataatttcccatcaaagatctcaattattcaaaagatatttaagaaagatagcaccaggccgcgaattaacctgattacttctttgaaccaaaaggaaatggtgaatctagagtcaaaccacatgcaacgctcttcatttgtagctcagagaagaatgaatgatacagtatatttttttccatccatatgggagtacatttaataaagaattttcatctacataatgtagtaaagt

SEQ ID NO: 51502 - DNA, 282 bp, Homo sapiens
tctaagccttctctttatcttaagtaatccactacccctgaaatatgacactgggtctctgaaagaaaaaaaacaacctgataagataaccacctagagtgacatttatataattgcccagtcagaaatcatttccagctgcctacgtggagcttgcttcactgttgtagctaggaaacagggaaggcaaatagctgcttgtctttggtgccaaccttctgaactagtcatgcttaaaggaaagcattcctgtactcgcagttacacagatttgcctcctaa

SEQ ID NO: 51503 - DNA, 980 bp, Homo sapiens
ttcagcttcaattatgtgttgaatttcctcaagtggacgcttaatgatccttctgaacagattgtttatgctgaatgaagcccttcagagagcatttgctcctccctttctccactgctttttgctggtgcactcagctcacagtttttgactaaatgtttgaattttatccacccagcaggcagaaaaatagaactaaaccctccctcccactctctgaagtgctggggaactatctcactggctgtgaaaacaaagggctaatgggcaaacaacagcccccatttcagggccccaaaatagggttcagcaccttgtctgttgttccctttgctccctagatggctaacagtttggagtgggtacagttacccgagcatggcaccttaccaacttatgacctcatgttgttagtcaggttttcctccttaagacgaaagacagaagtagagaacttttaaaattgacttatttttaaggtatattttgggatggcaggtatatcagttaggattaagtttggctgtgaataatagagatccagaatttcagtgctggctgggcatggaggctcacacctgtaatctcagcactttgggaggccaaggtgggagttcacttaagcccaggagttcaagaccagcctaggcaatatagtaagatcctgtctcttaaaaaaaaaaaaaaaaagacagtgccagtggcttaaataaggtagaagtgtatttattcctttggtaacaataataattatgccagctaacttttatgtaatgcttactttatgccaggcactgttgttagcacttttcatatattaactaacttatttaatccataaaatatcctatgacactagtactgatattaccactttaacagatgaggaattgagacacagaaagtaaagccatttgtgcaaagtcacatagctactgaatgacagagccaggacttgagctctgcagcctggcttcaga

SEQ ID NO: 51504 - DNA, 718 bp, Homo sapiens
ttgctagctttttttttttatctccgtatccttatgtctgttctcatattacactttagtagtacaaaacttttgtgacagtcaccaaattcatttttctgctgcctcagctttgcaattgtgttttgacccagggcttctgtttactgtgcagctctagggagcatctttggaattgtactgtcattggcccaggcctgacttgcctttcttactgtcttttttcctaattttccttcaaaactcaagttaaccttttcttctgagacagcttttcttatctctcaagatctacttgctttgcactgtattgtttatttgatttagtattttaccacttctatttgaggttctttgtgcagaaactatcctacttttcttgtattcctacacataacgcagttcctaatatatagccattgtttactaagtattttaattaaatccagccatttataggttttcttttctgtaatagaattttattgaagttatgacatgaatgtaaatcagatttcattttgggagcttttagaaacagcatcaacaatggagctacttttaagttgataacaagtaaaaaaaaaagtgtctttcttgcagctcagatttcttgtaggttattaaattataataacatttaaaaactcatttcagttgatagtatggtagtatatagggtaaatgctaatgaattaattggtgtgtttgaggtggg

SEQ ID NO: 51505 - DNA, 299 bp, Homo sapiens
cctgggcctctggtttgaagtcagccgcccaatggcctcgacaccgtcacctcgcctccagccacgggccatgctccacacgccaccgacactttggccagggggaggggagagatggcttaatcattgcaggccaacacccagcctggatctgcctgatggacaacagtattgatagtctagctgacccttgttcgacaagctgacattccccgtatttcacaggccgacgctggacgtgcatcaaagagactgtcaggtcaccaaacagctaattaaagcaataaagagtcaggaag

SEQ ID NO: 51506 - DNA, 509 bp, Homo sapiens
actgcttaaaaaaaaagtaagatctttactgttctactgattcattggggaaaaaaaagatttggccagctaaagccatgtactgcatgaaacagagcactgtgcataggggacggctccatggactagatcactgaaatttgagaatactatctggttactgatgctccacaatttttttttcaagagaacaggtttttaaaagtctgtaatactttgtgtcacagttgcatttgaaaggattacagtatatagcaaggtttgtaaagataggttagagcaccaagttagctcctaaccagagggcagattggctttcaatgctgattgccaatggtgattgaatagatctaagagcacaataagcaattggaaaggaactcatgtgtgtgtgtgtgtgtgtgtgtgtgtgtgtgtgtgtgtgtgtgtgtgtaaaatgctgcccctacaaagagattaaaatgtgaaataaattaaatcattcataccaaattataagttatattaag

SEQ ID NO: 51507 - DNA, 409 bp, Homo sapiens
cttgtggggcttagcgtccagtgactgttgttttgttttatccttacagaagccctgtaaagatgaaccttatttcccaccattcagcaaacaaggaaacaaatgctcagggtcataaggtatttaactaaggtcacacaattgtccgttccagagaccttactatttccactctctgtgctgcctctcaagggagaccatttcctagatgagaatagccattggtcaatgagctgcagcttatatgggattctctgttggaaaatgacttatgattccttgacttcatgcttagatggctgttagtcaatttgaactaatgaaatgggaatgtatggatataaattttaattgcaacaaattctgaaggactttatatgtgcacattttatattatcagattacactt

SEQ ID NO: 51508 - DNA, 379 bp, Homo sapiens
gaatgtccaagcccaacgttccttacctccagaagagagagaatcctgaggtgctcatgtggagaaacactggccccctgtttgcttctgattttaaccttgtggttgccgtgtctcctgtaacacagtgcagaggaacacctcctctaaattgtgatttctcagatggatgggccccgttgggcagattgtgtttaggactttgtaaccaagactgtcactactgggtggggtggcctggtgcggtctagctcagtaggggaaaagggcagccaccatttccacacctcagcacacacctccatgaaagccaggggctaatgtcccagagccaggccatccgcccacttacccctgtgtgggcagcccttggcctgct

SEQ ID NO: 51509 - DNA, 701 bp, Homo sapiens
gaaacttgtagtacagtagaaaacgttgaaaaggaagtacatgaactccaatattctagacttcacctgcctttgactacaaaataagatcatagttcttttttgtattcaaattataatagttgtattagtccgttttcatgctgctgataaaggcatactcaagactgggtaatttataaagaaaaagaggtttaatggactcacagttccacgtggctgggagacctcacaatcatggtggaaggcaaaagacacgtcttacatggcagcaggcaagagagaatgagagccaagtgaaaggggaaaccccttataaaaccatcagatcttgtgagacttatttactcctgagagaacagtatggggggaaactcaattatcccccacctggtccctcccacatgtgggaattatgggtgctacaattcaagatgagatttgagtggggacaaagtcaaaccatatcaatggtacaagttaaaatctctctctttttcttcctttcttcttcagatgtagctgtcctctgttaatgatagctaccacctgccttcacccttctctactctaggaagaaggaggactactcaagaaaggggaaattgcttccttttgtatcactttaccccacgtgggcatagtacttttctaattttctgcgtatcattatagtcaggctgcaactgttaataacactt

SEQ ID NO: 51510 - DNA, 1944 bp, Homo sapiens
  misc_feature (3)..(3): n is a, c, g, or t
  misc_feature (5)..(7): n is a, c, g, or t
ggncnnncactttctcaaccccacagatgctccgggcccctgcccctgccccagctatggctcctggggctccctcatccagccccagccctatcctggctgtgctgctcttctcttctttggtgctgtccccggcccaggccatcgtggtttacaccgacagggaggtccatggtgctgtgggctcccgggtgaccctgcactgctccttctggtccagtgagtgggtctcagatgacatctccttcacctggcgctaccagcccgaagggggcagagatgccatttcgatcttccactatgccaagggacaaccctacattgacgaggtggggaccttcaaagagcgcatccagtgggtaggggaccctcgctggaaggatggctccattgtcatacacaacctagactacagtgacaatggcacgttcacttgtgacgtcaaaaaccctccagacatagtgggcaagacctctcaggtcacgctgtatgtctttgaaaaagtgccaactaggtacggggtcgttctgggagctgtgatcgggggtgtcctcggggtggtgctgttgctgctgctgcttttctacgtggttcggtactgctggctacgcaggcaggcggccctgcagaggaggctcagtgctatggagaaggggaaattgcacaagccaggaaaggacgcgtcgaagcgcgggcggcagacgccagtgctgtatgcaatgctggaccacagcagaagcaccaaagctgtcagtgagaagaaggccaaggggctgggggagtctcgcaaggataagaaatagcggttagcgggccgggcgggggatcgggggttaggggtggagtccgccaaaggcccaaaggtgatggtcatcgagatggagctacgaaaggatgagcagagcccggagctccggcctgctgtcaagtcccccagcagaaccagcctcaaaaacgccctcaagaacatgatgggcctgaactcggacaagtgatcgccacccccccaccccaggccctgccagagcagggggacctaggctcctcttacccccgtctaggtgctttccctctttgctcccccgccctgccctgccctcacctccctttgagatgtaagtttcattccagaattcattccccaggcaattgtattctcccccaccttcacccctggctttctgggagcccaggagctaatcctacccctcacctgccccgggggctgtgtgtttggtgcctgtccacctgagcactgagaagaaagggactttgataccctctgcctcaagtccaggccacctggcattcccatctcctgcatcccccagcctgtccccctggctgtttcctctcccgtccctccctcccctctaccaggtggcccagctccatactctgtccccccagctaatacccagagcacccagatcagactctccttcagggtttatttaggttattattttttattttttaatccattctttgtttgtttacctgtgctcatcctctgcccttacacccatgactgaggaccaatgacgtcatgtggcttttgcaattcacgccccccttaagtccttaatgaagagccagcccaagtagaggggcccctgatcctcacacttcagtatagcattggttccccctgaccactttggagcactgttctgggactccaggtcttgaggagagagacagagagagagaatggatcctcataggtcagggagtgggggagggggcaaatgagccttaagaaatggtttttaaacaaccaaacaaaaagcaggaaaaacaaatgggaaatgggggggcgggggggaggaagaggctgcactgcagccacaggggattcttaggatttttctacattctgtatatttcttctcaaacctccaaatgtccttaaatgtttaataaacactgacatttccagaa

SEQ ID NO: 51511 - DNA, 1700 bp, Homo sapiens
  misc_feature (3)..(3): n is a, c, g, or t
  misc_feature (5)..(7): n is a, c, g, or t
ggncnnncactttctcaaccccacagatgctccgggcccctgcccctgccccagctatggctcctggggctccctcatccagccccagccctatcctggctgtgctgctcttctcttctttggtgctgtccccggcccaggccatcgtggtttacaccgacagggaggtccatggtgctgtgggctcccgggtgaccctgcactgctccttctggtccagtgagtgggtctcagatgacatctccttcacctggcgctaccagcccgaagggggcagagatgccatttcgatcttccactatgccaagggacaaccctacattgacgaggtggggaccttcaaagagcgcatccagtgggtaggggaccctcgctggaaggatggctccattgtcatacacaacctagactacagtgacaatggcacgttcacttgtgacgtcaaaaaccctccagacatagtgggcaagacctctcaggtcacgctgtatgtctttgaaaaagtgccaactaggtacggggtcgttctgggagctgtgatcgggggtgtcctcggggtggtgctgttgctgctgctgcttttctacgtggttcggtactgctggctacgcaggcaggcggccctgcagaggaggctcagtgctatggagaaggggaaattgcacaagccaggaaaggacgcgtcgaagcgcgggcggcagacgccagtgctgtatgcaatgctggaccacagcagaagcaccaaagctgtcagtgagaagaaggccaaggggctgggggagtctcgcaaggataagaaatagcggttagcgggccgggcgggggatcgggggttaggggtggagtccgccaaaggcccaaaggtgatggtcatcgagatggagctacgaaaggatgagcagagcccggagctccggcctgctgtcaagtcccccagcagaaccagcctcaaaaacgccctcaagaacatgatgggcctgaactcggacaagtgatcgccacccccccaccccaggccctgccagagcagggggacctaggctcctcttacccccgtctaggtgctttccctctttgctcccccgccctgccctgccctcacctccctttgagatgtaagtttcattccagaattcattccccagctccatactctgtccccccagctaatacccagagcacccagatcagactctccttcagggtttatttaggttattattttttattttttaatccattctttgtttgtttacctgtgctcatcctctgcccttacacccatgactgaggaccaatgacgtcatgtggcttttgcaattcacgccccccttaagtccttaatgaagagccagcccaagtagaggggcccctgatcctcacacttcagtatagcattggttccccctgaccactttggagcactgttctgggactccaggtcttgaggagagagacagagagagagaatggatcctcataggtcagggagtgggggagggggcaaatgagccttaagaaatggtttttaaacaaccaaacaaaaagcaggaaaaacaaatgggaaatgggggggcgggggggaggaagaggctgcactgcagccacaggggattcttaggatttttctacattctgtatatttcttctcaaacctccaaatgtccttaaatgtttaataaacactgacatttccagaa

SEQ ID NO: 51512 - DNA, 2074 bp, Homo sapiens
  misc_feature (3)..(3): n is a, c, g, or t
  misc_feature (5)..(7): n is a, c, g, or t
ggncnnncactttctcaaccccacagatgctccgggcccctgcccctgccccagctatggctcctggggctccctcatccagccccagccctatcctggctgtgctgctcttctcttctttggtgctgtccccggcccaggccatcgtggtttacaccgacagggaggtccatggtgctgtgggctcccgggtgaccctgcactgctccttctggtccagtgagtgggtctcagatgacatctccttcacctggcgctaccagcccgaagggggcagagatgccatttcgatcttccactatgccaagggacaaccctacattgacgaggtggggaccttcaaagagcgcatccagtgggtaggggaccctcgctggaaggatggctccattgtcatacacaacctagactacagtgacaatggcacgttcacttgtgacgtcaaaaaccctccagacatagtgggcaagacctctcaggtcacgctgtatgtctttgaaaaagtgccaactaggtacggggtcgttctgggagctgtgatcgggggtgtcctcggggtggtgctgttgctgctgctgcttttctacgtggttcggtactgctggctacgcaggcaggcggccctgcagaggaggctcagtgctatggagaaggggaaattgcacaagccaggaaaggacgcgtcgaagcgcgggcggcaggttagcgggacttggggcctagacaagatgggaaggagaaccctgggagccgccgggcagcagtgaggggtgggatgggaacagtcaagccccagtcgctcggtgactgatgtgtgcgcccctcccccagacgccagtgctgtatgcaatgctggaccacagcagaagcaccaaagctgtcagtgagaagaaggccaaggggctgggggagtctcgcaaggataagaaatagcggttagcgggccgggcgggggatcgggggttaggggtggagtccgccaaaggcccaaaggtgatggtcatcgagatggagctacgaaaggatgagcagagcccggagctccggcctgctgtcaagtcccccagcagaaccagcctcaaaaacgccctcaagaacatgatgggcctgaactcggacaagtgatcgccacccccccaccccaggccctgccagagcagggggacctaggctcctcttacccccgtctaggtgctttccctctttgctcccccgccctgccctgccctcacctccctttgagatgtaagtttcattccagaattcattccccaggcaattgtattctcccccaccttcacccctggctttctgggagcccaggagctaatcctacccctcacctgccccgggggctgtgtgtttggtgcctgtccacctgagcactgagaagaaagggactttgataccctctgcctcaagtccaggccacctggcattcccatctcctgcatcccccagcctgtccccctggctgtttcctctcccgtccctccctcccctctaccaggtggcccagctccatactctgtccccccagctaatacccagagcacccagatcagactctccttcagggtttatttaggttattattttttattttttaatccattctttgtttgtttacctgtgctcatcctctgcccttacacccatgactgaggaccaatgacgtcatgtggcttttgcaattcacgccccccttaagtccttaatgaagagccagcccaagtagaggggcccctgatcctcacacttcagtatagcattggttccccctgaccactttggagcactgttctgggactccaggtcttgaggagagagacagagagagagaatggatcctcataggtcagggagtgggggagggggcaaatgagccttaagaaatggtttttaaacaaccaaacaaaaagcaggaaaaacaaatgggaaatgggggggcgggggggaggaagaggctgcactgcagccacaggggattcttaggatttttctacattctgtatatttcttctcaaacctccaaatgtccttaaatgtttaataaacactgacatttccagaa

SEQ ID NO: 51513 - DNA, 1342 bp, Homo sapiens
  misc_feature (3)..(3): n is a, c, g, or t
  misc_feature (5)..(7): n is a, c, g, or t
ggncnnncactttctcaaccccacagatgctccgggcccctgcccctgccccagctatggctcctggggctccctcatccagccccagccctatcctggctgtgctgctcttctcttctttggtgctgtccccggcccaggccatcgtggtttacaccgacagggaggtccatggtgctgtgggctcccgggtgaccctgcactgctccttctggtccagtgagtgggtctcagatgacatctccttcacctggcgctaccagcccgaagggggcagagatgccatttcgatcttccactatgccaagggacaaccctacattgacgaggtggggaccttcaaagagcgcatccagtgggtaggggaccctcgctggaaggatggctccattgtcatacacaacctagactacagtgacaatggcacgttcacttgtgacgtcaaaaaccctccagacatagtgggcaagacctctcaggtcacgctgtatgtctttgaaaaagtgccaactaggtacggggtcgttctgggagctgtgatcgggggtgtcctcggggtggtgctgttgctgctgctgcttttctacgtggttcggtactgctggctacgcaggcaggcggccctgcagaggaggctcagtgctatggagaaggggaaattgcacaagccaggaaaggacgcgtcgaagcgcgggcggcagacgccagtgctgtatgcaatgctggaccacagcagaagcaccaaagctgtcagtgagaagaaggccaaggggctgggggagtctcgcaaggataagaaatagcggttagcgggccgggcgggggatcgggggttaggggtggagtccgccaaaggcccaaaggtgatggtcatcgagatggagctacgaaaggatgagcagagcccggagctccggcctgctgtcaagtcccccagcagaaccagcctcaaaaacgccctcaagaacatgatgggcctgaactcggacaagtgatcgccacccccccaccccaggccctgccagagcagggggacctaggctcctcttacccccgtctaggtgctttccctctttgctcccccgccctgccctgccctcacctccctttgagatgtaagtttcattccagaattcattccccaggcaaatgagccttaagaaatggtttttaaacaaccaaacaaaaagcaggaaaaacaaatgggaaatgggggggcgggggggaggaagaggctgcactgcagccacaggggattcttaggatttttctacattctgtatatttcttctcaaacctccaaatgtccttaaatgtttaataaacactgacatttccagaa

SEQ ID NO: 51514 - DNA, 1855 bp, Homo sapiens
taggtgcatctgattccccactttgtgcttgcagtgctgtccccggcccaggccatcgtggtttacaccgacagggaggtccatggtgctgtgggctcccgggtgaccctgcactgctccttctggtccagtgagtgggtctcagatgacatctccttcacctggcgctaccagcccgaagggggcagagatgccatttcgatcttccactatgccaagggacaaccctacattgacgaggtggggaccttcaaagagcgcatccagtgggtaggggaccctcgctggaaggatggctccattgtcatacacaacctagactacagtgacaatggcacgttcacttgtgacgtcaaaaaccctccagacatagtgggcaagacctctcaggtcacgctgtatgtctttgaaaaagtgccaactaggtacggggtcgttctgggagctgtgatcgggggtgtcctcggggtggtgctgttgctgctgctgcttttctacgtggttcggtactgctggctacgcaggcaggcggccctgcagaggaggctcagtgctatggagaaggggaaattgcacaagccaggaaaggacgcgtcgaagcgcgggcggcagacgccagtgctgtatgcaatgctggaccacagcagaagcaccaaagctgtcagtgagaagaaggccaaggggctgggggagtctcgcaaggataagaaatagcggttagcgggccgggcgggggatcgggggttaggggtggagtccgccaaaggcccaaaggtgatggtcatcgagatggagctacgaaaggatgagcagagcccggagctccggcctgctgtcaagtcccccagcagaaccagcctcaaaaacgccctcaagaacatgatgggcctgaactcggacaagtgatcgccacccccccaccccaggccctgccagagcagggggacctaggctcctcttacccccgtctaggtgctttccctctttgctcccccgccctgccctgccctcacctccctttgagatgtaagtttcattccagaattcattccccaggcaattgtattctcccccaccttcacccctggctttctgggagcccaggagctaatcctacccctcacctgccccgggggctgtgtgtttggtgcctgtccacctgagcactgagaagaaagggactttgataccctctgcctcaagtccaggccacctggcattcccatctcctgcatcccccagcctgtccccctggctgtttcctctcccgtccctccctcccctctaccaggtggcccagctccatactctgtccccccagctaatacccagagcacccagatcagactctccttcagggtttatttaggttattattttttattttttaatccattctttgtttgtttacctgtgctcatcctctgcccttacacccatgactgaggaccaatgacgtcatgtggcttttgcaattcacgccccccttaagtccttaatgaagagccagcccaagtagaggggcccctgatcctcacacttcagtatagcattggttccccctgaccactttggagcactgttctgggactccaggtcttgaggagagagacagagagagagaatggatcctcataggtcagggagtgggggagggggcaaatgagccttaagaaatggtttttaaacaaccaaacaaaaagcaggaaaaacaaatgggaaatgggggggcgggggggaggaagaggctgcactgcagccacaggggattcttaggatttttctacattctgtatatttcttctcaaacctccaaatgtccttaaatgtttaataaacactgacatttccagaa

SEQ ID NO: 51515 - DNA, 1328 bp, Homo sapiens
gtacagcagtctctcttcttgcagtgctatggagaaggggaaattgcacaagccaggaaaggacgcgtcgaagcgcgggcggcagacgccagtgctgtatgcaatgctggaccacagcagaagcaccaaagctgtcagtgagaagaaggccaaggggctgggggagtctcgcaaggataagaaatagcggttagcgggccgggcgggggatcgggggttaggggtggagtccgccaaaggcccaaaggtgatggtcatcgagatggagctacgaaaggatgagcagagcccggagctccggcctgctgtcaagtcccccagcagaaccagcctcaaaaacgccctcaagaacatgatgggcctgaactcggacaagtgatcgccacccccccaccccaggccctgccagagcagggggacctaggctcctcttacccccgtctaggtgctttccctctttgctcccccgccctgccctgccctcacctccctttgagatgtaagtttcattccagaattcattccccaggcaattgtattctcccccaccttcacccctggctttctgggagcccaggagctaatcctacccctcacctgccccgggggctgtgtgtttggtgcctgtccacctgagcactgagaagaaagggactttgataccctctgcctcaagtccaggccacctggcattcccatctcctgcatcccccagcctgtccccctggctgtttcctctcccgtccctccctcccctctaccaggtggcccagctccatactctgtccccccagctaatacccagagcacccagatcagactctccttcagggtttatttaggttattattttttattttttaatccattctttgtttgtttacctgtgctcatcctctgcccttacacccatgactgaggaccaatgacgtcatgtggcttttgcaattcacgccccccttaagtccttaatgaagagccagcccaagtagaggggcccctgatcctcacacttcagtatagcattggttccccctgaccactttggagcactgttctgggactccaggtcttgaggagagagacagagagagagaatggatcctcataggtcagggagtgggggagggggcaaatgagccttaagaaatggtttttaaacaaccaaacaaaaagcaggaaaaacaaatgggaaatgggggggcgggggggaggaagaggctgcactgcagccacaggggattcttaggatttttctacattctgtatatttcttctcaaacctccaaatgtccttaaatgtttaataaacactgacatttccagaa

SEQ ID NO: 51516 - DNA, 426 bp, Homo sapiens
cattctcccacttcttttcccacccctcctagtgccaactaggtacggggtcgttctgggagctgtgatcgggggtgtcctcggggtggtgctgttgctgctgctgcttttctacgtggttcggtactgctggctacgcaggcaggcggccctgcagaggaggctcaggtaaggggcggagcctagctcccctccccctctccccactatcccccatctgggcggagactactccagtgggtgggagggccaaggggaagaggaagctgtgtccgcggtgcaaggggttccggcgaggccaaacgtacagcagtctctcttcttgcagtgctatggagaaggggaaattgcacaagccaggaaaggacgcgtcgaagcgcgggcggcaggttagcgggacttggggcctagacaagatgggaagga

SEQ ID NO: 51517 - DNA, 1967 bp, Homo sapiens
tgggacaaggttaaagatcgttttatccttgctgtaaaagctgatctgcctgtagctgccacagcctccagcggtggctacagttgaaaccctcacaccacgcaggaagaggtcatcatcatgtcggacgatttcttatggtttgaaggcatagctttccctactatgggtttcagatccgaaaccttaagaaaagtacgtgatgagttcgtgataagggatgaagatgtaataatattgacttaccccaaatcaggaacaaactggttggctgagattctctgcctgatgcactccaagggggatgccaagtggatccaatctgtgcccatctgggagcgatcaccctgggtagagagtgagattgggtatacagcactcagtgaaacggagagtccacgtttattctcctcccacctccccatccagttattccccaagtctttcttcagttccaaggccaaggtgatttatctcatgagaaatcccagagatgttttggtgtctggttattttttctggaaaaacatgaagtttattaagaaaccaaagtcatgggaagaatattttgaatggttttgtcaaggaactgtgctatatgggtcatggtttgaccacattcatggctggatgcccatgagagaggagaaaaacttcctgttactgagttatgaggagctgaaacaggacacaggaagaaccatagagaagatctgtcaattcctgggaaagacgttagaacccgaagaactgaacttaattctcaagaacagctcctttcagagcatgaaagaaaacaagatgtccaattattccctcctgagtgttgattatgtagtggacaaagcacaacttctgagaaaaggtgtatctggggactggaaaaatcacttcacagtggcccaagctgaagactttgataaattgttccaagagaagatggcagatcttcctcgagagctgttcccatgggaataacgtccaaaacactctggatcttatatggagaatgacattgattctcctgtccttgtacatgtacctgactggggtcattgtgtaagacttattattttatcctgaaaccttaaatatcaaacctctgcatctctgatcccttccttgttaaaagttaccacggttggccaggcgcggtggttcatgcctgtaatcccagcactatgggaggccgagacgggcggatcacgaggtcaggagactgagaccatcctggctaacacggtgaaaccccatctctactaaaaatacaaaaaacaaaaaaaattagccagggcattggctcatgtctgtaatcccagcactttgggaggtcgggggggtgggggaggatcacggggtcaggagatcgagaccatcctggccaacatgatgaaaccctatctctactaaaaatacaaaaattagccgggcatggtggtgcacgcctatagtcccagctactcgggaggctgaggtaggagaatcgtttgaactcaggaggcagaggttgcaatgagccaagatcgcgccactgcactccagcctgggtgacagagcgagaccgtctcaaaaagaaagaagtgactagggttcagagaaccagggttcaaagcccagggatgcaaaggttgcagtgagttgagtcatgggatcccagacttttttaaatgtttgcaatgtttcccgtttacagaatgctacaagaataatgtacgtactacctaaaaggatgtctaaatgtttgttaataaaaataagaaatagctacagtgacagattttagagcaaaaattagtaataaaaataagaaataaaattacaggagcaattaaggttccatttcttttcatcacatgtatctccacaatttattattgctctgatcttaaggagtgtaatttgcaatctaattttatcctcttactctgtgttgttaaaccatatacaataaacggtgtttatggagg

SEQ ID NO: 51518 - DNA, 1403 bp, Homo sapiens
tgggacaaggttaaagatcgttttatccttgctgtaaaagctgatctgcctgtagctgccacagcctccagcggtggctacagttgaaaccctcacaccacgcaggaagaggtcatcatcatgtcggacgatttcttatggtttgaaggcatagctttccctactatgggtttcagatccgaaaccttaagaaaagtacgtgatgagttcgtgataagggatgaagatgtaataatattgacttaccccaaatcaggaacaaactggttggctgagattctctgcctgatgcactccaagggggatgccaagtggatccaatctgtgcccatctgggagcgatcaccctgggtagagagtgagattgggtatacagcactcagtgaaacggagagtccacgtttattctcctcccacctccccatccagttattccccaagtctttcttcagttccaaggccaaggtgatttatctcatgagaaatcccagagatgttttggtgtctggttattttttctggaaaaacatgaagtttattaagaaaccaaagtcatgggaagaatattttgaatggttttgtcaaggaactgtgctatatgggtcatggtttgaccacattcatggctggatgcccatgagagaggagaaaaacttcctgttactgagttatgaggagctgaaacaggacacaggaagaaccatagagaagatctgtcaattcctgggaaagacgttagaacccgaagaactgaacttaattctcaagaacagctcctttcagagcatgaaagaaaacaagatgtccaattattccctcctgagtgttgattatgtagtggacaaagcacaacttctgagaaaaggtgtatctggggactggaaaaatcacttcacagtggcccaagctgaagactttgataaattgttccaagagaagatggcagatcttcctcgagagctgttcccatgggaataacgtccaaaacactctggatcttatatggagaatgacattgattctcctgtccttgtacatgtacctgactggggtcattgtgtaagacttattattttatcctgaaaccttaaatatcaaacctctgcatctctgatcccttccttgttaaaagttaccacggttggccaggcgcggtggttcatgcctgtaatcccagcactatgggaggccgagacgggcggatcacgaggtcaggagactgagaccatcctggctaacacggtgaaaccccatctctactaaaaatacaaaaaacaaaaagaggggttgaggagaattccccttatctgttaatctattccagcctttctactaagttacatcctattctctttcaaatattctatctttggctttctcatatacctttactccttttatct

SEQ ID NO: 51519 - DNA, 1834 bp, Homo sapiens
ctcgtgccgaattcggcacgagacaccacgcaggaagaggtcatcatcatgtcggacgatttcttatggtttgaaggcatagctttccctactatgggtttcagatccgaaaccttaagaaaagaacaaactggttggctgagattctctgcctgatgcactccaagggggatgccaagtggatccaatctgtgcccatctgggagcgatcaccctgggtagagagtgagattgggtatacagcactcagtgaaacggagagtccacgtttattctcctcccacctccccatccagttattccccaagtctttcttcagttccaaggccaaggtgatttatctcatgagaaatcccagagatgttttggtgtctggttattttttctggaaaaacatgaagtttattaagaaaccaaagtcatgggaagaatattttgaatggttttgtcaaggaactgtgctatatgggtcatggtttgaccacattcatggctggatgcccatgagagaggagaaaaacttcctgttactgagttatgaggagctgaaacaggacacaggaagaaccatagagaagatctgtcaattcctgggaaagacgttagaacccgaagaactgaacttaattctcaagaacagctcctttcagagcatgaaagaaaacaagatgtccaattattccctcctgagtgttgattatgtagtggacaaagcacaacttctgagaaaaggtgtatctggggactggaaaaatcacttcacagtggcccaagctgaagactttgataaattgttccaagagaagatggcagatcttcctcgagagctgttcccatgggaataacgtccaaaacactctggatcttatatggagaatgacattgattctcctgtccttgtacatgtacctgactggggtcattgtgtaagacttattattttatcctgaaaccttaaatatcaaacctctgcatctctgatcccttccttgttaaaagttaccacggttggccaggcgcggtggttcatgcctgtaatcccagcactatgggaggccgagacgggcggatcacgaggtcaggagactgagaccatcctggctaacacggtgaaaccccatctctactaaaaatacaaaaaacaaaaaaaattagccagggcattggctcatgtctgtaatcccagcactttgggaggtcgggggggtgggggaggatcacggggtcaggagatcgagaccatcctggccaacatgatgaaaccctatctctactaaaaatacaaaaattagccgggcatggtggtgcacgcctatagtcccagctactcgggaggctgaggtaggagaatcgtttgaactcaggaggcagaggttgcaatgagccaagatcgcgccactgcactccagcctgggtgacagagcgagaccgtctcaaaaagaaagaagtgactagggttcagagaaccagggttcaaagcccagggatgcaaaggttgcagtgagttgagtcatgggatcccagacttttttaaatgtttgcaatgtttcccgtttacagaatgctacaagaataatgtacgtactacctaaaaggatgtctaaatgtttgttaataaaaataagaaatagctacagtgacagattttagagcaaaaattagtaataaaaataagaaataaaattacaggagcaattaaggttccatttcttttcatcacatgtatctccacaatttattattgctctgatcttaaggagtgtaatttgcaatctaattttatcctcttactctgtgttgttaaaccatatacaataaacggtgtttatggagg

SEQ ID NO: 51520 - DNA, 1914 bp, Homo sapiens
tgggacaaggttaaagatcgttttatccttgctgtaaaagctgatctgcctgtagctgccacagcctccagcggtggctacagttgaaaccctcacaccacgcaggaagaggtcatcatcatgtcggacgatttcttatggtttgaaggcatagctttccctactatgggtttcagatccgaaaccttaagaaaagtacgtgatgagttcgtgataagggatgaagatgtaataatattgacttaccccaaatcaggaacaaactggttggctgagattctctgcctgatgcactccaagggggatgccaagtggatccaatctgtgcccatctgggagcgatcaccctgggtagagagtgagattgggtatacagcactcagtgaaacggagagtccacgtttattctcctcccacctccccatccagttattccccaagtctttcttcagttccaaggccaaggtgatttatctcatgagaaatcccagagatgttttggtgtctggttattttttctggaaaaacatgaagtttattaagaaaccaaagtcatgggaagaatattttgaatggttttgtcaaggaactgtgctatatgggtcatggtttgaccacattcatggctggatgcccatgagagaggagaaaaaagaagatctgtcaattcctgggaaagacgttagaacccgaagaactgaacttaattctcaagaacagctcctttcagagcatgaaagaaaacaagatgtccaattattccctcctgagtgttgattatgtagtggacaaagcacaacttctgagaaaaggtgtatctggggactggaaaaatcacttcacagtggcccaagctgaagactttgataaattgttccaagagaagatggcagatcttcctcgagagctgttcccatgggaataacgtccaaaacactctggatcttatatggagaatgacattgattctcctgtccttgtacatgtacctgactggggtcattgtgtaagacttattattttatcctgaaaccttaaatatcaaacctctgcatctctgatcccttccttgttaaaagttaccacggttggccaggcgcggtggttcatgcctgtaatcccagcactatgggaggccgagacgggcggatcacgaggtcaggagactgagaccatcctggctaacacggtgaaaccccatctctactaaaaatacaaaaaacaaaaaaaattagccagggcattggctcatgtctgtaatcccagcactttgggaggtcgggggggtgggggaggatcacggggtcaggagatcgagaccatcctggccaacatgatgaaaccctatctctactaaaaatacaaaaattagccgggcatggtggtgcacgcctatagtcccagctactcgggaggctgaggtaggagaatcgtttgaactcaggaggcagaggttgcaatgagccaagatcgcgccactgcactccagcctgggtgacagagcgagaccgtctcaaaaagaaagaagtgactagggttcagagaaccagggttcaaagcccagggatgcaaaggttgcagtgagttgagtcatgggatcccagacttttttaaatgtttgcaatgtttcccgtttacagaatgctacaagaataatgtacgtactacctaaaaggatgtctaaatgtttgttaataaaaataagaaatagctacagtgacagattttagagcaaaaattagtaataaaaataagaaataaaattacaggagcaattaaggttccatttcttttcatcacatgtatctccacaatttattattgctctgatcttaaggagtgtaatttgcaatctaattttatcctcttactctgtgttgttaaaccatatacaataaacggtgtttatggagg

SEQ ID NO: 51521 - DNA, 1914 bp, Homo sapiens
tgggacaaggttaaagatcgttttatccttgctgtaaaagctgatctgcctgtagctgccacagcctccagcggtggctacagttgaaaccctcacaccacgcaggaagaggtcatcatcatgtcggacgatttcttatggtttgaaggcatagctttccctactatgggtttcagatccgaaaccttaagaaaagtacgtgatgagttcgtgataagggatgaagatgtaataatattgacttaccccaaatcaggaacaaactggttggctgagattctctgcctgatgcactccaagggggatgccaagtggatccaatctgtgcccatctgggagcgatcaccctgggtagagagtgagattgggtatacagcactcagtgaaacggagagtccacgtttattctcctcccacctccccatccagttattccccaagtctttcttcagttccaaggccaaggtgatttatctcatgagaaatcccagagatgttttggtgtctggttattttttctggaaaaacatgaagtttattaagaaaccaaagtcatgggaagaatattttgaatggttttgtcaaggaactgtgctatatgggtcatggtttgaccacattcatggctggatgcccatgagagaggagaaaaacttcctgttactgagttatgaggagctgaaacaggacacaggaagaaccatagagaagatctgtcaattcctgggaaagacgttagaacccgaagaactgaacttaattctcaagaacagctcctttcagagcatgaaagaaaacaagatgtccaattattccctcctgagtgttgattatgtagtggacaaagcacaacttctgagaaaaggtgtatctggggactggaaaaatcacttcacagtggcccaagctgaagactttgataaattgttccaagagaagatggcagatcttcctcgagagctgttcccatgggaataacgtccaaaacactctggatcttatatggagaatgacattgattctcctgtccttgtacatgtacctgactggggtcattgtgtaagacttattattttatcctgaaaccttaaatatcaaacctctgcatctctgatcccttccttgttaaaagttaccacggttggccaggcgcggtggttcatgcctgtaatcccagcactatgggaggccgagacgggcggatcacgaggtcaggagactgagaccatcctggctaacacggtgaaaccccatctctactaaaaatacaaaaaacaaaaaggggggtgggggaggatcacggggtcaggagatcgagaccatcctggccaacatgatgaaaccctatctctactaaaaatacaaaaattagccgggcatggtggtgcacgcctatagtcccagctactcgggaggctgaggtaggagaatcgtttgaactcaggaggcagaggttgcaatgagccaagatcgcgccactgcactccagcctgggtgacagagcgagaccgtctcaaaaagaaagaagtgactagggttcagagaaccagggttcaaagcccagggatgcaaaggttgcagtgagttgagtcatgggatcccagacttttttaaatgtttgcaatgtttcccgtttacagaatgctacaagaataatgtacgtactacctaaaaggatgtctaaatgtttgttaataaaaataagaaatagctacagtgacagattttagagcaaaaattagtaataaaaataagaaataaaattacaggagcaattaaggttccatttcttttcatcacatgtatctccacaatttattattgctctgatcttaaggagtgtaatttgcaatctaattttatcctcttactctgtgttgttaaaccatatacaataaacggtgtttatggagg

SEQ ID NO: 51522 - DNA, 1906 bp, Homo sapiens
tgggacaaggttaaagatcgttttatccttgctgtaaaagctgatctgcctgtagctgccacagcctccagcggtggctacagttgaaaccctcacaccacgcaggaagaggtcatcatcatgtcggacgatttcttatggtttgaaggcatagctttccctactatgggtttcagatccgaaaccttaagaaaagaacaaactggttggctgagattctctgcctgatgcactccaagggggatgccaagtggatccaatctgtgcccatctgggagcgatcaccctgggtagagagtgagattgggtatacagcactcagtgaaacggagagtccacgtttattctcctcccacctccccatccagttattccccaagtctttcttcagttccaaggccaaggtgatttatctcatgagaaatcccagagatgttttggtgtctggttattttttctggaaaaacatgaagtttattaagaaaccaaagtcatgggaagaatattttgaatggttttgtcaaggaactgtgctatatgggtcatggtttgaccacattcatggctggatgcccatgagagaggagaaaaacttcctgttactgagttatgaggagctgaaacaggacacaggaagaaccatagagaagatctgtcaattcctgggaaagacgttagaacccgaagaactgaacttaattctcaagaacagctcctttcagagcatgaaagaaaacaagatgtccaattattccctcctgagtgttgattatgtagtggacaaagcacaacttctgagaaaaggtgtatctggggactggaaaaatcacttcacagtggcccaagctgaagactttgataaattgttccaagagaagatggcagatcttcctcgagagctgttcccatgggaataacgtccaaaacactctggatcttatatggagaatgacattgattctcctgtccttgtacatgtacctgactggggtcattgtgtaagacttattattttatcctgaaaccttaaatatcaaacctctgcatctctgatcccttccttgttaaaagttaccacggttggccaggcgcggtggttcatgcctgtaatcccagcactatgggaggccgagacgggcggatcacgaggtcaggagactgagaccatcctggctaacacggtgaaaccccatctctactaaaaatacaaaaaacaaaaaaaattagccagggcattggctcatgtctgtaatcccagcactttgggaggtcgggggggtgggggaggatcacggggtcaggagatcgagaccatcctggccaacatgatgaaaccctatctctactaaaaatacaaaaattagccgggcatggtggtgcacgcctatagtcccagctactcgggaggctgaggtaggagaatcgtttgaactcaggaggcagaggttgcaatgagccaagatcgcgccactgcactccagcctgggtgacagagcgagaccgtctcaaaaagaaagaagtgactagggttcagagaaccagggttcaaagcccagggatgcaaaggttgcagtgagttgagtcatgggatcccagacttttttaaatgtttgcaatgtttcccgtttacagaatgctacaagaataatgtacgtactacctaaaaggatgtctaaatgtttgttaataaaaataagaaatagctacagtgacagattttagagcaaaaattagtaataaaaataagaaataaaattacaggagcaattaaggttccatttcttttcatcacatgtatctccacaatttattattgctctgatcttaaggagtgtaatttgcaatctaattttatcctcttactctgtgttgttaaaccatatacaataaacggtgtttatggagg

SEQ ID NO: 51523 - DNA, 1297 bp, Homo sapiens
ggggaggagcgggcgccgggggccggctggcgcgggggctccggtaacccgggctgggcgggggagaggaaggggcggggcagggagcccgccagagtgcggggtcgcggtgcggacttcgagcacgagccctaaagacgctcagcactcgtcgcttctcctagcagaccctgcccggcttggcgatggagtttccggacctcggcgctcactgttcggagccgagctgtcagcgcttggattttctgccgcttaagtgtgatgcctgctcaggcatcttctgcgcagaccatgtggcctacgcccagcatcactgtggatctgcttaccaaaaggatatccaggtacctgtgtgccctctctgtaatgtgcctgtgcctgtggccagaggggagccccctgaccgtgctgtgggagagcacattgacagagactgtcgctctgatccagcacagcaaaaacgtaagatcttcaccaataagtgtgaacgcgctggctgccggcagcgagaaatgatgaaactgacctgtgaacgctgtagccgaaacttctgcatcaagcaccggcatccactggaccatgattgctctggggaggggcacccaaccagccgggcaggacttgctgccatctccagagcacaagctgtggcttctacaagcactgtccccagcccaagtcaaaccatgccttcctgtacctctcccagcagagccacaacccgatctccgtcctggacagcccctccagtgattgctttgcagaatggcctgagtgaggatgaagctctgcagcgggccctggaaatgtccctggcagaaaccaaaccccaggttccaagttgtcaggaggaagaagacctagctttagcacaagcactgtcagccagtgaggcagaataccagcggcagcaggcccagagccgcagctcgaagccgtccaactgcagcctgtgctagggccctgggcttggggagggaggttcacctgaggaggactgtggccctcacacctctagggtacacagggagaggaggcccggagcaccctggagggcagagacaagcgggagtgatgtggaggtcgccctgggagcctctggaaggccttgctagtgctccagctgcatggaagagagcggctagcaactgttccctggttgggccctcagtggatgctggccaggccctactcttagccccttcatcatgtcatctcccttatgctggagctgccccgatgtggagtgggcaggaaggggcctggaaaaaataaaggatcttggcagttgataaaa

SEQ ID NO: 51524 - DNA, 1241 bp, Homo sapiens
aagagtggtatcaacgcagagtggccattacgtccggggagtgcggggtcgcggtgcggacttcgagcacgagccctaaagacgctcagcactcgtcgcttctcctagcagaccctgcccggcttggcgatggagtttccggacctcggcgctcactgttcggagccgagctgtcagcgcttggattttctgccgcttaagtgtgatgcctgctcaggcatcttctgcgcagaccatgtggcctacgcccagcatcactgtggatctgcttaccaaaaggatatccaggtacctgtgtgccctctctgtaatgtgcctgtgcctgtggccagaggggagccccctgaccgtgctgtgggagagcacattgacagagactgtcgctctgatccagcacagcaaaaacgtaagatcttcaccaataagtgtgaacgcgctggctgccggcagcgagaaatgatgaaactgacctgtgaacgctgtagccgaaacttctgcatcaagcaccggcatccactggaccatgattgctctggggaggggcacccaaccagccgggcaggacttgctgccatctccagagcacaagctgtggcttctacaagcactgtccccagcccaagtcaaaccatgccttcctgtacctctcccagcagagccacaacccgatctccgtcctggacagcccctccagtgattgctttgcagaatggcctgagtgaggatgaagctctgcagcgggccctggaaatgtccctggcagaaaccaaaccccaggttccaagttgtcaggaggaagaagacctagctttagcacaagcactgtcagccagtgaggcagaataccagcggcagcaggcccagagccgcagctcgaagccgtccaactgcagcctgtgctagggccctgggcttggggagggaggttcacctgaggaggactgtggccctcacacctctagggtacacagggagaggaggcccggagcaccctggagggcagagacaagcgggagtgatgtggaggtcgccctgggagcctctggaaggccttgctagtgctccagctgcatggaagagagcggctagcaactgttccctggttgggccctcagtggatgctggccaggccctactcttagccccttcatcatgtcatctcccttatgctggagctgccccgatgtggagtgggcaggaaggggcctggaaaaaataaaggatcttggcagttgataaaa

SEQ ID NO: 51525 - DNA, 1175 bp, Homo sapiens
ggggaggagcgggcgccgggggccggctggcgcgggggctcccagaccctgcccggcttggcgatggagtttccggacctcggcgctcactgttcggagccgagctgtcagcgcttggattttctgccgcttaagtgtgatgcctgctcaggcatcttctgcgcagaccatgtggcctacgcccagcatcactgtggatctgcttaccaaaaggatatccaggtacctgtgtgccctctctgtaatgtgcctgtgcctgtggccagaggggagccccctgaccgtgctgtgggagagcacattgacagagactgtcgctctgatccagcacagcaaaaacgtaagatcttcaccaataagtgtgaacgcgctggctgccggcagcgagaaatgatgaaactgacctgtgaacgctgtagccgaaacttctgcatcaagcaccggcatccactggaccatgattgctctggggaggggcacccaaccagccgggcaggacttgctgccatctccagagcacaagctgtggcttctacaagcactgtccccagcccaagtcaaaccatgccttcctgtacctctcccagcagagccacaacccgatctccgtcctggacagcccctccagtgattgctttgcagaatggcctgagtgaggatgaagctctgcagcgggccctggaaatgtccctggcagaaaccaaaccccaggttccaagttgtcaggaggaagaagacctagctttagcacaagcactgtcagccagtgaggcagaataccagcggcagcaggcccagagccgcagctcgaagccgtccaactgcagcctgtgctagggccctgggcttggggagggaggttcacctgaggaggactgtggccctcacacctctagggtacacagggagaggaggcccggagcaccctggagggcagagacaagcgggagtgatgtggaggtcgccctgggagcctctggaaggccttgctagtgctccagctgcatggaagagagcggctagcaactgttccctggttgggccctcagtggatgctggccaggccctactcttagccccttcatcatgtcatctcccttatgctggagctgccccgatgtggagtgggcaggaaggggcctggaaaaaataaaggatcttggcagttgataaaa

SEQ ID NO: 51526 - DNA, 1155 bp, Homo sapiens
gggccggctggcgcgggggctccagaccctgcccggcttggcgatggagtttccggacctcggcgctcactgttcggagccgagctgtcagcgcttggattttctgccgcttaagtgtgatgcctgctcaggcatcttctgcgcagaccatgtggcctacgcccagcatcactgtggatctgcttaccaaaaggatatccaggtacctgtgtgccctctctgtaatgtgcctgtgcctgtggccagaggggagccccctgaccgtgctgtgggagagcacattgacagagactgtcgctctgatccagcacagcaaaaacgtaagatcttcaccaataagtgtgaacgcgctggctgccggcagcgagaaatgatgaaactgacctgtgaacgctgtagccgaaacttctgcatcaagcaccggcatccactggaccatgattgctctggggaggggcacccaaccagccgggcaggacttgctgccatctccagagcacaagctgtggcttctacaagcactgtccccagcccaagtcaaaccatgccttcctgtacctctcccagcagagccacaacccgatctccgtcctggacagcccctccagtgattgctttgcagaatggcctgagtgaggatgaagctctgcagcgggccctggaaatgtccctggcagaaaccaaaccccaggttccaagttgtcaggaggaagaagacctagctttagcacaagcactgtcagccagtgaggcagaataccagcggcagcaggcccagagccgcagctcgaagccgtccaactgcagcctgtgctagggccctgggcttggggagggaggttcacctgaggaggactgtggccctcacacctctagggtacacagggagaggaggcccggagcaccctggagggcagagacaagcgggagtgatgtggaggtcgccctgggagcctctggaaggccttgctagtgctccagctgcatggaagagagcggctagcaactgttccctggttgggccctcagtggatgctggccaggccctactcttagccccttcatcatgtcatctcccttatgctggagctgccccgatgtggagtgggcaggaaggggcctggaaaaaataaaggatcttggcagttgataaaa

SEQ ID NO: 51527 - DNA, 1128 bp, Homo sapiens
ggtggcgaggagttccggacctcagcgctcactgtcggagccatctgtcaccgggagggcggccgcgtaaaattttctgccgcttaagtgtgatgcctgctcaggcatcttctgcgcagaccatgtggcctacgcccagcatcactgtggatctgcttaccaaaaggatatccaggtacctgtgtgccctctctgtaatgtgcctgtgcctgtggccagaggggagccccctgaccgtgctgtgggagagcacattgacagagactgtcgctctgatccagcacagcaaaaacgtaagatcttcaccaataagtgtgaacgcgctggctgccggcagcgagaaatgatgaaactgacctgtgaacgctgtagccgaaacttctgcatcaagcaccggcatccactggaccatgattgctctggggaggggcacccaaccagccgggcaggacttgctgccatctccagagcacaagctgtggcttctacaagcactgtccccagcccaagtcaaaccatgccttcctgtacctctcccagcagagccacaacccgatctccgtcctggacagcccctccagtgattgctttgcagaatggcctgagtgaggatgaagctctgcagcgggccctggaaatgtccctggcagaaaccaaaccccaggttccaagttgtcaggaggaagaagacctagctttagcacaagcactgtcagccagtgaggcagaataccagcggcagcaggcccagagccgcagctcgaagccgtccaactgcagcctgtgctagggccctgggcttggggagggaggttcacctgaggaggactgtggccctcacacctctagggtacacagggagaggaggcccggagcaccctggagggcagagacaagcgggagtgatgtggaggtcgccctgggagcctctggaaggccttgctagtgctccagctgcatggaagagagcggctagcaactgttccctggttgggccctcagtggatgctggccaggccctactcttagccccttcatcatgtcatctcccttatgctggagctgccccgatgtggagtgggcaggaaggggcctggaaaaaataaaggatcttggcagttgataaaa

SEQ ID NO: 51528 - DNA, 1109 bp, Homo sapiens
aagagtggtatcaacgcagagtggccattacgtccggggagtgcggggtcgcggtgcggacttcgagcacgagccctaaagacgctcagcactcgtcgcttctcctagcagaccctgcccggcttggcgatggagtttccggacctcggcgctcactgttcggagccgagctgtcagcgcttggattttctgccgcttaagtgtgatgcctgctcaggcatcttctgcgcagaccatgtggcctacgcccagcatcactgtggatctgcttaccaaaagatcttcaccaataagtgtgaacgcgctggctgccggcagcgagaaatgatgaaactgacctgtgaacgctgtagccgaaacttctgcatcaagcaccggcatccactggaccatgattgctctggggaggggcacccaaccagccgggcaggacttgctgccatctccagagcacaagctgtggcttctacaagcactgtccccagcccaagtcaaaccatgccttcctgtacctctcccagcagagccacaacccgatctccgtcctggacagcccctccagtgattgctttgcagaatggcctgagtgaggatgaagctctgcagcgggccctggaaatgtccctggcagaaaccaaaccccaggttccaagttgtcaggaggaagaagacctagctttagcacaagcactgtcagccagtgaggcagaataccagcggcagcaggcccagagccgcagctcgaagccgtccaactgcagcctgtgctagggccctgggcttggggagggaggttcacctgaggaggactgtggccctcacacctctagggtacacagggagaggaggcccggagcaccctggagggcagagacaagcgggagtgatgtggaggtcgccctgggagcctctggaaggccttgctagtgctccagctgcatggaagagagcggctagcaactgttccctggttgggccctcagtggatgctggccaggccctactcttagccccttcatcatgtcatctcccttatgctggagctgccccgatgtggagtgggcaggaaggggcctggaaaaaataaaggatcttggcagttgataaaa

SEQ ID NO: 51529 - DNA, 1240 bp, Homo sapiens
gggccggctggcgcgggggctccagaccctgcccggcttggcgatggagtttccggacctcggcgctcactgttcggagccgagctgtcagcgcttggattttctgccgcttaagtgtgatgcctgctcaggcatcttctgcgcagaccatgtggcctacgcccagcatcactgtggatctgcttaccaaaaggatatccaggtacctgtgtgccctctctgtaatgtgcctgtgcctgtggccagaggggagccccctgaccgtgctgtgggagagcacattgacagagactgtcgctctgatccagcacagcaaaaacgtaagatcttcaccaataagtgtgaacgcgctggctgccggcagcgagaaatgatgaaactgacctgtgaacgctgtagccgaaacttctgcatcaagcaccggcatccactggaccatgattgctctggggaggggcacccaaccagccgggcaggacttgctgccatctccagagcacaagctgtggcttctacaagcactgtccccagcccaagtcaaaccatgccttcctgtacctctcccagcagagccacaacccgatctccgtcctggacagcccctccagtgattgctttgcagaatggcctggtgagttgggcagaggttggatggacagaaacaaacacacagagagtgaagtccaaggacgctggtcttctttctccctttgtagagtgaggatgaagctctgcagcgggccctggaaatgtccctggcagaaaccaaaccccaggttccaagttgtcaggaggaagaagacctagctttagcacaagcactgtcagccagtgaggcagaataccagcggcagcaggcccagagccgcagctcgaagccgtccaactgcagcctgtgctagggccctgggcttggggagggaggttcacctgaggaggactgtggccctcacacctctagggtacacagggagaggaggcccggagcaccctggagggcagagacaagcgggagtgatgtggaggtcgccctgggagcctctggaaggccttgctagtgctccagctgcatggaagagagcggctagcaactgttccctggttgggccctcagtggatgctggccaggccctactcttagccccttcatcatgtcatctcccttatgctggagctgccccgatgtggagtgggcaggaaggggcctggaaaaaataaaggatcttggcagttgataaaa

SEQ ID NO: 51530 - DNA, 861 bp, Homo sapiens
  misc_feature (75)..(75): n is a, c, g, or t
aaatttaccccccaaaaaagggaataagcttaaggcccgctcatttatattaatgttttattttaataaactgcnaagatcctttattttttccaggccccttcctgcccactccacatcggggcagctccagcataagggagatgacatgatgaaggggctaagagtagggcctggccagcatccactgagggcccaaccagggaacagttgctagccgctctcttccatgcagctggagcactagcaaggccttccagaggctcccagggcgacagccacaacccgatctccgtcctggacagcccctccagtgattgctttgcagaatggcctgagtgaggatgaagctctgcagcgggccctggaaatgtccctggcagaaaccaaaccccaggttccaagttgtcaggaggaagaagacctagctttagcacaagcactgtcagccagtgaggcagaataccagcggcagcaggcccagagccgcagctcgaagccgtccaactgcagcctgtgctagggccctgggcttggggagggaggttcacctgaggaggactgtggccctcacacctctagggtacacagggagaggaggcccggagcaccctggagggcagagacaagcgggagtgatgtggaggtcgccctgggagcctctggaaggccttgctagtgctccagctgcatggaagagagcggctagcaactgttccctggttgggccctcagtggatgctggccaggccctactcttagccccttcatcatgtcatctcccttatgctggagctgccccgatgtggagtgggcaggaaggggcctggaaaaaataaaggatcttggcagttgataaaa

SEQ ID NO: 51531 - DNA, 1260 bp, Homo sapiens
ggggaggagcgggcgccgggggccggctggcgcgggggctcccagaccctgcccggcttggcgatggagtttccggacctcggcgctcactgttcggagccgagctgtcagcgcttggattttctgccgcttaagtgtgatgcctgctcaggcatcttctgcgcagaccatgtggcctacgcccagcatcactgtggatctgcttaccaaaaggatatccaggtacctgtgtgccctctctgtaatgtgcctgtgcctgtggccagaggggagccccctgaccgtgctgtgggagagcacattgacagagactgtcgctctgatccagcacagcaaaaacgtaagatcttcaccaataagtgtgaacgcgctggctgccggcagcgagaaatgatgaaactgacctgtgaacgctgtagccgaaacttctgcatcaagcaccggcatccactggaccatgattgctctggggaggggcacccaaccagccgggcaggacttgctgccatctccagagcacaagctgtggcttctacaagcactgtccccagcccaagtcaaaccatgccttcctgtacctctcccagcagagccacaacccgatctccgtcctggacagcccctccagtgattgctttgcagaatggcctggtgagttgggcagaggttggatggacagaaacaaacacacagagagtgaagtccaaggacgctggtcttctttctccctttgtagagtgaggatgaagctctgcagcgggccctggaaatgtccctggcagaaaccaaaccccaggttccaagttgtcaggaggaagaagacctagctttagcacaagcactgtcagccagtgaggcagaataccagcggcagcaggcccagagccgcagctcgaagccgtccaactgcagcctgtgctagggccctgggcttggggagggaggttcacctgaggaggactgtggccctcacacctctagggtacacagggagaggaggcccggagcaccctggagggcagagacaagcgggagtgatgtggaggtcgccctgggagcctctggaaggccttgctagtgctccagctgcatggaagagagcggctagcaactgttccctggttgggccctcagtggatgctggccaggccctactcttagccccttcatcatgtcatctcccttatgctggagctgccccgatgtggagtgggcaggaaggggcctggaaaaaataaaggatcttggcagttgataaaa

SEQ ID NO: 51532 - DNA, 1530 bp, Homo sapiens
ggggaggagcgggcgccgggggccggctggcgcgggggctccggtaacccgggctgggcgggggagaggaaggggcggggcagggagcccgccagagtgcggggtcgcggtgcggacttcgagcacgagccctaaagacgctcagcactcgtcgcttctcctagcagaccctgcccggcttggcgatggagtttccggacctcggcgctcactgttcggagccgagctgtcagcgcttggattttctgccgcttaagtgtgatgcctgctcaggcatcttctgcgcagaccatgtggcctacgcccagcatcactgtggatctgcttaccaaaaggatatccaggtacctgtgtgccctctctgtaatgtgcctgtgcctgtggccagaggggagccccctgaccgtgctgtgggagagcacattgacagagactgtcgctctgatccagcacagcaaaaacgtaagatcttcaccaataagtgtgaacgcgctggctgccggcagcgagaaatgatgaaactgacctgtgaacgctgtagccgaaacttctgcatcaagcaccggcatccactggaccatgattgctctggggaggggcacccaaccagccgggcaggacttgctgccatctccagagcacaagctgtggcttctacaagcactgtccccagcccaagtcaaaccatgccttcctgtacctctcccagcagagccacaacccgatctccgtcctggacagcccctccagtgattgctttgcagaatggcctgagtgaggatgaagctctgcagcgggccctggaaatgtccctggcagaaaccaaaccccaggttccaaggtaccttaccctcttgtgaaagagagcgcaagctgtgggcaagggcttggtctggaggcaggtaggtgggaccactctgacacaatgcaagataatcgctggcaacttggtctcaaaattaagatgaactatatgatctttgacaagttatttaacccatggagccttcatttcctctataaaacggggacaatactaatacccaccttgtagtgttgctatgaagattgagataatcctcagcagtgctcagcaccatgaggcccaacacacacagatcagatgttcaaatttcagatcttaccatcatccaacttaaactgtttctccctcccagttgtcaggaggaagaagacctagctttagcacaagcactgtcagccagtgaggcagaataccagcggcagcagggtacacagggagaggaggcccggagcaccctggagggcagagacaagcgggagtgatgtggaggtcgccctgggagcctctggaaggccttgctagtgctccagctgcatggaagagagcggctagcaactgttccctggttgggccctcagtggatgctggccaggccctactcttagccccttcatcatgtcatctcccttatgctggagctgccccgatgtggagtgggcaggaaggggcctggaaaaaataaaggatcttggcagttgataaaa

SEQ ID NO: 51533 - DNA, 1259 bp, Homo sapiens
agtcgtctctagcaggatcccctgtcagcatttccatgcagagccacaacccgatctccgtcctggacagcccctccagtgattgctttgcagaatggcctggtgagttgggcagaggttggatggacagaaacaaacacacagagagtgaagtccaaggacgctggtcttctttctccctttgtagagtgaggatgaagctctgcagcgggccctggaaatgtccctggcagaaaccaaaccccaggttccaaggtaccttaccctcttgtgaaagagagcgcaagctgtgggcaagggcttggtctggaggcaggtaggtgggaccactctgacacaatgcaagataatcgctggcaacttggtctcaaaattaagatgaactatatgatctttgacaagttatttaacccatggagccttcatttcctctataaaacggggacaatactaatacccaccttgtagtgttgctatgaagattgagataatcctcagcagtgctcagcaccatgaggcccaacacacacagatcagatgttcaaatttcagatcttaccatcatccaacttaaactgtttctccctcccagttgtcaggaggaagaagacctagctttagcacaagcactgtcagccagtgaggcagaataccagcggcagcaggtatgaggctgggctgaagatatatgctgcagtggaagggaggaagaagtcagggatgggggttcttcctagtggtgcagagttttggaatggtggttatcgtctggttttcagtatgactccagcccatgctgagctctgaaatgagggctgtccctcatttccttgacgttgcactgtgtcttcccctccttcccctctctttgctctagcccagagccgcagctcgaagccgtccaactgcagcctgtgctagggccctgggcttggggagggaggttcacctgaggaggactgtggccctcacacctctagggtacacagggagaggaggcccggagcaccctggagggcagagacaagcgggagtgatgtggaggtcgccctgggagcctctggaaggccttgctagtgctccagctgcatggaagagagcggctagcaactgttccctggttgggccctcagtggatgctggccaggccctactcttagccccttcatcatgtcatctcccttatgctggagctgccccgatgtggagtgggcaggaaggggcctggaaaaaataaaggatcttggcagttgataaaa

SEQ ID NO: 51534 - DNA, 745 bp, Homo sapiens
  misc_feature (19)..(19): n is a, c, g, or t
attcggcacgacgggcgcngggggcggctggcgcgggggctcagaccctgcccggcttggcgatggagtttccggacctcggcgctcactgttcggagccgagctgtcagcgcttggattttctgccgcttaagtgtgatgcctgctcaggcatcttctgcgcagaccatgtggcctacgcccagcatcactgtggatctgcttaccaaaaggatatccaggtacctgtgtgccctctctgtaatgtgcctgtgcctgtggccagaggggagccccctgaccgtgctgtgggagagcacattgacagagactgtcgctctgatccagcacagcaaaaacgtaagatcttcaccaataagtgtgaacgcgctggctgccggcagcgagaaatgatgaaactgacctgtgaacgctgtagccgaaacttctgcatcaagcaccggcatccactggaccatgattgctctggggaggggcacccaaccagccgggcaggacttgctgccatctccagagcacaagctgtggaggtcgccctgggagcctctggaaggccttgctagtgctccagctgcatggaagagagcggctagcaactgttccctggttgggccctcagtggatgctggccaggccctactcttagccccttcatcatgtcatctcccttatgctggagctgccccgatgtggagtgggcaggaaggggcctggaaaaaataaaggatcttggcagttgataaaa

SEQ ID NO: 51535 - DNA, 593 bp, Homo sapiens
aagagtggtatcaacgcagagtggccattacgtccggggagtgcggggtcgcggtgcggacttcgagcacgagccctaaagacgctcagcactcgtcgcttctcctagcagaccctgcccggcttggcgatggagtttccggacctcggcgctcactgttcggagccgagctgtcagcgcttggattttctgccgcttaagtgtgatgcctgctcaggcatcttctgcgcagaccatgtggcctacgcccagcatcactgtggatctgcttaccaaaaggatatccaggtacctgtgtgccctctctgtaatgtgcctgtgcctgtggccagaggggagccccctgaccgtgctgtgggagagcacattgacagagactgtcgctctgatccagcacagcaaaaacgtaagatcttcaccaataagtgtgaacgcgctggctgccggcagcgagaaatgatgaaactgacctgctggccaggccctactcttagccccttcatcatgtcatctcccttatgctggagctgccccgatgtggagtgggcaggaaggggcctggaaaaaataaaggatcttggcagttgataaaa

SEQ ID NO: 51536 - DNA, 387 bp, Homo sapiens
tgacagtgcttgtgctaaagctaggtcttcttcctcctgacaacttggaacctggggtttggtttctgccagggacatttccagggcccgctgcagagcttcatcctcactcaggccattctgcaaagcaatcactggaggggctgtccaggacggagatcgggttgtggaggtcgccctgggagcctctggaaggccttgctagtgctccagctgcatggaagagagcggctagcaactgttccctggttgggccctcagtggatgctggccaggccctactcttagccccttcatcatgtcatctcccttatgctggagctgccccgatgtggagtgggcaggaaggggcctggaaaaaataaaggatcttggcagttgataaaa

SEQ ID NO: 51537 - DNA, 1845 bp, Homo sapiens
ggggaggagcgggcgccgggggccggctggcgcgggggctccggtaacccgggctgggcgggggagaggaaggggcggggcagggagcccgccagagtgcggggtcgcggtgcggacttcgagcacgagccctaaagacgctcagcactcgtcgcttctcctagcagaccctgcccggcttggcgatggagtttccggacctcggcgctcactgttcggagccgagctgtcagcgcttggattttctgccgcttaagtgtgatgcctgctcaggcatcttctgcgcagaccatgtggcctacgcccagcatcactgtggatctgcttaccaaaaggatatccaggtacctgtgtgccctctctgtaatgtgcctgtgcctgtggccagaggggagccccctgaccgtgctgtgggagagcacattgacagagactgtcgctctgatccagcacagcaaaaacgtaagatcttcaccaataagtgtgaacgcgctggctgccggcagcgagaaatgatgaaactgacctgtgaacgctgtagccgaaacttctgcatcaagcaccggcatccactggaccatgattgctctggggaggggcacccaaccagccgggcaggacttgctgccatctccagagcacaagctgtggcttctacaagcactgtccccagcccaagtcaaaccatgccttcctgtacctctcccagcagagccacaacccgatctccgtcctggacagcccctccagtgattgctttgcagaatggcctgagtgaggatgaagctctgcagcgggccctggaaatgtccctggcagaaaccaaaccccaggttccaaggtaccttaccctcttgtgaaagagagcgcaagctgtgggcaagggcttggtctggaggcaggtaggtgggaccactctgacacaatgcaagataatcgctggcaacttggtctcaaaattaagatgaactatatgatctttgacaagttatttaacccatggagccttcatttcctctataaaacggggacaatactaatacccaccttgtagtgttgctatgaagattgagataatcctcagcagtgctcagcaccatgaggcccaacacacacagatcagatgttcaaatttcagatcttaccatcatccaacttaaactgtttctccctcccagttgtcaggaggaagaagacctagctttagcacaagcactgtcagccagtgaggcagaataccagcggcagcaggtatgaggctgggctgaagatatatgctgcagtggaagggaggaagaagtcagggatgggggttcttcctagtggtgcagagttttggaatggtggttatcgtctggttttcagtatgactccagcccatgctgagctctgaaatgagggctgtccctcatttccttgacgttgcactgtgtcttcccctccttcccctctctttgctctagcccagagccgcagctcgaagccgtccaactgcagcctgtgctagggccctgggcttggggagggaggttcacctgaggaggactgtggccctcacacctctagggtacacagggagaggaggcccggagcaccctggagggcagagacaagcgggagtgatgtggaggtcgccctgggagcctctggaaggccttgctagtgctccagctgcatggaagagagcggctagcaactgttccctggttgggccctcagtggatgctggccaggccctactcttagccccttcatcatgtcatctcccttatgctggagctgccccgatgtggagtgggcaggaaggggcctggaaaaaataaaggatcttggcagttgataaaa

SEQ ID NO: 51538 - DNA, 1174 bp, Homo sapiens
  misc_feature (19)..(19): n is a, c, g, or t
attcggcacgacgggcgcngggggcggctggcgcgggggctcagaccctgcccggcttggcgatggagtttccggacctcggcgctcactgttcggagccgagctgtcagcgcttggattttctgccgcttaagtgtgatgcctgctcaggcatcttctgcgcagaccatgtggcctacgcccagcatcactgtggatctgcttaccaaaaggatatccaggtacctgtgtgccctctctgtaatgtgcctgtgcctgtggccagaggggagccccctgaccgtgctgtgggagagcacattgacagagactgtcgctctgatccagcacagcaaaaacgtaagatcttcaccaataagtgtgaacgcgctggctgccggcagcgagaaatgatgaaactgacctgtgaacgctgtagccgaaacttctgcatcaagcaccggcatccactggaccatgattgctctggggaggggcacccaaccagccgggcaggacttgctgccatctccagagcacaagctgtggcttctacaagcactgtccccagcccaagtcaaaccatgccttcctgtacctctcccagcagagccacaacccgatctccgtcctggacagcccctccagtgattgctttgcagaatggcctgagtgaggatgaagctctgcagcgggccctggaaatgtccctggcagaaaccaaaccccaggttccaagttgtcaggaggaagaagacctagctttagcacaagcactgtcagccagtgaggcagaataccagcggcagcaggcccagagccgcagctcgaagccgtccaactgcagcctgtgctagggccctgggcttggggagggaggttcacctgaggaggactgtggccctcacacctctagggtacacagggagaggaggcccggagcaccctggagggcagagacaagcgggagtgatgtggaggtcgccctgggagcctctggaaggccttgctagtgctccagctgcatggaagagagcggctagcaactgttccctggttgggccctcagtggatgctggccaggccctactcttagccccttcatcatgtcatctcccttatgctggagctgccccgatgtggagtgggcaggaaggggcctggaaaaaataaaggatcttggcagttgataaaa

SEQ ID NO: 51539 - DNA, 1930 bp, Homo sapiens
ggggaggagcgggcgccgggggccggctggcgcgggggctccggtaacccgggctgggcgggggagaggaaggggcggggcagggagcccgccagagtgcggggtcgcggtgcggacttcgagcacgagccctaaagacgctcagcactcgtcgcttctcctagcagaccctgcccggcttggcgatggagtttccggacctcggcgctcactgttcggagccgagctgtcagcgcttggattttctgccgcttaagtgtgatgcctgctcaggcatcttctgcgcagaccatgtggcctacgcccagcatcactgtggatctgcttaccaaaaggatatccaggtacctgtgtgccctctctgtaatgtgcctgtgcctgtggccagaggggagccccctgaccgtgctgtgggagagcacattgacagagactgtcgctctgatccagcacagcaaaaacgtaagatcttcaccaataagtgtgaacgcgctggctgccggcagcgagaaatgatgaaactgacctgtgaacgctgtagccgaaacttctgcatcaagcaccggcatccactggaccatgattgctctggggaggggcacccaaccagccgggcaggacttgctgccatctccagagcacaagctgtggcttctacaagcactgtccccagcccaagtcaaaccatgccttcctgtacctctcccagcagagccacaacccgatctccgtcctggacagcccctccagtgattgctttgcagaatggcctggtgagttgggcagaggttggatggacagaaacaaacacacagagagtgaagtccaaggacgctggtcttctttctccctttgtagagtgaggatgaagctctgcagcgggccctggaaatgtccctggcagaaaccaaaccccaggttccaaggtaccttaccctcttgtgaaagagagcgcaagctgtgggcaagggcttggtctggaggcaggtaggtgggaccactctgacacaatgcaagataatcgctggcaacttggtctcaaaattaagatgaactatatgatctttgacaagttatttaacccatggagccttcatttcctctataaaacggggacaatactaatacccaccttgtagtgttgctatgaagattgagataatcctcagcagtgctcagcaccatgaggcccaacacacacagatcagatgttcaaatttcagatcttaccatcatccaacttaaactgtttctccctcccagttgtcaggaggaagaagacctagctttagcacaagcactgtcagccagtgaggcagaataccagcggcagcaggtatgaggctgggctgaagatatatgctgcagtggaagggaggaagaagtcagggatgggggttcttcctagtggtgcagagttttggaatggtggttatcgtctggttttcagtatgactccagcccatgctgagctctgaaatgagggctgtccctcatttccttgacgttgcactgtgtcttcccctccttcccctctctttgctctagcccagagccgcagctcgaagccgtccaactgcagcctgtgctagggccctgggcttggggagggaggttcacctgaggaggactgtggccctcacacctctagggtacacagggagaggaggcccggagcaccctggagggcagagacaagcgggagtgatgtggaggtcgccctgggagcctctggaaggccttgctagtgctccagctgcatggaagagagcggctagcaactgttccctggttgggccctcagtggatgctggccaggccctactcttagccccttcatcatgtcatctcccttatgctggagctgccccgatgtggagtgggcaggaaggggcctggaaaaaataaaggatcttggcagttgataaaa

SEQ ID NO: 51540 - DNA, 1251 bp, Homo sapiens
  misc_feature (19)..(19): n is a, c, g, or t
attcggcacgacgggcgcngggggcggctggcgcgggggctcagaccctgcccggcttggcgatggagtttccggacctcggcgctcactgttcggagccgagctgtcagcgcttggattttctgccgcttaagtgtgatgcctgctcaggcatcttctgcgcagaccatgtggcctacgcccagcatcactgtggatctgcttaccaaaaggatatccaggtacctgtgtgccctctctgtaatgtgcctgtgcctgtggccagaggggagccccctgaccgtgctgtgggagagcacattgacagagactgtcgctctgatccagcacagcaaaaacgtaagatcttcaccaataagtgtgaacgcgctggctgccggcagcgagaaatgatgaaactgacctgtgaacgctgtagccgaaacttctgcatcaagcaccggcatccactggaccatgattgctctggggaggggcacccaaccagccgggcaggacttgctgccatctccagagcacaagctgtggcttctacaagcactgtccccagcccaagtcaaaccatgccttcctgtacctctcccagcaggtaggcctgcccgtttccctgctccccctttttccccttcacacctctgacctccacctcttcaatgtctgtcgtagagccacaacccgatctccgtcctggacagcccctccagtgattgctttgcagaatggcctgagtgaggatgaagctctgcagcgggccctggaaatgtccctggcagaaaccaaaccccaggttccaagttgtcaggaggaagaagacctagctttagcacaagcactgtcagccagtgaggcagaataccagcggcagcaggcccagagccgcagctcgaagccgtccaactgcagcctgtgctagggccctgggcttggggagggaggttcacctgaggaggactgtggccctcacacctctagggtacacagggagaggaggcccggagcaccctggagggcagagacaagcgggagtgatgtggaggtcgccctgggagcctctggaaggccttgctagtgctccagctgcatggaagagagcggctagcaactgttccctggttgggccctcagtggatgctggccaggccctactcttagccccttcatcatgtcatctcccttatgctggagctgccccgatgtggagtgggcaggaaggggcctggaaaaaataaaggatcttggcagttgataaaa

SEQ ID NO: 51541 - DNA, 1654 bp, Homo sapiens
aggacatgcgagtcccgctggacctgcaatccgaccaactctttgcagaattttctgccgcttaagtgtgatgcctgctcaggcatcttctgcgcagaccatgtggcctacgcccagcatcactgtggatctgcttaccaaaaggatatccaggtacctgtgtgccctctctgtaatgtgcctgtgcctgtggccagaggggagccccctgaccgtgctgtgggagagcacattgacagagactgtcgctctgatccagcacagcaaaaacgtaagatcttcaccaataagtgtgaacgcgctggctgccggcagcgagaaatgatgaaactgacctgtgaacgctgtagccgaaacttctgcatcaagcaccggcatccactggaccatgattgctctggggaggggcacccaaccagccgggcaggacttgctgccatctccagagcacaagctgtggcttctacaagcactgtccccagcccaagtcaaaccatgccttcctgtacctctcccagcagagccacaacccgatctccgtcctggacagcccctccagtgattgctttgcagaatggcctgagtgaggatgaagctctgcagcgggccctggaaatgtccctggcagaaaccaaaccccaggttccaaggtaccttaccctcttgtgaaagagagcgcaagctgtgggcaagggcttggtctggaggcaggtaggtgggaccactctgacacaatgcaagataatcgctggcaacttggtctcaaaattaagatgaactatatgatctttgacaagttatttaacccatggagccttcatttcctctataaaacggggacaatactaatacccaccttgtagtgttgctatgaagattgagataatcctcagcagtgctcagcaccatgaggcccaacacacacagatcagatgttcaaatttcagatcttaccatcatccaacttaaactgtttctccctcccagttgtcaggaggaagaagacctagctttagcacaagcactgtcagccagtgaggcagaataccagcggcagcaggtatgaggctgggctgaagatatatgctgcagtggaagggaggaagaagtcagggatgggggttcttcctagtggtgcagagttttggaatggtggttatcgtctggttttcagtatgactccagcccatgctgagctctgaaatgagggctgtccctcatttccttgacgttgcactgtgtcttcccctccttcccctctctttgctctagcccagagccgcagctcgaagccgtccaactgcagcctgtgctagggccctgggcttggggagggaggttcacctgaggaggactgtggccctcacacctctagggtacacagggagaggaggcccggagcaccctggagggcagagacaagcgggagtgatgtggaggtcgccctgggagcctctggaaggccttgctagtgctccagctgcatggaagagagcggctagcaactgttccctggttgggccctcagtggatgctggccaggccctactcttagccccttcatcatgtcatctcccttatgctggagctgccccgatgtggagtgggcaggaaggggcctggaaaaaataaaggatcttggcagttgataaaa

SEQ ID NO: 51542 - DNA, 1224 bp, Homo sapiens
ggggaggagcgggcgccgggggccggctggcgcgggggctccggtaacccgggctgggcgggggagaggaaggggcggggcagggagcccgccagagtgcggggtcgcggtgcggacttcgagcacgagccctaaagacgctcagcactcgtcgcttctcctagcagaccctgcccggcttggcgatggagtttccggacctcggcgctcactgttcggagccgagctgtcagcgcttggattttctgccgcttaagtgtgatgcctgctcaggcatcttctgcgcagaccatgtggcctacgcccagcatcactgtggatctgcttaccaaaaggatatccaggtacctgtgtgccctctctgtaatgtgcctgtgcctgtggccagaggggagccccctgaccgtgctgtgggagagcacattgacagagactgtcgctctgatccagcacagcaaaaacgtaagatcttcaccaataagtgtgaacgcgctggctgccggcagcgagaaatgatgaaactgacctgtgaacgctgtagccgaaacttctgcatcaagcaccggcatccactggaccatgattgctctggggaggggcacccaaccagccgggcaggacttgctgccatctccagagcacaagctgtggcttctacaagcactgtccccagcccaagtcaaaccatgccttcctgtacctctcccagcagagccacaacccgatctccgtcctggacagcccctccagtgattgctttgcagaatggcctgagtgaggatgaagctctgcagcgggccctggaaatgtccctggcagaaaccaaaccccaggttccaaggcccagagccgcagctcgaagccgtccaactgcagcctgtgctagggccctgggcttggggagggaggttcacctgaggaggactgtggccctcacacctctagggtacacagggagaggaggcccggagcaccctggagggcagagacaagcgggagtgatgtggaggtcgccctgggagcctctggaaggccttgctagtgctccagctgcatggaagagagcggctagcaactgttccctggttgggccctcagtggatgctggccaggccctactcttagccccttcatcatgtcatctcccttatgctggagctgccccgatgtggagtgggcaggaaggggcctggaaaaaataaaggatcttggcagttgataaaa

SEQ ID NO: 51543 - DNA, 1667 bp, Homo sapiens
  misc_feature (19)..(19): n is a, c, g, or t
attcggcacgacgggcgcngggggcggctggcgcgggggctcagaccctgcccggcttggcgatggagtttccggacctcggcgctcactgttcggagccgagctgtcagcgcttggattttctgccgcttaagtgtgatgcctgctcaggcatcttctgcgcagaccatgtggcctacgcccagcatcactgtggatctgcttaccaaaagatcttcaccaataagtgtgaacgcgctggctgccggcagcgagaaatgatgaaactgacctgtgaacgctgtagccgaaacttctgcatcaagcaccggcatccactggaccatgattgctctggggaggggcacccaaccagccgggcaggacttgctgccatctccagagcacaagctgtggcttctacaagcactgtccccagcccaagtcaaaccatgccttcctgtacctctcccagcaggtaggcctgcccgtttccctgctccccctttttccccttcacacctctgacctccacctcttcaatgtctgtcgtagagccacaacccgatctccgtcctggacagcccctccagtgattgctttgcagaatggcctgagtgaggatgaagctctgcagcgggccctggaaatgtccctggcagaaaccaaaccccaggttccaaggtaccttaccctcttgtgaaagagagcgcaagctgtgggcaagggcttggtctggaggcaggtaggtgggaccactctgacacaatgcaagataatcgctggcaacttggtctcaaaattaagatgaactatatgatctttgacaagttatttaacccatggagccttcatttcctctataaaacggggacaatactaatacccaccttgtagtgttgctatgaagattgagataatcctcagcagtgctcagcaccatgaggcccaacacacacagatcagatgttcaaatttcagatcttaccatcatccaacttaaactgtttctccctcccagttgtcaggaggaagaagacctagctttagcacaagcactgtcagccagtgaggcagaataccagcggcagcaggtatgaggctgggctgaagatatatgctgcagtggaagggaggaagaagtcagggatgggggttcttcctagtggtgcagagttttggaatggtggttatcgtctggttttcagtatgactccagcccatgctgagctctgaaatgagggctgtccctcatttccttgacgttgcactgtgtcttcccctccttcccctctctttgctctagcccagagccgcagctcgaagccgtccaactgcagcctgtgctagggccctgggcttggggagggaggttcacctgaggaggactgtggccctcacacctctagggtacacagggagaggaggcccggagcaccctggagggcagagacaagcgggagtgatgtggaggtcgccctgggagcctctggaaggccttgctagtgctccagctgcatggaagagagcggctagcaactgttccctggttgggccctcagtggatgctggccaggccctactcttagccccttcatcatgtcatctcccttatgctggagctgccccgatgtggagtgggcaggaaggggcctggaaaaaataaaggatcttggcagttgataaaa

SEQ ID NO: 51544 - DNA, 548 bp, Homo sapiens
aagagtggtatcaacgcagagtggccattacgtccggggagtgcggggtcgcggtgcggacttcgagcacgagccctaaagacgctcagcactcgtcgcttctcctagcagaccctgcccggcttggcgatggagtttccggacctcggcgctcactgttcggagccgagctgtcagcgcttggattttctgccgcttaagtgtgatgcctgctcaggcatcttctgcgcagaccatgtggcctacgcccagcatcactgtggatctgcttaccaaaaggatatccaggtacctgtgtgccctctctgtaatgtgcctgtgcctgtggccagaggggagccccctgaccgtgctgtgggagagcacattgacagagactgtcgctctgatccagcacagcaaaaacgtaagatcttcaccaataagtgtgaacgcgctggctgccggcagcgagaaatgatgaaactgacctgtgaacgctgtagccgaaacttctgcatcaatcatggtccagtggatgccggtgcttgatgcagaagttgtcgacg

SEQ ID NO: 51545 - DNA, 999 bp, Homo sapiens
tactgtaactgctggccacttttccattaaaggcaaaatggcaacattgctcattgttttctcaatgtctttttatagaaattgtacttgcaccagcgcccagtgctgctccatgcttgccctcagtctgaactctgattggtgtctcgcagtggggaggagttcatgtagagggagtctgttgtgggagaaaggaaagtatgtggaggaggagagggattttaataacggcaggaggtctttaaatgggacactgccaccagtcatgaaattgacactgtgtgattttcaagggaaggggtacaatgctaaaacgttacaagccatgagtaacatttattggtgcaaatgcaagtttatactctacccatattaaaaaacaaccccttttctagtattccttatgtcagtaagtggaccctaccacccaaaagttgcctcaaaattctccttcccttccaatagggcaccagatatgtccatcctcactcctgtttttctctaaagcctcactgtcccttaatctagacctccctttgactggcaggcaagaatctaggcaagactcatgtttcttgccttctagaatgacatctcctaattgtctcttcacatcagaacaatggctactaaaactaaccctaatcattttatttctataaaaaacccagctggtttccccttagctactggttaagatagacatgagacatggcatcaagattctttaccacctctccaggcttatcaacccctccttccaaaacacacaccagcagtcagtccattccaacagattgtctttctcagctgctccaggctctttcatgtcttcctgccttggcacaaactatccctttgcctcaaatattttttctgattctacacataatggcttgctaactcatctttaaaaacccaagtcacatgctatattcagctctgaaatgccttctctggtcttcctctattcctggagcatttgtgttataacccaac

SEQ ID NO: 51546 - DNA, 363 bp, Homo sapiens
cttcaaagaattcgcaagtgggagaatgaactgttagctcagtctctctcacaccctgaagagtgtacacgtgacttgtgtattgaatcagcctgtaggtctctttaaaccgggtggtggctttaaaccacagagaggttgcttcttcccagaggatattgcctgtgctggttggtccccattgtttaagttggatgcacgctaatgtgctgttgcggcattctggacgaatgctgaggagactgtatttgttcatgacatctgatgtgagtcttgaacttgttacatttatttctctgcttttggtcacatcttggtctgatgaccaaacaaggcaactgtgcccttttctagactgatgtc

SEQ ID NO: 51547 - DNA, 986 bp, Homo sapiens
tctgaacagaactccaccctctacccctgacaccatgacccactgttgttccccttgctgtcagcctacgtgctgcaggaccacctgctggaagcccaccactgtgaccacctgcagcagcacaccctgctgccagccctcctgctgtgtgtccagctgctgccagccttgctgccgcccaacttgctgtcaaaacacctgctgccagcccatctgtgtgaccagctgctgccagccttcctgctgcagcacaccctgctgtcagcccacctgctgtggccaaaccagctgtgggtccagctgtggtcagagcagctcctgtgcacctgtgtactgcagaagaacctgctaccaccccacgactgtctgcctgcctggttgcctaaaccagagctgtggctccagctgctgccagccctgctgccgcccagcctgctgtgagaccacctgctgcaggacaacttgcttccagcccacctgtgtgtacagctgctgccagccttcttgctgctgatcaagtcccaagagaaccaccatactcacacaacaaatttctgctcaactgactcatcttttgggggactaatttaatttgctgctgacagccaccatgctttcacccaaatttttatgaattctctgcatgtttaaaatcttgtgaatcagcctgagggagggcagaatacttcatcttgattctctttttccttacaccttgtggatcatgtgccagcttcgtctgttctcaatttggaatcatgatctcaactttgactcaaaagtcaagaggttcattctctgcttctaaggaatataggtttctgcaaccgaccaataatttttgcaatcacatttttgttttcaatatcctcctcatggttcttgtattcttctttattcttttcatgataactttgagttatgtccttggtaacagagattcttacctatatatttctgaataaactcttaaccatcctcatctc

SEQ ID NO: 51548 - DNA, 453 bp, Homo sapiens
agtaaagtcaacccttctagatgtgtctggttttgctccatttcaacaggattctgttcttttcaaatcagcacttctcaaactataatcacctagggatcttatttaaaatgctaattctgattctgtaggtctagggtggtgcttgagattctgttttgttttgtttttttagagacagggtctctctgtattgcccatgctggtcttatctcactgcagtctctaactcctgggctcaagcaatcctctcacctcagcttcctgagtagctgggactacaggaatgcgccactgagaccagttttcttttttttgaatttgtttgtagagatggggtttcactttatttcccaggctgagagattctgtagttctaacaggtgatggtgatactgctggtttaaggactacatttaagttaactgttatagattagtgcatttaaaatgc

SEQ ID NO: 51549 - DNA, 523 bp, Homo sapiens
ggagagtggggtgcagtcatttcatgttctaactcaaggcctgaggttggcgtatgcagtggtggggcagtataggcagctcacagtcacacagttaaatgactttccagctgccagctcatgtgatcggtagtataagcaatctgttaataaaaatggaaaattctgaactaattaatttgaaaaggaatgcccataatctcagtcagagaaacatttattttggcacggcacaattctattctcttgtgactatgtcagtatggtaagtgtggcacatttgattccaattaaatcttaaatgactatagagcttaattccagttaaataccctagtgaagctgtagttttgtgagctgtagctatagaaaggggcttctgtgaattattttccttttactttgacatgattaggataattttgcacattagctagaaactgtttgcataaaataaggatataaactccaacctgattttataaataacattcagagcagagtttatgagcatggtgggctg

SEQ ID NO: 51550 - DNA, 630 bp, Homo sapiens
caggctgtgcttctggatttcagctgcagcaggtccgtggctgggtcttagaatttgcatttctaacaaaggctcagttgctactgctgatgctggaccaaggactacactttgagaagtgtaagtctgctctgggcagtcttagaagccaccattgatttctatttgagtttacccaggtgtcattagtacacacagctcctaagacccctgtgatctctggaatatggaattttcagtccccactccccgacctcaccaacatccagagaggggagagaggcttgagacttggctaatcactaacggcggatgattcaatcaatcattctgatgtcattcaacctctttaatgacggagttcaggagagattggtagttggtaaacacatccacatggtggggggtgcacatcccaactccaaggggtcaaacgctcctgtggctcgggacccttcgagatctcaagacctatgtaactctttgtcacttgttaaccttgtagtaaaccctgatcgtcaatcaagtggcttcttgagttttatgagccattttagcagattagcaaacctgaaagggaaagcctgtgggaacccctgactttgtaggcaagctgtgggtacccatgag

SEQ ID NO: 51551 - DNA, 333 bp, Homo sapiens
agcaatactaaacataaatgtaaattgggctaaatgctcccaattaaaagacacagagtggcaagctagataaggaaccaagagccattggtatgctgtcttcaagagactcatctcacatgcaatgacacacatagactcaaaataatgagatggaggaacatttaccaagcaaatagaaaacaacaaaaaatatttctaatagatttctgcttttaataatgaaatatgtcaaactcctataaaaactatatgtaggaaatataaaagtttatatataattcatgtaatggttaatagtaactgaatagctagtattgaataaccaagctt

SEQ ID NO: 51552 - DNA, 268 bp, Homo sapiens
tcctgtacccaggccccaggcaagttgttgacatttgcctgtcttgccttagctatctcagctctcacacaggatacccacatgcaggcttttttgtctctctgaagtattttaaattgcagacattatatcatttcacaataaattttcagcgtgtatctgaaggtaaagttcatctctaacagcaaagttaaaaacaatgtaagtactttactgttatcacaccaacaaaattaatataattccttcatatcaccttatatctagt

SEQ ID NO: 51553 - DNA, 491 bp, Homo sapiens
atagatagttgaaatagacctataggaacacaactactgaaattaaaaggtattcagttgcttgtttctgttcatgagtactagttttattctacagatagtacctacagtttgcagcaaataagccaaaacaacaagaaaatatcttgtttgtatgttttagttttataaattagtcttctctgcatatctaaatatatatttcctaatgaggtttaatattcaaggagataaatatgagaaaatgctttgaaaccaattataggaataatcttacataatctgcaaatgctgatcaaaatacatcatttctacaatgtcaatactgggaaaatatagctttattaggttgaaaataattattttgacttttatgataatggttagatttgattatatgtacatagggataaatacaacattgaaaacactaagccacataaatttaaaacatcgtgtaattcgaacagcttcttactagtggtttattt

SEQ ID NO: 51554 - DNA, 545 bp, Homo sapiens
atagatagttgaaatagacctataggaacacaactactgaaattaaaaggtattcagttgcttgtttctgttcatgagtactagttttattctacagatagtacctacagtttgcagcaaataagccaaaacaacaagaaaatatcttgtttggttatactagaattcaatggctgttaatgctctattacacacttaaattagttttatgttttagttttataaattagtcttctctgcatatctaaatatatatttcctaatgaggtttaatattcaaggagataaatatgagaaaatgctttgaaaccaattataggaataatcttacataatctgcaaatgctgatcaaaatacatcatttctacaatgtcaatactgggaaaatatagctttattaggttgaaaataattattttgacttttatgataatggttagatttgattatatgtacatagggataaatacaacattgaaaacactaagccacataaatttaaaacatcgtgtaattcgaacagcttcttactagtggtttattt

SEQ ID NO: 51555 - DNA, 473 bp, Homo sapiens
tatcaattctgatttttttttaaaaagcaatgcatgagataatagcaattcatattgctactatcaatgtactaacaaaagtggctttgttaggcatttggaaataatttatttactgaagaactattacttttattgttcttaccgactcgaaagagtccataatacctgcttaggtacggaaaattagacctggtgtggtgactcacatctgtagtcccagcacattttggggccaaggtgggaggatcacttgagcccaggagttccagacaagcctgggaaacatacggatactgcatctctacaaaaaatttacaggaaaaaattatctggggtgtggtggtgtataccaccaccactacttgggaggctgaggtgggaggattgcttgagtctgggagatcaaggctgcagtaagctgtgatggcatcactgcactctagcctgggtgagagggagaccctgtctcc

SEQ ID NO: 51556 - DNA, 333 bp, Homo sapiens
ctattcttaaagcctgcaaacatagttgatctcttttaataaatctgaagagttggattatgtaatagtaagacttcctgagaactttgcacttaaatatttatatttgtgtactgagtaatcattaatacatttattagataagtaatggaaaataacttacctgaaaagcactgtgtttttactctgcattttttaatgagcattggagaatgtacaaatactttattgcttttttccatataaaatacatgattatttctgtacatgaatacgtatactattgaactgctgaagtaaattaaataatgagatgaataataaagtcagaag

SEQ ID NO: 51557 - DNA, 255 bp, Homo sapiens
cagaaatggaagacccaaaggacagagctgtagagtcaaggacacatgaattttgttatgaggagagggcagagaaggaggctcaggatgtttaatgaatttagggagcaagggtgatttataaagaaatggattggggagattaatttggaggggaaggaaagagaaacacagacaaactagaaacattaggttgttgtaagatgggagtattgggagattaatatagaggctgcttttgaaaatcatataatt

SEQ ID NO: 51558 - DNA, 588 bp, Homo sapiens
gaaggctcagtataaatagcagccaccgctccctggcaggagggacccgcagctcagctacagcacagatcagcaccatgaagcttctcacgggcctggttttctgctccttggtcctgagtgtcagcagccgaagcttcttttcgttccttggcgaggcttttgatggggctcgggacatgtggagagcctactctgacatgagagaagccaattacatcggctcagacaaatacttccatgctcgggggaactatgatgctgccaaaaggggacctgggggtgcctgggccgcagaagtgatcagcaatgccagagagaatatccagagactcacaggccatggtgcggaggactcgctggccgatcaggctgccaataaatggggcaggagtggcagagaccccaatcacttccgacctgctggcctgcctgagaaatactgagcttcctcttcactctgctctcaggagacctggctatgaggccctcggggcagggatacaaagttagtgaggtctatgtccagagaagctgagatatggcatataataggcatctaataaatgcttaagaggtggaatttgt

SEQ ID NO: 51559 - DNA, 846 bp, Homo sapiens
gaaggctcagtataaatagcagccaccgctccctggcaggagggacccgcagctcagctacagcacagatcagcaccatgaagcttctcacgggcctggttttctgctccttggtcctgagtgtcagcagccgaagcttcttttcgttccttggcgaggcttttgatggggctcgggacatgtggagagcctactctgacatgagagaagccaattacatcggctcagacaaatacttccatgctcgggggaactatgatgctgccaaaaggggacctgggggtgcctgggccgcagaagtgatcagcaatgccagagagaatatccagagactcacaggccatggtgcggaggactcgctggccgatcaggctgccaataaatggggcaggagtggcagagaccccaatcacttccgacctgctggcctgcctgagaaatactgagcttcctcttcactctgctctcaggagacctggctatgaggccctcggggcagggatacaaagcggggagagggtacacaatgggtatctaataaatacttaagaggtggaatttgtggcaaacaacacgacaccgcacagcacccacacacacacaccaaaacggacacaacacaagcgaacacaggcaggacgcgaccgacaagacgagcaaaacaaacagggagaaagcaaaaaagaagcacaaagaacaagacagagggcgggcgagacaccacgcgcacagacagaggcgcacacacacaagccaggggcggggggggcgcgcgccgcacagaaagaagagcagagaaggcgaagcgcgggccggcaagacgcagggacggaggcacaagggggg

SEQ ID NO: 51560 - DNA, 747 bp, Homo sapiens
gaaggctcagtataaatagcagccaccgctccctggcaggagggacccgcagctcagctacagcacagatcaggtgaggagcacaccaaggagtgatttttaaaacttactctgttttctctttcccaacaagattatcatttcctttaaaaaaaatagttatcctggggcatacagccataccattctgaaggtgtcttatctcctctgatctagagagcaccatgaagcttctcacgggcctggttttctgctccttggtcctgagtgtcagcagccgaagcttcttttcgttccttggcgaggcttttgatggggctcgggacatgtggagagcctactctgacatgagagaagccaattacatcggctcagacaaatacttccatgctcgggggaactatgatgctgccaaaaggggacctgggggtgcctgggccgcagaagtgatcagcaatgccagagagaatatccagagactcacaggccatggtgcggaggactcgctggccgatcaggctgccaataaatggggcaggagtggcagagaccccaatcacttccgacctgctggcctgcctgagaaatactgagcttcctcttcactctgctctcaggagacctggctatgaggccctcggggcagggatacaaagttagtgaggtctatgtccagagaagctgagatatggcatataataggcatctaataaattgtaagaggcgaacaaaaacaaacaaaaacac

SEQ ID NO: 51561 - DNA, 985 bp, Homo sapiens
gaaggctcagtataaatagcagccaccgctccctggcaggagggacccgcagctcagctacagcacagatcagcaccatgaagcttctcacgggcctggttttctgctccttggtcctgagtgtcagcagccgaagcttcttttcgttccttggcgaggcttttgatggggctcgggacatgtggagagcctactctgacatgagagaagccaattacatcggctcagacaaatacttccatgctcgggggaactatgatgctgccaaaaggggacctgggggtgcctgggccgcagaagtgatcaggctgaagtgccatggcatgatcatggctcactgcaacctcgacctcccggggctcaagagatcctcccacttcagcctcttgaataactgggactgcagatgtgcgccatgacacttgcctaatttttatattttttgtagagatggggtttcgccgtgtcacccaggctggtcttgaactcctgggctcaagtgatctgcctgcctcagcctcccaaagtgctgggattacaggcatgagtcactgagcccagcctactgttatatttattttgtgtcggtttgaggctgcccagattcacattgtttctggggtcgtctgtgagggtgtttccagaggagattaacatttgaattggacttaataaagtagattgctattctcaatgcaactgggcatcacccaatctgttgaaggcttgaatagaacaaaaatagaggaaggacagatttgcctcccttttcccctgcctcactgcttgagttggacatctcctctcatcttctcttgccctcaaattggatttacatgatcagttgctctggttctcaggcctttgaactcagactgaattacactttcctgagtttctagcttgcagagggcagatcgtgggacttctcagccccaattatcttgtgagccaattccttacaataaataaatacatacataca

SEQ ID NO: 51562 - DNA, 789 bp, Homo sapiens
gaaggctcagtataaatagcagccaccgctccctggcaggagggacccgcagctcagctacagcacagatcagcaccatgaagcttctcacgggcctggttttctgctccttggtcctgagtgtcagcagccgaagcttcttttcgttccttggcgaggcttttgatggggctcgggacatgtggagagcctactctgacatgagagaagccaattacatcggctcagacaaatacttccatgctcgggggaactatgatgctgccaaaaggggacctgggggtgcctgggccgcagaagtgatcagtttattttcagctgaactgtagagagtgaaggaagaagccttttttcttcactcctacatgacccaggcattgatccaggcaatgaagattcagtgtaaataaccaccactaacaagaccatggcctttggaacctgtgctaagaggcatggatgagctccctcagcatgtggatggagactgaagagaggtctgaaggctcagtgtggtgtctccattctctaagaagtttggaggagaagctggatacagcaaaacagactgagaaggagcagctgttgggaaaggaggaaaactaggaaagcatggtgttccagaatccctgatggagatattgattagtagtatcagattctgcttagcagttgaggagttcacctttggcttaagcaacatggagtcattgactatctcgtgaaggtggttgcaggagaaggtctggagaactaaatggagcagtgataagagagaatgggagatgg

SEQ ID NO: 51563 - DNA, 792 bp, Homo sapiens
gaaggctcagtataaatagcagccaccgctccctggcaggagggacccgcagctcagctacagcacagatcagcaccatgaagcttctcacgggcctggttttctgctccttggtcctgagtgtcagcagccgaagcttcttttcgttccttggcgaggcttttgatggggctcgggacatgtggagagcctactctgacatgagagaagccaattacatcggctcagacaaatacttccatgctcgggggaactatgatgctgccaaaaggggacctgggggtgcctgggccgcagaagtgatcagcacaatgaggcttttcacaggcattgttttctgctccttggtcatgggagtcaccagtgaaagctggcgttcgtttttcaaggaggctctccaaggggttggggacatgggcagagcctattgggacataatgatatccaatcaccaaaattcaaacagatatctctatgctcggggaaactatgatgctgcccaaagaggacctgggggtgtctgggctgctaaactcatcagccgttccagggtctatcttcagggattaatagactactatttatttggaaacagcagcactgtatcggaggactcgaagtccaacgagaaagctgaggaatggggccggagtggcaaagaacccggacgcttcagaactgaccggctgcctaagaaatacttgagcttcctggttcctctggtctcagggaacttgggcttgtgagccacacacttttcccccccagaacagggaccacagggtcacttgc

SEQ ID NO: 51564 - DNA, 539 bp, Homo sapiens
gaaggctcagtataaatagcagccaccgctccctggcaggagggacccgcagctcagctacagcacagatcaggtgaggagcacaccaaggagtgatttttaaaacttactctgttttctctttcccaacaagattatcatttcctttaaaaaaaatagttatcctggggcatacagccataccattctgaaggtgtcttatctcctctgatctagagagcaccatgaagcttctcacgggcctggttttctgctccttggtcctgagtgtcagcagccgaagcttcttttcgttccttggcgaggcttttgatggggctcgggacatgtggagagcctactctgacatgagagaagccaattacatcggctcagacaaatacttccatgctcgggggaactatgatgctgccaaaaggggacctgggggtgcctgggccgcagaagtgatcagagaagatgactgaggaatacaaccacaactggatggactttttcaaaagatgacacctgcttatttgcctcattcaaatttcaag

SEQ ID NO: 51565 - DNA, 442 bp, Homo sapiens
tcattcccctctaaggtggtgttggagtctttatgttctcctgatgtcccttctgcctttcctttcctttccaggggctcgggacatgtggagagcctactctgacatgagagaagccaattacatcggctcagacaaatacttccatgctcgggggaactatgatgctgccaaaaggggacctgggggtgcctgggccgcagaagtgatcaggtaactggagctcctgggacgttagggctgggtgagcagagcttgcctgccttggacagtcaggagggagacgagctccttgtagagaagttagaggctgcggcccctcctcttcttgccctctctctgcctctgtgctcagtgtgagggtctgagtggatggtaggagtgagtgattcctccccctccccctctgggtgctgttcatccagcctaggggtgcccagcc

SEQ ID NO: 51566 - DNA, 3652 bp, Homo sapiens
  misc_feature (344)..(344): n is a, c, g, or t
  misc_feature (1124)..(1124): n is a, c, g, or t
gcgatcgtggccgctgccgccgccagagccggccggagtcggcccggagccgcgtccacgcggagcgggcgggtgggagctggcggctgggcccctgcggcgcccccgcggcctgccccgcgtccgctccgggccgccgagccgcagccgccgagatgggggccgccccgggccgcgcccccgccgggtcccgcccgccgcgctgccgctgagcgcatgggccgggccgcgccgcgccgctccgggagccgggcccggggtcccgccaccaccgcgcgcgggacagattgattcactttggagctgtaagtactgatgtattagggtgcagcgctcattgttcnttgacgcagagtcccaaaatgaatatccaagagcagggtttccccttggacctcggagcaagtttcaccgaagatgctccccgacccccagtgcctggtgaggagggagaactggtgtccacagacccgaggcccgccagctacagtttctgctccgggaaaggtgttggcattaaaggtgagacttcgacggccactccgaggcgctcggatctggacctggggtatgagcctgagggcagtgcctcccccaccccaccatacttgaagtgggctgagtcactgcattccctgctggatgaccaagatgggataagcctgttcaggactttcctgaagcaggagggctgtgccgacttgctggacttctggtttgcctgcactggcttcaggaagctggagccctgtgactcgaacgaggagaagaggctgaagctggcgagagccatctaccgaaagtacattcttgataacaatggcatcgtgtcccggcagaccaagccagccaccaagagcttcataaagggctgcatcatgaagcagctgatcgatcctgccatgtttgaccaggcccagaccgaaatccaggccactatggaggaaaacacctatccctccttccttaagtctgatatttatttggaatatacgaggacaggctcggagagccccaaagtctgtagtgaccagagctctgggtcagggacagggaagggcatatctggatacctgccgaccttaaatgaagatgaggaatggaagtgtgaccaggacatggangaggacgatggcagagacgctgctccccccggaagactccctcagaagctgctcctggagacagctgccccgagggtctcctccagtagacggtacagcgaaggcagagagttcaggtatggatcctggcgggagccagtcaacccctattatgtcaatgccggctatgccctggccccagccaccagtgccaacgacagcgagcagcagagcctgtccagcgatgcagacaccctgtccctcacggacagcagcgtggatgggatccccccatacaggatccgtaagcagcaccgcagggagatgcaggagagcgtgcaggtcaatgggcgggtgcccctacctcacattccccgcacgtaccgggtgccgaaggaggtccgcgtggagcctcagaagttcgcggaggagctcatccaccgcctggaggctgtgcagcgcacgcgggaggccgaggagaagctggaggagcggctgaagcgcgtgcgcatggaggaggaaggtgaggacggcgatccatcatcagggcccccagggccgtgtcacaagctgcctcccgcccccgcttggcaccacttcccgccccgctgtgtggacatgggctgtgccgggctccgggatgcacacgaggagaaccctgagagcatcctggacgagcacgtacagcgtgtgctgaggacacctggccgccagtcgcctgggcctggccatcgctccccggacagtgggcacgtggccaagatgccagtggcactggggggtgccgcctcggggcacgggaagcacgtacccaagtcaggggcgaagctggacgcggccggcctgcaccaccaccgacacgtccaccaccacgtccaccacagcacagcccggcccaaggagcaggtggaggccgaggccacccgcagggcccagagcagcttcgcctggggcctggaaccacacagccatggggcaaggtcccgaggctactcagagagtgttggcgctgcccccaacgccagtgatggcctcgcccacagtgggaaggtgggcgtggcgtgcaaaagaaatgccaagaaggctgagtcggggaagagcgccagcaccgaggtgccaggtgcctcggaggatgcggagaagaaccagaaaatcatgcagtggatcattgagggggaaaaggagatcagcaggcaccgcaggaccggccacgggtcttcggggacgaggaagccacagccccatgagaactccagacccttgtcccttgagcacccctgggccggccctcagctccggacctccgtgcagccctcccacctcttcatccaagaccccaccatgccaccccacccagctcccaaccccctaacccagctggaggaggcgcgccgacgtctggaggaggaagaaaagagagccagccgagcaccctccaagcagaggtatgtgcaggaggttatgcggcggggacgcgcctgcgtcaggccagcgtgcgcgccggtgctgcacgtggtaccagccgtgtcggacatggagctctccgagacagagacaagatcgcagaggaaggtgggcggcgggagtgcccagccgtgtgacagcatcgttgtggcgtactacttctgcggggaacccatcccctaccgcaccctggtgaggggccgcgctgtcaccctgggccagttcaaggagctgctgaccaaaaagggcagctacagatactacttcaagaaagtgagcgacgagtttgactgtggggtggtgtttgaggaggttcgagaggacgaggccgtcctgcccgtctttgaggagaagatcatcggcaaagtggagaaggtggactgataggctggtgggctggccgctgtgccaggcgaggcccttggcgggcacgggtgtcacggccaggcagatgacctcgtactcaggagcccgatggggaacagtgttgggtgtaccacccatccctgtggtctacccgtgtctagaggcaggtagggggtccctccaagtggtccacaagcttctgtcctgcccccaaggaggcagcctggaccactcctcatagcaatacttggagggcccagcccaagtgaggcagccgaggtccctgctgccagcttcaggtgacccccccccatcccccggcacctcccttgggcacgtgtgctgggatctactttccctctgggatttgcccacgtacccaggtctggctggggcccaggcccggatgcagaggcctgcagggcctctgtcaattgtacgcgccaccgagtgccttcaacacagcttgtctcttgcctgccactgtgtgaatcggcgacggagcactgcacctgcctccagccgccggctgtgcagtcctgggtcctcctttctgagggcccgtgtaaatatgtacatttctcaggctaggccagcaggggctgcccgagtctgtttttcatgcgatgacacttgtacaattaattatcttttcaaaggtacttggataataatgaaataaaactgtttttgaacctgaaaaaaaaaaaacaaaaaag

SEQ ID NO: 51567 - DNA, 692 bp, Homo sapiens
ataaggaattttgggccctcaagcgccaagatttgggcacaaggtgaaatcttagaaaatgtatacacttctgagcgtttccattcacctgatccttgatgtaaaatgcagaccttcagctctcctcagaccacaggagacccctcggtacactcactctttcacccgctacccgggtgagctgtgccctgaagcctggagatgccaccgtgagggtggacgcagggtgccgctggtggtgcccatctgggaaaccgtgcgccgggcactccattgagatggcaggcagaccttacatagctcgttgagcagctgggattcatggcggggaccaggtgtggtcgctgcagatggtggagctccccatgaaggggtttgtgtggaaatgtctcacacacagacgtcgatttgttttatcctcagtaaattgtacgcgccaccgagtgccttcaacacagcttgtctcttgcctgccactgtgtgaatcggcgacggagcactgcacctgcctccagccgccggctgtgcagtcctgggtcctcctttctgagggcccgtgtaaatatgtacatttctcaggctaggccagcaggggctgcccgagtctgtttttcatgcgatgacacttgtacaattaattatcttttcaaaggtacttggataataatgaaataaaactgtttttgaacctg

SEQ ID NO: 51568 - DNA, 3602 bp, Homo sapiens
  misc_feature (344)..(344): n is a, c, g, or t
  misc_feature (1124)..(1124): n is a, c, g, or t
gcgatcgtggccgctgccgccgccagagccggccggagtcggcccggagccgcgtccacgcggagcgggcgggtgggagctggcggctgggcccctgcggcgcccccgcggcctgccccgcgtccgctccgggccgccgagccgcagccgccgagatgggggccgccccgggccgcgcccccgccgggtcccgcccgccgcgctgccgctgagcgcatgggccgggccgcgccgcgccgctccgggagccgggcccggggtcccgccaccaccgcgcgcgggacagattgattcactttggagctgtaagtactgatgtattagggtgcagcgctcattgttcnttgacgcagagtcccaaaatgaatatccaagagcagggtttccccttggacctcggagcaagtttcaccgaagatgctccccgacccccagtgcctggtgaggagggagaactggtgtccacagacccgaggcccgccagctacagtttctgctccgggaaaggtgttggcattaaaggtgagacttcgacggccactccgaggcgctcggatctggacctggggtatgagcctgagggcagtgcctcccccaccccaccatacttgaagtgggctgagtcactgcattccctgctggatgaccaagatgggataagcctgttcaggactttcctgaagcaggagggctgtgccgacttgctggacttctggtttgcctgcactggcttcaggaagctggagccctgtgactcgaacgaggagaagaggctgaagctggcgagagccatctaccgaaagtacattcttgataacaatggcatcgtgtcccggcagaccaagccagccaccaagagcttcataaagggctgcatcatgaagcagctgatcgatcctgccatgtttgaccaggcccagaccgaaatccaggccactatggaggaaaacacctatccctccttccttaagtctgatatttatttggaatatacgaggacaggctcggagagccccaaagtctgtagtgaccagagctctgggtcagggacagggaagggcatatctggatacctgccgaccttaaatgaagatgaggaatggaagtgtgaccaggacatggangaggacgatggcagagacgctgctccccccggaagactccctcagaagctgctcctggagacagctgccccgagggtctcctccagtagacggtacagcgaaggcagagagttcaggtatggatcctggcgggagccagtcaacccctattatgtcaatgccggctatgccctggccccagccaccagtgccaacgacagcgagcagcagagcctgtccagcgatgcagacaccctgtccctcacggacagcagcgtggatgggatccccccatacaggatccgtaagcagcaccgcagggagatgcaggagagcgtgcaggtcaatgggcgggtgcccctacctcacattccccgcacgtaccgggtgccgaaggaggtccgcgtggagcctcagaagttcgcggaggagctcatccaccgcctggaggctgtgcagcgcacgcgggaggccgaggagaagctggaggagcggctgaagcgcgtgcgcatggaggaggaaggtgaggacggcgatccatcatcagggcccccagggccgtgtcacaagctgcctcccgcccccgcttggcaccacttcccgccccgctgtgtggacatgggctgtgccgggctccgggatgcacacgaggagaaccctgagagcatcctggacgagcacgtacagcgtgtgctgaggacacctggccgccagtcgcctgggcctggccatcgctccccggacagtgggcacgtggccaagatgccagtggcactggggggtgccgcctcggggcacgggaagcacgtacccaagtcaggggcgaagctggacgcggccggcctgcaccaccaccgacacgtccaccaccacgtccaccacagcacagcccggcccaaggagcaggtggaggccgaggccacccgcagggcccagagcagcttcgcctggggcctggaaccacacagccatggggcaaggtcccgaggctactcagagagtgttggcgctgcccccaacgccagtgatggcctcgcccacagtgggaaggtgggcgtggcgtgcaaaagaaatgccaagaaggctgagtcggggaagagcgccagcaccgaggtgccaggtgcctcggaggatgcggagaagaaccagaaaatcatgcagtggatcattgagggggaaaaggagatcagcaggcaccgcaggaccggccacgggtcttcggggacgaggaagccacagccccatgagaactccagacccttgtcccttgagcacccctgggccggccctcagctccggacctccgtgcagccctcccacctcttcatccaagaccccaccatgccaccccacccagctcccaaccccctaacccagctggaggaggcgcgccgacgtctggaggaggaagaaaagagagccagccgagcaccctccaagcagaggacaagatcgcagaggaaggtgggcggcgggagtgcccagccgtgtgacagcatcgttgtggcgtactacttctgcggggaacccatcccctaccgcaccctggtgaggggccgcgctgtcaccctgggccagttcaaggagctgctgaccaaaaagggcagctacaggcctccttcccatctgcggtgctgcctgctcactgccctcctcacctccgtcctgcagatactacttcaagaaagtgagcgacgagtttgactgtggggtggtgtttgaggaggttcgagaggacgaggccgtcctgcccgtctttgaggagaagatcatcggcaaagtggagaaggtggactgataggctggtgggctggccgctgtgccaggcgaggcccttggcgggcacgggtgtcacggccaggcagatgacctcgtactcaggagcccgatggggaacagtgttgggtgtaccacccatccctgtggtctacccgtgtctagaggcaggtagggggtccctccaagtggtccacaagcttctgtcctgcccccaaggaggcagcctggaccactcctcatagcaatacttggagggcccagcccaagtgaggcagccgaggtccctgctgccagcttcaggtgacccccccccatcccccggcacctcccttgggcacgtgtgctgggatctactttccctctgggatttgcccacgtacccaggtctggctggggcccaggcccggatgcagaggcctgcagggcctctgtcaattgtacgcgccaccgagtgccttcaacacagcttgtctcttgcctgccactgtgtgaatcggcgacggagcactgcacctgcctccagccgccggctgtgcagtcctgggtcctcctttctgagggcccgtgtaaatatgtacatttctcaggctaggccagcaggggctgcccgagtctgtttttcatgcgatgacacttgtacaattaattatcttttcaaaggtacttggataataatgaaataaaactgtttttgaacctgaaaaaaaaaaaacaaaaaag

SEQ ID NO: 51569 - DNA, 2877 bp, Homo sapiens
  misc_feature (344)..(344): n is a, c, g, or t
  misc_feature (1124)..(1124): n is a, c, g, or t
gcgatcgtggccgctgccgccgccagagccggccggagtcggcccggagccgcgtccacgcggagcgggcgggtgggagctggcggctgggcccctgcggcgcccccgcggcctgccccgcgtccgctccgggccgccgagccgcagccgccgagatgggggccgccccgggccgcgcccccgccgggtcccgcccgccgcgctgccgctgagcgcatgggccgggccgcgccgcgccgctccgggagccgggcccggggtcccgccaccaccgcgcgcgggacagattgattcactttggagctgtaagtactgatgtattagggtgcagcgctcattgttcnttgacgcagagtcccaaaatgaatatccaagagcagggtttccccttggacctcggagcaagtttcaccgaagatgctccccgacccccagtgcctggtgaggagggagaactggtgtccacagacccgaggcccgccagctacagtttctgctccgggaaaggtgttggcattaaaggtgagacttcgacggccactccgaggcgctcggatctggacctggggtatgagcctgagggcagtgcctcccccaccccaccatacttgaagtgggctgagtcactgcattccctgctggatgaccaagatgggataagcctgttcaggactttcctgaagcaggagggctgtgccgacttgctggacttctggtttgcctgcactggcttcaggaagctggagccctgtgactcgaacgaggagaagaggctgaagctggcgagagccatctaccgaaagtacattcttgataacaatggcatcgtgtcccggcagaccaagccagccaccaagagcttcataaagggctgcatcatgaagcagctgatcgatcctgccatgtttgaccaggcccagaccgaaatccaggccactatggaggaaaacacctatccctccttccttaagtctgatatttatttggaatatacgaggacaggctcggagagccccaaagtctgtagtgaccagagctctgggtcagggacagggaagggcatatctggatacctgccgaccttaaatgaagatgaggaatggaagtgtgaccaggacatggangaggacgatggcagagacgctgctccccccggaagactccctcagaagctgctcctggagacagctgccccgagggtctcctccagtagacggtacagcgaaggcagagagttcaggtatggatcctggcgggagccagtcaacccctattatgtcaatgccggctatgccctggccccagccaccagtgccaacgacagcgagcagcagagcctgtccagcgatgcagacaccctgtccctcacggacagcagcgtggatgggatccccccatacaggatccgtaagcagcaccgcagggagatgcaggagagcgtgcaggtcaatgggcgggtgcccctacctcacattccccgcacgtaccgggtgccgaaggaggtccgcgtggagcctcagaagttcgcggaggagctcatccaccgcctggaggctgtgcagcgcacgcgggaggccgaggagaagctggaggagcggctgaagcgcgtgcgcatggaggaggaaggtgaggacggcgatccatcatcagggcccccagggccgtgtcacaagctgcctcccgcccccgcttggcaccacttcccgccccgctgtgtggacatgggctgtgccgggctccgggatgcacacgaggagaaccctgagagcatcctggacgagcacgtacagcgtgtgctgaggacacctggccgccagtcgcctgggcctggccatcgctccccggacagtgggcacgtggccaagatgccagtggcactggggggtgccgcctcggggcacgggaagcacgtacccaagtcaggggcgaagctggacgcggccggcctgcaccaccaccgacacgtccaccaccacgtccaccacagcacagcccggcccaaggagcaggtggaggccgaggccacccgcagggcccagagcagcttcgcctggggcctggaaccacacagccatggggcaaggtcccgaggctactcagagagtgttggcgctgcccccaacgccagtgatggcctcgcccacagtgggaaggtgggcgtggcgtgcaaaagaaatgccaagaaggctgagtcggggaagagcgccagcaccgaggtgccaggtgcctcggaggatgcggagaagaaccagaaaatcatgcagtggatcattgagggggaaaaggagatcagcaggcaccgcaggaccggccacgggtcttcggggacgaggaagccacagccccatgagaactccagacccttgtcccttgagcacccctgggccggccctcagctccggacctccgtgcagccctcccacctcttcatccaagaccccaccatgccaccccacccagctcccaaccccctaacccagctggaggaggcgcgccgacgtctggaggaggaagaaaagagagccagccgagcaccctccaagcagaggacaagatcgcagaggaaggtgggcggcgggagtgcccagccgtgtgacagcatcgttgtggcgtactacttctgcggggaacccatcccctaccgcaccctggtgaggggccgcgctgtcaccctgggccagttcaaggagctgcctccagccgccggctgtgcagtcctgggtcctcctttctgagggcccgtgtaaatatgtacatttctcaggctaggccagcaggggctgcccgagtctgtttttcatgcgatgacacttgtacaattaattatcttttcaaaggtacttggataataatgaaataaaactgtttttgaacctg

SEQ ID NO: 51570 - DNA, 2521 bp, Homo sapiens
  misc_feature (344)..(344): n is a, c, g, or t
  misc_feature (1124)..(1124): n is a, c, g, or t
gcgatcgtggccgctgccgccgccagagccggccggagtcggcccggagccgcgtccacgcggagcgggcgggtgggagctggcggctgggcccctgcggcgcccccgcggcctgccccgcgtccgctccgggccgccgagccgcagccgccgagatgggggccgccccgggccgcgcccccgccgggtcccgcccgccgcgctgccgctgagcgcatgggccgggccgcgccgcgccgctccgggagccgggcccggggtcccgccaccaccgcgcgcgggacagattgattcactttggagctgtaagtactgatgtattagggtgcagcgctcattgttcnttgacgcagagtcccaaaatgaatatccaagagcagggtttccccttggacctcggagcaagtttcaccgaagatgctccccgacccccagtgcctggtgaggagggagaactggtgtccacagacccgaggcccgccagctacagtttctgctccgggaaaggtgttggcattaaaggtgagacttcgacggccactccgaggcgctcggatctggacctggggtatgagcctgagggcagtgcctcccccaccccaccatacttgaagtgggctgagtcactgcattccctgctggatgaccaagatgggataagcctgttcaggactttcctgaagcaggagggctgtgccgacttgctggacttctggtttgcctgcactggcttcaggaagctggagccctgtgactcgaacgaggagaagaggctgaagctggcgagagccatctaccgaaagtacattcttgataacaatggcatcgtgtcccggcagaccaagccagccaccaagagcttcataaagggctgcatcatgaagcagctgatcgatcctgccatgtttgaccaggcccagaccgaaatccaggccactatggaggaaaacacctatccctccttccttaagtctgatatttatttggaatatacgaggacaggctcggagagccccaaagtctgtagtgaccagagctctgggtcagggacagggaagggcatatctggatacctgccgaccttaaatgaagatgaggaatggaagtgtgaccaggacatggangaggacgatggcagagacgctgctccccccggaagactccctcagaagctgctcctggagacagctgccccgagggtctcctccagtagacggtacagcgaaggcagagagttcaggtatggatcctggcgggagccagtcaacccctattatgtcaatgccggctatgccctggccccagccaccagtgccaacgacagcgagcagcagagcctgtccagcgatgcagacaccctgtccctcacggacagcagcgtggatgggatccccccatacaggatccgtaagcagcaccgcagggagatgcaggagagcgtgcaggtcaatgggcgggtgcccctacctcacattccccgcacgtaccgggtgccgaaggaggtccgcgtggagcctcagaagttcgcggaggagctcatccaccgcctggaggctgtgcagcgcacgcgggaggccgaggagaagctggaggagcggctgaagcgcgtgcgcatggaggaggaaggtgaggacggcgatccatcatcagggcccccagggccgtgtcacaagctgcctcccgcccccgcttggcaccacttcccgccccgctgtgtggacatgggctgtgccgggctccgggatgcacacgaggagaaccctgagagcatcctggacgagcacgtacagcgtgtgctgaggacacctggccgccagtcgcctgggcctggccatcgctccccggacagtgggcacgtggccaagatgccagtggcactggggggtgccgcctcggggcacgggaagcacgtacccaagtcaggggcgaagctggacgcggccggcctgcaccaccaccgacacgtccaccaccacgtccaccacagcacagcccggcccaaggagcaggtggaggccgaggccacccgcagggcccagagcagcttcgcctggggcctggaaccacacagccatggggcaaggtcccgaggctactcagagagtgttggcgctgcccccaacgccagtgatggcctcgcccacagtgggaaggtgggcgtggcgtgcaaaagaaatgccaagaaggctgagtcggggaagagcgccagcaccgaggtgccaggtgcctcggaggatgcggagaagaaccagaaaatcatgcagtggatcattgagggggaaaaggagatcagcaggcaccgcaggaccggccacgggtcttcggggacgaggaagccacagccccatgagaactccagacccttgtcccttgagcacccctgggccggccctcagctccggacctccgtgcagccctcccacctcttcatccaagaccccaccatgccaccccacccagctcccaaccccctaacccagctgatgatagctgcggggatccttagagtgactgtaaatgc

SEQ ID NO: 51571 - DNA, 352 bp, Homo sapiens
aagatcacgccattgcactccagcctgggtgacagagcaagagtttgtctcaaaaaaataaaataaaatacaacagagatagcacacgctctttcccttcacaaagaaatgtttagcctgtgacctttcaacccccgtgcctcacagtcctgtccctcgcagcgcacgtaccgggtgccgaaggaggtccgcgtggagcctcagaagttcgcggaggagctcatccaccgcctggaggctgtgcagcgcacgcgggaggccgaggagaagctggaggagcggctgaagcgcgtgcgcatggtgagtgggccgcgtcggtgtcgcgctccgcgtcggtgtcgtgctgttttct

SEQ ID NO: 51572 - DNA, 3524 bp, Homo sapiens
  misc_feature (344)..(344): n is a, c, g, or t
  misc_feature (1124)..(1124): n is a, c, g, or t
gcgatcgtggccgctgccgccgccagagccggccggagtcggcccggagccgcgtccacgcggagcgggcgggtgggagctggcggctgggcccctgcggcgcccccgcggcctgccccgcgtccgctccgggccgccgagccgcagccgccgagatgggggccgccccgggccgcgcccccgccgggtcccgcccgccgcgctgccgctgagcgcatgggccgggccgcgccgcgccgctccgggagccgggcccggggtcccgccaccaccgcgcgcgggacagattgattcactttggagctgtaagtactgatgtattagggtgcagcgctcattgttcnttgacgcagagtcccaaaatgaatatccaagagcagggtttccccttggacctcggagcaagtttcaccgaagatgctccccgacccccagtgcctggtgaggagggagaactggtgtccacagacccgaggcccgccagctacagtttctgctccgggaaaggtgttggcattaaaggtgagacttcgacggccactccgaggcgctcggatctggacctggggtatgagcctgagggcagtgcctcccccaccccaccatacttgaagtgggctgagtcactgcattccctgctggatgaccaagatgggataagcctgttcaggactttcctgaagcaggagggctgtgccgacttgctggacttctggtttgcctgcactggcttcaggaagctggagccctgtgactcgaacgaggagaagaggctgaagctggcgagagccatctaccgaaagtacattcttgataacaatggcatcgtgtcccggcagaccaagccagccaccaagagcttcataaagggctgcatcatgaagcagctgatcgatcctgccatgtttgaccaggcccagaccgaaatccaggccactatggaggaaaacacctatccctccttccttaagtctgatatttatttggaatatacgaggacaggctcggagagccccaaagtctgtagtgaccagagctctgggtcagggacagggaagggcatatctggatacctgccgaccttaaatgaagatgaggaatggaagtgtgaccaggacatggangaggacgatggcagagacgctgctccccccggaagactccctcagaagctgctcctggagacagctgccccgagggtctcctccagtagacggtacagcgaaggcagagagttcaggtatggatcctggcgggagccagtcaacccctattatgtcaatgccggctatgccctggccccagccaccagtgccaacgacagcgagcagcagagcctgtccagcgatgcagacaccctgtccctcacggacagcagcgtggatgggatccccccatacaggatccgtaagcagcaccgcagggagatgcaggagagcgtgcaggtcaatgggcgggtgcccctacctcacattccccgcacgtaccgggtgccgaaggaggtccgcgtggagcctcagaagttcgcggaggagctcatccaccgcctggaggctgtgcagcgcacgcgggaggccgaggagaagctggaggagcggctgaagcgcgtgcgcatggaggaggaaggtgaggacggcgatccatcatcagggcccccagggccgtgtcacaagctgcctcccgcccccgcttggcaccacttcccgccccgctgtgtggacatgggctgtgccgggctccgggatgcacacgaggagaaccctgagagcatcctggacgagcacgtacagcgtgtgctgaggacacctggccgccagtcgcctgggcctggccatcgctccccggacagtgggcacgtggccaagatgccagtggcactggggggtgccgcctcggggcacgggaagcacgtacccaagtcaggggcgaagctggacgcggccggcctgcaccaccaccgacacgtccaccaccacgtccaccacagcacagcccggcccaaggagcaggtggaggccgaggccacccgcagggcccagagcagcttcgcctggggcctggaaccacacagccatggggcaaggtcccgaggctactcagagagtgttggcgctgcccccaacgccagtgatggcctcgcccacagtgggaaggtgggcgtggcgtgcaaaagaaatgccaagaaggctgagtcggggaagagcgccagcaccgaggtgccaggtgcctcggaggatgcggagaagaaccagaaaatcatgcagtggatcattgagggggaaaaggagatcagcaggcaccgcaggaccggccacgggtcttcggggacgaggaagccacagccccatgagaactccagacccttgtcccttgagcacccctgggccggccctcagctccggacctccgtgcagccctcccacctcttcatccaagaccccaccatgccaccccacccagctcccaaccccctaacccagctggaggaggcgcgccgacgtctggaggaggaagaaaagagagccagccgagcaccctccaagcagaggacaagatcgcagaggaaggtgggcggcgggagtgcccagccgtgtgacagcatcgttgtggcgtactacttctgcggggaacccatcccctaccgcaccctggtgaggggccgcgctgtcaccctgggccagttcaaggagctgctgaccaaaaagggcagctacagatactacttcaagaaagtgagcgacgagtttgactgtggggtggtgtttgaggaggttcgagaggacgaggccgtcctgcccgtctttgaggagaagatcatcggcaaagtggagaaggtggactgataggctggtgggctggccgctgtgccaggcgaggcccttggcgggcacgggtgtcacggccaggcagatgacctcgtactcaggagcccgatggggaacagtgttgggtgtaccacccatccctgtggtctacccgtgtctagaggcaggtagggggtccctccaagtggtccacaagcttctgtcctgcccccaaggaggcagcctggaccactcctcatagcaatacttggagggcccagcccaagtgaggcagccgaggtccctgctgccagcttcaggtgacccccccccatcccccggcacctcccttgggcacgtgtgctgggatctactttccctctgggatttgcccacgtacccaggtctggctggggcccaggcccggatgcagaggcctgcagggcctctgtcaattgtacgcgccaccgagtgccttcaacacagcttgtctcttgcctgccactgtgtgaatcggcgacggagcactgcacctgcctccagccgccggctgtgcagtcctgggtcctcctttctgagggcccgtgtaaatatgtacatttctcaggctaggccagcaggggctgcccgagtctgtttttcatgcgatgacacttgtacaattaattatcttttcaaaggtacttggataataatgaaataaaactgtttttgaacctg

SEQ ID NO: 51573 - DNA, 2608 bp, Homo sapiens
  misc_feature (208)..(208): n is a, c, g, or t
cttgcatgtaccgggaccggggaatgtgaggtaggggcacccgcccattgacctgcacgctctcctgcatctccctgcggtgctgcttacggatcctgtatggggggatcccatccagagctctgggtcagggacagggaagggcatatctggatacctgccgaccttaaatgaagatgaggaatggaagtgtgaccaggacatggangaggacgatggcagagacgctgctccccccggaagactccctcagaagctgctcctggagacagctgccccgagggtctcctccagtagacggtacagcgaaggcagagagttcaggtatggatcctggcgggagccagtcaacccctattatgtcaatgccggctatgccctggccccagccaccagtgccaacgacagcgagcagcagagcctgtccagcgatgcagacaccctgtccctcacggacagcagcgtggatgggatccccccatacaggatccgtaagcagcaccgcagggagatgcaggagagcgtgcaggtcaatgggcgggtgcccctacctcacattccccgcacgtaccgggtgccgaaggaggtccgcgtggagcctcagaagttcgcggaggagctcatccaccgcctggaggctgtgcagcgcacgcgggaggccgaggagaagctggaggagcggctgaagcgcgtgcgcatggaggaggaaggtgaggacggcgatccatcatcagggcccccagggccgtgtcacaagctgcctcccgcccccgcttggcaccacttcccgccccgctgtgtggacatgggctgtgccgggctccgggatgcacacgaggagaaccctgagagcatcctggacgagcacgtacagcgtgtgctgaggacacctggccgccagtcgcctgggcctggccatcgctccccggacagtgggcacgtggccaagatgccagtggcactggggggtgccgcctcggggcacgggaagcacgtacccaagtcaggggcgaagctggacgcggccggcctgcaccaccaccgacacgtccaccaccacgtccaccacagcacagcccggcccaaggagcaggtggaggccgaggccacccgcagggcccagagcagcttcgcctggggcctggaaccacacagccatggggcaaggtcccgaggctactcagagagtgttggcgctgcccccaacgccagtgatggcctcgcccacagtgggaaggtgggcgtggcgtgcaaaagaaatgccaagaaggctgagtcggggaagagcgccagcaccgaggtgccaggtgcctcggaggatgcggagaagaaccagaaaatcatgcagtggatcattgagggggaaaaggagatcagcaggcaccgcaggaccggccacgggtcttcggggacgaggaagccacagccccatgagaactccagacccttgtcccttgagcacccctgggccggccctcagctccggacctccgtgcagccctcccacctcttcatccaagaccccaccatgccaccccacccagctcccaaccccctaacccagctggaggaggcgcgccgacgtctggaggaggaagaaaagagagccagccgagcaccctccaagcagaggacaagatcgcagaggaaggtgggcggcgggagtgcccagccgtgtgacagcatcgttgtggcgtactacttctgcggggaacccatcccctaccgcaccctggtgaggggccgcgctgtcaccctgggccagttcaaggagctgctgaccaaaaagggcagctacagatactacttcaagaaagtgagcgacgagtttgactgtggggtggtgtttgaggaggttcgagaggacgaggccgtcctgcccgtctttgaggagaagatcatcggcaaagtggagaaggtggactgataggctggtgggctggccgctgtgccaggcgaggcccttggcgggcacgggtgtcacggccaggcagatgacctcgtactcaggagcccgatggggaacagtgttgggtgtaccacccatccctgtggtctacccgtgtctagaggcaggtagggggtccctccaagtggtccacaagcttctgtcctgcccccaaggaggcagcctggaccactcctcatagcaatacttggagggcccagcccaagtgaggcagccgaggtccctgctgccagcttcaggtgacccccccccatcccccggcacctcccttgggcacgtgtgctgggatctactttccctctgggatttgcccacgtacccaggtctggctggggcccaggcccggatgcagaggcctgcagggcctctgtcaattgtacgcgccaccgagtgccttcaacacagcttgtctcttgcctgccactgtgtgaatcggcgacggagcactgcacctgcctccagccgccggctgtgcagtcctgggtcctcctttctgagggcccgtgtaaatatgtacatttctcaggctaggccagcaggggctgcccgagtctgtttttcatgcgatgacacttgtacaattaattatcttttcaaaggtacttggataataatgaaataaaactgtttttgaacctg

SEQ ID NO: 51574 - DNA, 1652 bp, Homo sapiens
atgataggcaaaaatgggaaaataacttgaggccaggagtataagggcagcctgggcaaaatagtgagacaccgtctttacaaaaactttaagtgtcagacaggcaacttggtgggcattttttttttgagatggagtcactctgtcacctaggctggattgcaatggtgcaatcttttcttactgcaaccttcgcctcccgagttcaagtgattctcctgcctcagcctcctgagtacctgggattacaggtgcacaccaccacgcttggctaatttttgtatttttagtagagacgggatttcaccatgttggtcaggctggtctcgagctcctgacctcgtgatcgaccttccttggcctcccaaagtgctgggattacaggcatgagccactgcacccagccttggcgggcatctttcaccaaagctactcaggaagccaaggtgtgaggacccctgcagcacaggagttcaaggcttcagtgagctatgggtgcaccactacacatcagcctgggtgagagagtgagaccatgtctcagaaaggaagaaaaattatccacttgtaggttgtctctaattacttccctgacccgcactcttcatttgtccaagtgctgcagctgtgctctcaacaatttttacaacttctgggaaagatgcccatggcccttgacgatagtgatgcatgtgcatcccacacacaggggtttcctgttcttttgttatttccctctctctttcaacaagtgttgcttcttacggattgaatttctccactgatagatcctcaagtcttgttttcacagatattaatttctctatcactaagatcacccattagtaagaattactaataaagataaaaaataaaaagtaaagaaagtacagaaaaaaagaattttaaataatcttcctagtacctgggaaacagttaggcagagttcaggtatggatctaagatggcactgtcagtaagaggcagaatcaggactggagtccaggcagcctggctcctgaatcctagctcctaactatgagaccctcatgtctttaggaatatggagttctgactgtgatagggtgaaagagggaagtcctcacagtttgcctgttgatctctaattttctacatcatggtaatctgtcacaaaaggggaggccacacctggcccagcccctttcacccactctcaatcccctagcaggtgccacacagaaggcgtgtcctcgtccattggttcttgcatgacaatcagagggacacggatcctccctttcatcaatgacccagagctgcgggtggaattctacactgggatgaatgagaactcagacatcgccttccatttctgagtgcactttggccattgtttggtcattgacagccatgtgtgtggggcctggaagtgtgaggggagatgccacaatgtgttcttcaaggacggcaaacaatttgatctgagcatcttggtgctagacaatgaataccagaagcttgctgggaggagcatggaatctggaatgatgccagagggcaaagctgaaaggggtcatttaagtgctgcaactcagagattcactcagaagactggacacaattccgaaggtcgcccagaaggagaggacaatgtcatttctaactgtgag

SEQ ID NO: 51575 - DNA, 789 bp, Homo sapiens
  misc_feature (584)..(584): n is a, c, g, or t
actgtagccttgtagtatactttgaagtcaggtagcatgatgcctccagctttgttcctttggcttaggaatgacttggtaatgcgggctcttttttggttccatatgaactttaaagtagttttttccaattctgtgaagaaagtcattggtagcttgatggggatggcatttaatctataaattaccttgggcagtatggccattttcatatttattcttcctatccatgagcattgaatgttcttccattgtttggtcattgacagccatgtgtgtggggcctggaagtgtgaggggagatgccacaatgtgttcttcaaggacggcaaacaatttgatctgagcatcttggtgctagacaatgaataccaggtaataataaatggccaacaccatacatctttgcccatccacttccaccatgttctatgaagattttgcaagtgtgggaagatgtctccctgacctcaatgtctgtctgcaatttatggagatgaccacacccctcattgttgaggaatccctctttccatgtgaccataggatccccagagcctgctaacagcatgatctctcctcanccttttccctacacttggtcattaaaacatcaccaaaaaagagccacgcacacacgcgaaacacaaccacatgtggcggccccacatggggacccgcagagaaaccctgtcagagaaccaaggagaaggcgccccgggccccaaagcgagacgcgcgacagagtggcaaaacagggcaccaagggaaaacccgcgcacagacacg

SEQ ID NO: 51576 - DNA, 395 bp, Homo sapiens
cccaacactccgtgtgctttgccctcagcaatgacccagagctgcgggtggaattctacactgggatgaatgagaactcagacatcgccttccatttctgagtgcactttggccattgtttggtcattgacagccatgtgtgtggggcctggaagtgtgaggggagatgccacaatgtgttcttcaaggacggcaaacaatttgatctgagcatcttggtgctagacaatgaataccagaagcttgctgggaggagcatggaatctggaatgatgccagagggcaaagctgaaaggggtcatttaagtgctgcaactcagagattcactcagaagactggacacaattccgaaggtcgcccagaaggagaggacaatgtcatttctaactgtgag

SEQ ID NO: 51577 - DNA, 1996 bp, Homo sapiens
  misc_feature (1791)..(1791): n is a, c, g, or t
atgataggcaaaaatgggaaaataacttgaggccaggagtataagggcagcctgggcaaaatagtgagacaccgtctttacaaaaactttaagtgtcagacaggcaacttggtgggcattttttttttgagatggagtcactctgtcacctaggctggattgcaatggtgcaatcttttcttactgcaaccttcgcctcccgagttcaagtgattctcctgcctcagcctcctgagtacctgggattacaggtgcacaccaccacgcttggctaatttttgtatttttagtagagacgggatttcaccatgttggtcaggctggtctcgagctcctgacctcgtgatcgaccttccttggcctcccaaagtgctgggattacaggcatgagccactgcacccagccttggcgggcatctttcaccaaagctactcaggaagccaaggtgtgaggacccctgcagcacaggagttcaaggcttcagtgagctatgggtgcaccactacacatcagcctgggtgagagagtgagaccatgtctcagaaaggaagaaaaattatccacttgtaggttgtctctaattacttccctgacccgcactcttcatttgtccaagtgctgcagctgtgctctcaacaatttttacaacttctgggaaagatgcccatggcccttgacgatagtgatgcatgtgcatcccacacacaggggtttcctgttcttttgttatttccctctctctttcaacaagtgttgcttcttacggattgaatttctccactgatagatcctcaagtcttgttttcacagatattaatttctctatcactaagatcacccattagtaagaattactaataaagataaaaaataaaaagtaaagaaagtacagaaaaaaagaattttaaataatcttcctagtacctgggaaacagttaggcagagttcaggtatggatctaagatggcactgtcagtaagaggcagaatcaggactggagtccaggcagcctggctcctgaatcctagctcctaactatgagaccctcatgtctttaggaatatggagttctgactgtgatagggtgaaagagggaagtcctcacagtttgcctgttgatctctaattttctacatcatggtaatctgtcacaaaaggggaggccacacctggcccagcccctttcacccactctcaatcccctagcaggtgccacacagaaggcgtgtcctcgtccattggttcttgcatgacaatcagagggacacggatcctccctttcatcaatgacccagagctgcgggtggaattctacactgggatgaatgagaactcagacatcgccttccatttctgagtgcactttggccattgtttggtcattgacagccatgtgtgtggggcctggaagtgtgaggggagatgccacaatgtgttcttcaaggacggcaaacaatttgatctgagcatcttggtgctagacaatgaataccagagcaccctctggttgcaccgctatcctcagctcgtttccaaaatctgaccgtgatcagtatcagctcatctggcatttcccccaaggtaataataaatggccaacaccatacatctttgcccatccacttccaccatgttctatgaagattttgcaagtgtgggaagatgtctccctgacctcaatgtctgtctgcaatttatggagatgaccacacccctcattgttgaggaatccctctttccatgtgaccataggatccccagagcctgctaacagcatgatctctcctcanccttttccctacacttggtcattaaaacatcaccaaaaaagagccacgcacacacgcgaaacacaaccacatgtggcggccccacatggggacccgcagagaaaccctgtcagagaaccaaggagaaggcgccccgggccccaaagcgagacgcgcgacagagtggcaaaacagggcaccaagggaaaacccgcgcacagacacg

SEQ ID NO: 51578 - DNA, 1910 bp, Homo sapiens
  misc_feature (1705)..(1705): n is a, c, g, or t
atgataggcaaaaatgggaaaataacttgaggccaggagtataagggcagcctgggcaaaatagtgagacaccgtctttacaaaaactttaagtgtcagacaggcaacttggtgggcattttttttttgagatggagtcactctgtcacctaggctggattgcaatggtgcaatcttttcttactgcaaccttcgcctcccgagttcaagtgattctcctgcctcagcctcctgagtacctgggattacaggtgcacaccaccacgcttggctaatttttgtatttttagtagagacgggatttcaccatgttggtcaggctggtctcgagctcctgacctcgtgatcgaccttccttggcctcccaaagtgctgggattacaggcatgagccactgcacccagccttggcgggcatctttcaccaaagctactcaggaagccaaggtgtgaggacccctgcagcacaggagttcaaggcttcagtgagctatgggtgcaccactacacatcagcctgggtgagagagtgagaccatgtctcagaaaggaagaaaaattatccacttgtaggttgtctctaattacttccctgacccgcactcttcatttgtccaagtgctgcagctgtgctctcaacaatttttacaacttctgggaaagatgcccatggcccttgacgatagtgatgcatgtgcatcccacacacaggggtttcctgttcttttgttatttccctctctctttcaacaagtgttgcttcttacggattgaatttctccactgatagatcctcaagtcttgttttcacagatattaatttctctatcactaagatcacccattagtaagaattactaataaagataaaaaataaaaagtaaagaaagtacagaaaaaaagaattttaaataatcttcctagtacctgggaaacagttaggcagagttcaggtatggatctaagatggcactgtcagtaagaggcagaatcaggactggagtccaggcagcctggctcctgaatcctagctcctaactatgagaccctcatgtctttaggaatatggagttctgactgtgatagggtgaaagagggaagtcctcacagtttgcctgttgatctctaattttctacatcatggtaatctgtcacaaaaggggaggccacacctggcccagcccctttcacccactctcaatcccctagcaggtgccacacagaaggcgtgtcctcgtccattggttcttgcatgacaatcagagggacacggatcctccctttcatcaatgacccagagctgcgggtggaattctacactgggatgaatgagaactcagacatcgccttccatttctgagtgcactttggccattgtttggtcattgacagccatgtgtgtggggcctggaagtgtgaggggagatgccacaatgtgttcttcaaggacggcaaacaatttgatctgagcatcttggtgctagacaatgaataccaggtaataataaatggccaacaccatacatctttgcccatccacttccaccatgttctatgaagattttgcaagtgtgggaagatgtctccctgacctcaatgtctgtctgcaatttatggagatgaccacacccctcattgttgaggaatccctctttccatgtgaccataggatccccagagcctgctaacagcatgatctctcctcanccttttccctacacttggtcattaaaacatcaccaaaaaagagccacgcacacacgcgaaacacaaccacatgtggcggccccacatggggacccgcagagaaaccctgtcagagaaccaaggagaaggcgccccgggccccaaagcgagacgcgcgacagagtggcaaaacagggcaccaagggaaaacccgcgcacagacacg

SEQ ID NO: 51579 - DNA, 1606 bp, Homo sapiens
  misc_feature (3)..(3): n is a, c, g, or t
  misc_feature (5)..(7): n is a, c, g, or t
atncnnnaggatttggtgacatttgatgatgtggcatggtacctcaccacaagggagtggtttaagctggaccctgaacagagggcactggaatattatgggaacgtgacctctgtgggcgttcctgttttaaatcctgccttggtccctcacctggcacaaggacaagtgctactggtgtcagacccatcgcccaacactgatcctgctaagtactctgaaagcacctccgcgacccgacaccagatgaagggggaagatgcccagccacaggagatggcgtccacaagcttcccaagggccagtggtcccagtcctgaattcagacagcacggggactctgacgggaagagagggagcccacagaatctgcccatagaacatcattttgcttgtaaagagtgttggggatacctttcggcttaaagtcctgcttgtccagcaccagagagtccacagtgaggagaagggctgggaatgtggcgactgcgggaaggtctttaggggggtggcggagtttaatgagcacaggaaaagccacgtagctgcggagccccagcccggccccagtagggccctggagaatgccgcggagaagagggagcagatggagagggaggcaaagcccttcgagtgcgaggagtgcggaaaacggtttaagaagaatgcaggcctgagtcagcatctgagggtccacagcagagagaagccctttgattgcgaggaatgcgggcggtcgttcaaagtcaacacccacctcttccgacatcagaaacttcacacttcggaaaagcctttcgcctgcaaggcgtgcagcagggatttcctggatcgccaggagcttctcaagcaccagcgcatgcacactggccacctgcccttcgactgcgacgactgcggcaagtccttccgaggggtcaacgggctggccgagcaccagcgcatccacagtggggccaagccatacgggtgtccccactgcggcaagctcttccgaaggagctcggagctcaccaagcaccggcggatccacacgggcgagaagccctacgcctgcggccagtgcggcaaggccttccgccagagctccagcctcctggagcacgcacgcatccacagtggcgagcggccctacgcatgcggcgagtgtggcaaggccttccgtgggccctctgacctcatcaagcaccggcgcatccacagcggactgaaaccctatgagtgcgacaaatgcggcaaggccttccgccggagctccggcctcagtcgccaccggcggatccacagtggggcgcggcgctgcgaatgcagccagtgtggccgcgtgttcaagaggcgctcggcactgcagaagcatcagccaacccaccacgagtagaaacgccctgtggtcccgcgggacagggacggagtccccagaggggatggcagagtcaaaggagatgaacagttttgtagcgcttatatattttgtcttccaaaaggttgagaccgatttatactgccaccagcaatttataagtgttacgttatgcccatcaagagtagcttgtaccatttaacttagtttggctagtttaactggtaggaagtaccatcaaggtat

SEQ ID NO: 51580 - DNA, 1434 bp, Homo sapiens
ggatccccgtgatgttatcgcccaacactgatcctgctaagtactctgaaagcacctccgcgacccgacaccagatgaagggggaagatgcccagccacaggagatggcgtccacaagcttcccaagggccagtggtcccagtcctgaattcagacagcacggggactctgacgggaagagagggagcccacagaatctgcccatagaacatcattttgcttgtaaagagtgttggggatacctttcggcttaaagtcctgcttgtccagcaccagagagtccacagtgaggagaagggctgggaatgtggcgactgcgggaaggtctttaggggggtggcggagtttaatgagcacaggaaaagccacgtagctgcggagccccagcccggccccagtagggccctggagaatgccgcggagaagagggagcagatggagagggaggcaaagcccttcgagtgcgaggagtgcggaaaacggtttaagaagaatgcaggcctgagtcagcatctgagggtccacagcagagagaagccctttgattgcgaggaatgcgggcggtcgttcaaagtcaacacccacctcttccgacatcagaaacttcacacttcggaaaagcctttcgcctgcaaggcgtgcagcagggatttcctggatcgccaggagcttctcaagcaccagcgcatgcacactggccacctgcccttcgactgcgacgactgcggcaagtccttccgaggggtcaacgggctggccgagcaccagcgcatccacagtggggccaagccatacgggtgtccccactgcggcaagctcttccgaaggagctcggagctcaccaagcaccggcggatccacacgggcgagaagccctacgcctgcggccagtgcggcaaggccttccgccagagctccagcctcctggagcacgcacgcatccacagtggcgagcggccctacgcatgcggcgagtgtggcaaggccttccgtgggccctctgacctcatcaagcaccggcgcatccacagcggactgaaaccctatgagtgcgacaaatgcggcaaggccttccgccggagctccggcctcagtcgccaccggcggatccacagtggggcgcggcgctgcgaatgcagccagtgtggccgcgtgttcaagaggcgctcggcactgcagaagcatcagccaacccaccacgagtagaaacgccctgtggtcccgcgggacagggacggagtccccagaggggatggcagagtcaaaggagatgaacagttttgtagcgcttatatattttgtcttccaaaaggttgagaccgatttatactgccaccagcaatttataagtgttacgttatgcccatcaagagtagcttgtaccatttaacttagtttggctagtttaactggtaggaagtaccatcaaggtat

SEQ ID NO: 51581 - DNA, 787 bp, Homo sapiens
tctcaaaggaggtataaatccccctgacttgtaattccaccccagctccagcctcacctctccttgacttaccttggcttatggttgggtgtcgggcggctgttatacataaagctatgggagtgaatggtgtgtcccagttcccaaccacggtgctactagcaaagggtcctctggcaggagtgaacagtggaagggtagggatagttgacagtcaggttatggtctgtgtccttaagaggttcacagtctagttgaagacacaaaacattaaaatagaacacgatgtacaatctgatgggtgctctagaatgccagataaagactgtgaacccaagagacaaaagagacagctctacttgggaaatgagatcatggaagacttcccagaagaggcagccttttgaccagtattgttttgttttgttttgttttgttttgttttgttcattatttttatttgttacatgtcttgcaagcaaatttaattttctaaagaattttttttctgatcattttaacatgcgtttttgaaccatgaaagtgtaaaaaattattaaagaaaaccagaaattcagatcagagaattacaaagaagaaaataactcaccagtaaactagtattcctacaactcaacaatattcactgtacatatattttagttcatctgcttctagtctttttcacacagtgtgcacccaaatatattgtgtcagatttatgtgtatagggctgggcgttgtggctcacacctgtaatcccagcactttgggaggccaaggcagg

SEQ ID NO: 51582 - DNA, 434 bp, Homo sapiens
atcatttccattaatgaagatacctgggtgggggcagattgtataatttatcgaagataagctgtgtttctctactgggctggcaaaaatattttttctggaccttaaaggtagaaaggttctggtgaagaagctatttaaaagtatccttagtattattttggggaaggagatataactttgccctatttattgaggtttttggaggacttttacaggcagtagagatgtttccatagctggatttctgagccattacgttgtggttgggaacctttcttttgtagtatactgtagaattttgggatgtgacactgtaaatgggatagatgaggaagatgaccagttcctgagaactggaaggaatcccagcttgacttgagaacttctttaaaacaaaatgaaacaaaacaaaacaaaaaaactgctaaaaa

SEQ ID NO: 51583 - DNA, 419 bp, Homo sapiens
aaaaaaaaaagttactgcctagaccaatgttatggggcttttactctacttttgtgtattagtttcattgcagtttcaagcattacatgtaagtttctaatttattttgaattgatttttacatgtggtgtcaaatgagggtctcattgctttgcatgtggctgtaaagtttctcaacaccatttattgaagatactgtcctttctctgagaaattgtcacctatatttaaaattagatagttgtaaatacatggatatatttctggtttctttgggttcatttttattccaatatactgctttggtcactatagctttgtagtatatttcaaagtaaggttgtgtgataccttcaacctttcttttttgcttgattgctctgggtatttggggtcttttgtggtgccatattaatttt

SEQ ID NO: 51584 - DNA, 402 bp, Homo sapiens
ctgcctcacctaatttttagggagtgtgtaagagaaacagccagtcagaagctacacagccaagtccaggcatcaggctttcctcatctcttccagtgatgacccaccagcagtctgcaatgggacgtgctgggaagcaaacccaaacagcagctgcttccttgtgtggaggatttcctaaataccaggccttgcgtgcacattatctcgtctcatcctcacaacagaacagctcctcattttacacacaaagacactgaagccctgggaagttgtgacttgcttaaggccacactgtctgtttagaggcagagcagaggccaaatggtggtggctcagctccaaagcttgtgccatttctctggcatcacaccaactctccttgataatagggacagtagg

SEQ ID NO: 51585 - DNA, 378 bp, Homo sapiens
aaatactattattactcaccaaacacaaacatcagttactatcccaaagtgcgttgtccaatacagtagcaactagctctatgtggctattttgatttaaattaatcaaaattaaataaaacagaaaactcagttctttagttatacacaccacatttcaagcactcaatagcctcatgtgactatcatatgggatagcccagatataagacatttctatcactgcagaaagttctactggacagtgctgatctgggctatgcttatatccagcatacccatcttcaactacacatccagctggacatgaaaaaatttaagtaaaaaatacaatgacaagtatgacaagatagctagtgccataatacttgagaaata

SEQ ID NO: 51586 - DNA, 386 bp, Homo sapiens
tgagaattgaaaataattcattttggttgactggaaaatgatcagatggaatttaacagagatatgtagagtcctagacttaaaaggtcaggtaggatttgagagacctgacttgacagcattttatgtgaaaattcctgagtgttttcagcaggcccagcttaactggccacaccagtgatgcagctccttacacaagtgcatgcacaggcacacacaacacatatgcacactactaatgcattcctctgctctcattgaagctaagggcccagactgttggagggcagtggcctcactgccctggtgagaccacacccgtggtgtcacactcagttctgggcgcggtgttctgagacggtgtgcacaaatgggaggggatgggc

SEQ ID NO: 51587 - DNA, 652 bp, Homo sapiens
tgcttttgtatcctgcaactttgctgaattttaacttaattttaaaaactatttttttctgacgatacaatgagtaaaatgaaaaaaaatagaaaatcataactaattagataaaaattactcacaattccaccactattagccaactatatttgtgttgtctcattctctcttttttcctccttctcataattagcctcacgctattaatatttttaatcctattttgccacttaagagtatataatgaacttcaattattttcataaagacatatgttcataaaagtttcagcagatacatgtatatagttgagtttggccactgcctgtttccatgtctcctcagctcaaactctttgaaaccccagctttgaacctatcaatatgtaaaggcatcatttacaagttgtaaggtttttaaatagcattttaagtccctttggttggtaaactcaagaagcaaacatcatttgaagacaactttgggacgtggatgtatagtgatattgcgattttactaaatattgcttgagaatgagagcagttcattccttttcatggacttctcttcatccaggaaagggattaaggatcacaatttctgatcttaaaaggaccaatcaaacaaataataaaagaaattgtgtgta

SEQ ID NO: 51588 - DNA, 233 bp, Homo sapiens
gtgatatggtttggctctgtgtccccacccaaattacatgtgaaattctagttcccactgttggggaaggggcctggtgggaggtgattgaatcatggaggctgacttctctcttgctgttctcatcatatggttctcctgagatctagttgtttgaaagtgtgtagcacctccaccttctttctctctctctctctctcctgccagcaatgtgaatatatgcttgcttcccc

SEQ ID NO: 51589 - DNA, 325 bp, Homo sapiens
ctcacagcagctttgagctcctgggctcaagtgatcctcccacctcagccccccagatagctggaatacaggcacatgccactttgctgaacttctccctacgtttctatgtttgaaaagctgtataatacaaggttaagcaaaaaacaaaaaacacgctatgctcacactggactttgagagctcatatggtattttatgctgagcctttcttcccactaacgcccttagattgaatcttggctgcagtgggagatggaggttgcagtgaactgcgatcgcgctactgcaccccagcctgggcaacaaagctagaccttgcctc

SEQ ID NO: 51590 - DNA, 267 bp, Homo sapiens
cagctattacacttgatagattctcctaacctcttaaaatggttagaggagaagaaaaagaaaatggagggaatggctttgaatttgaagtcttatgatgtggaacttttagctttaactgtccatttcttttctttgcatcttttatcgttatcccagcttttattcccttttagattcttagtttttaacattgtgttacccagaatccccacaaattattgtttggccttaacccgcaactcgaatttgccattaaactataaa

SEQ ID NO: 51591 - DNA, 348 bp, Homo sapiens
gaaaaccctttaatgatcacagaaaaccaggttcctaaccagatgataaattttgataaatcaatgatatccagatcacgactttaaattcccattggtccactggacaatcaacattatcacacacatgcctgctcactttggctgacccagctgactaagtacaggtccgtattgccaaattaaacatggaggagaacgctgacttttagacagcttgcctaaatttagtgttaatttgaaccagcttttgagcaagtacaattatgattggaacttacttcagccaaacaaaattttctagctggtcatgagagattgtttgagcaatatagaggtgagattgcg

SEQ ID NO: 51592 - DNA, 406 bp, Homo sapiens
  misc_feature (102)..(102): n is a, c, g, or t
  misc_feature (128)..(128): n is a, c, g, or t
agccgggccgggcagctagcagggcgcttcgggtgctgtgctggtgatatggggtgaaagtcccacgaagacacatatatggctgcttttaattctactttnaggatcagggaagacaatatcaagtnaaaggtcaactatcgctgccttcctatttcaaggaaagacgccaaggtaattttgacccagaggagcaatgatgtagccacctcctaaccttcccttcttgaacccccagttatgccaggatttactagagagtgtcaactcaaccagcaagcggctccttcggcttaacttgtggttggaggagagaacctttgtggggctgcgttctcttagcagtgctcagaagtgacttgcctgagggtggaccagaagaaaggaaaggtgagccaagcactgt

SEQ ID NO: 51593 - DNA, 3614 bp, Homo sapiens
  misc_feature (129)..(129): n is a, c, g, or t
tttgggatggctgggcacgcaccccaagaatggagcccatggaggcgctgaacacggcgcagggcgcgcgacttcatctacagcctgcactccacggagaggagctgcctgctcaaagagctgcaccgnttcgagtctattgccattgcccaagaaaaattggaagctccaccacccaccccaggacagctgagatatgtattcatccacaatgcgatacctttcatagggtttggctttttggataatgcaattatgattgttgctggaacccatattgaaatgtctattggaattattttgggaatttcaactatggcagctgctgctttgggaaatcttgtgtcagatctagctggacttggacttgcaggctacgttgaagcattggcttccaggttaggcctgtcaattcctgatctcacaccaaagcaagttgacatgtggcaaacacgtcttagtacacatttgggcaaagctgttggggtgactattggctgcattctaggaatgtttcctttaattttctttggaggaggtgaagaagatgaaaaactggaaacgaaaagttaatcctcttagaatacctataaaaagatgtaaactaatgtacctcagtaattaaatatgctgtcacaacatttaggaattaagacagtaacagtatagatatgggatcaaataatttagcatgtattatggaaaacactaacttattgtggcttgatcttcttaggacatcttttttaaaaagctgtttagtatcattttgtgtatattgttgaaatgctttttcatcaatagcagtcaacattttatcctttctttttatattcataatgttatttaagtgtcattgatgtactgtattgacttggggtttgcttatttgttacttaacatgtgtacatgcatgaaagcatttttcgttgttccctgatagttacatttcaaccttgggatttttccaaattacttaagatgtttaatgtcagttaaagatttttttaccctctttttgggaacatcaattttgtactgttatgcagtaaacatttataataatataatttcagtcatttcttaactgtcacatctattgaaaatggatatagatacaggttttaagtattttaagtatatattacttattttaattttctgactttactattttaagggccagagggttaatcacaaagagcaattatgtggtctccctgctacatgaaaccgtgtatactaacaagcgtacaatttttagttgattttttttaaccttttagtttcccagttttgaataattacatggtggattctgacttttgaggggaagcaaatgattattttagagtctttgaaatggggattgtggaattagattgaactaagggatttaacatgatgcttggaaattaagagactaaagctttttttaaaaaaaggtggaaaataggaactgtcaagaaggtttatggtataaatgatgaagttgaagtgatgtttgaaagattaatgagatacaatttatattatttggtaaggtttttttttttccctccaaagatgtcatcttctcatctgaatggaataagtctgaataccccatattcatactcctaatctcattatatcttatttagtgaattttatttatgaataatttctgttgaagtgaaaactagatatttaatattttgcttttttgctacatagtctactcaaaaattacatgaggagaaatcctttttccctttgtttttcttttttcttcttttgtggtatttaaagcatattttaggttgaagttacttatttctagtcttgtacttctggcttaagtataaccatgtaagaattataaattttagttttctgaacccttaaacttttttagcatgtggtctgttacacatgctaaaaaattagtcttacttgtaacagcgtaattaaacacatcatggaggagagaaacttaaaattaaaatagtattttggcttttgaagttatttgtgttgctaaatagatgcagaggttttacagcagtttattttaaggttttatttatacataattactttgaactcttcagagtagatattttttcacaaggcagtttgtcataaattctctcatgcgcttcagaatgcataagtgccatcctttaatcatagactttgaggagagaaagcataaaaatatagcatataatctaaaaataaatatataacatgcacaaataatgtgacattcttactgaatcaaatcatgattctagaacttgagatcttaaatagaatttcggtttgtatcttccatataataaccacacacagataaccacacaaaaaatcctttgtaaaatttctgattgataggattagagtgcttaaatttttggggggggaagggtggggtaaagtgtaagtgctttcttttgtccctaacttgtgtattgatggcagtccactctgttttctaaaaatgtattttactgtggtgcttaacttcttattaattaaatcccgtatcagaaaccttgcctgtgactttagaaagggcttttgattattgttttttcttcttgctcttgaaagtaatctggtcccagggaattactggtttaactgaacatctccagaattatttaaggtgtcaaaatatataaccttcacattgaaagataattttaatttatgggcataataaaaatttgaatcattcaggtaattttcaaaaaatggagaccatttgtctttaactgaaggtatatgtttaagatcatagtctaccctagtatggtgctttgccacaaagtgatttctgaagaatggttctttttaagataatgacttcatatgatcattgtttcatgttacttgccacaaataactttaatttaggttgaaactggaactgtttgtttctcatattagctacttctctattaggagcacaagaaccatagttaaatgcaacatgagctactttagtcctgtttgtttaaatttgtgttgtccatgtattatgatttattaacttgttgatgcatgtaaattgggtgcattttgttgccatgtatgttaaatggtgaccaatgtttttacaaaggaattgaacaaaaaaagtatcttttaagaaatttggaatgtggttttgattttgaaatttgatttcttactaatctcagagggccttggtatattctgttactaaagcaaacaggattaatgaatacggatttgttacaaggtggcagcaatgtcactgagatagtgaatggaacaatttaccacctccctggaatctgcacctgagatacaacatcagcgtatgagtgaagagtgagcccatagaaaagctttagatagactcacataagtcacactgatgggtatttacagcagatatatccaagctgtttatgtaatagtctcatttactttattctttttctctagaacataaattttgaaggtaatggaagtttatcttttataccaaaagtttgtatgagccattttgaagtaaatctttctaattttagaattatattttctcgccatcttaagacagtatattaaatataatataacctttttcttagtggcta

SEQ ID NO: 51594 - DNA, 936 bp, Homo sapiens
  misc_feature (129)..(129): n is a, c, g, or t
tttgggatggctgggcacgcaccccaagaatggagcccatggaggcgctgaacacggcgcagggcgcgcgacttcatctacagcctgcactccacggagaggagctgcctgctcaaagagctgcaccgnttcgagtctattgccattgcccaagaaaaattggaagctccaccacccaccccaggacagctgagatatgtattcatccacaatgcgatacctttcatagggtttggctttttggataatgcaattatgattgttgctggaacccatattgaaatgtctattggaattattttgggaatttcaactatggcagctgctgctttgggaaatcttgtgtcagatctagctggacttggacttgcaggctacgttgaagcattggcttccaggttaggcctgtcaattcctgatctcacaccaaagcaagttgacatgtggcaaacacgtcttagtacacatttgggcaaagctgttggggtgactattggctgcattctaggaatgtttcctttaattttctttggaggaggtgaagaagatgaaaaactggaaacgaaaagttaatcctcttagaatacctataaaaagatgtaaactaatgtacctcagtaattaaatatgctgtcacaacatttaggaattaagacagtaacagtatagatatgggatcaaataatttagcatgtattatggaaaacactaacttattgtggcttgatcttcttaggacatcttttttaaaaagctgtttagtatcattttgtgtatattgttgaaatgctttttcatcaatagcagtcaacattttatcctttctttttatattcataatgttagagatacgtatctctaacattacatctccttctcttgcattccttttctttctcattctttctctctctctctcctgcgttatctttgtgc

SEQ ID NO: 51595 - DNA, 823 bp, Homo sapiens
agaagtccctccatttttaaaatatcctcaataattttctgtcattaagcattctctgacctttagtagctgcataatatcagatctcctaaataggccataatttttaacctgtctcccgtttttagatatccaaactcttttcagttttataatagtataattagtactataatgtataaaccatttttacttgggaatataagttttattggggataaaattataatttttagggcaaatttctagaaatgaattcagttagtaagtatgaatattaatacatttgatacatttttccaaacatccctgcagaatagttgtgccagttttcagtgccacctatgaaatgtaaggttacttttttttaagtcaaataactttaaacttatgagatttggtggtgtttggtttctgctaaaagaattatttgatttgttttataagcaaaaaaattattcctgattgttttataaactgcataggctatgcttacattaagaaaaatatcacttgtaatatggttatataaccaaaatagtagaatgagtaggagctttagtttatttagtttaattattagacttatttcagtaaatacaaaaacagaaaatttttaaattccactatagggaactaattttgttcacaaaatattttagaatgaatattctaaatattcattctaaaatattcttttcccgtttcttatttcttcccttccccccttttaaaccactttgagatataattcacataccatacaattcatccacttaaaaggttcaattcagtagttttgagtatattcacagagttgtgc

SEQ ID NO: 51596 - DNA, 330 bp, Homo sapiens
ccaacaccaagtatgcccccctaaccaatcacataggatgctcgcctctagccagcccgcctgcagcttccccaggtcatggtctccatcagggcacacctgatgccttctcttttttctactctgaagctttcccactcctctgccttccgttgagtctctgcaacaacgcaagtaatagtgggtgattcacttgttgtagcaagctctgaatgaacaacttttcatagttctcatttgattggtcttcttttaatttctacacaatgcattaagtgtatattgaatgtcctctataaatatgcattctggtggagaaggcctaagacc

SEQ ID NO: 51597 - DNA, 229 bp, Homo sapiens
ccatacctggctaattttttgtatttttagtagaggcagggtttcactatgttggtcgggcaagtctggaaactcctgacctcaagtgatccgcccacctcagcctcccagagtgctgggtttacagacatgagctactgcactgggcctttcacccatatcttgtccctgtgtgtcagttttgcaaggcagtaatatcgaaaccaaatcctaaagcagtttataattt

SEQ ID NO: 51598 - DNA, 365 bp, Homo sapiens
acctgcaaaaactaactgatgatattaaaatatctgacatttctaatggagataaagttacaggtatccaaacatcactactactactaaaaactcacctgttttaagtgtatagtttgaagagtttttatacaagtacatacatgtagagcaacaacctcagtcaagacatagaacattttcatctcccccagaagtcctctcaggcccctttatactcatccgctcttcccacaggcaactattgatctgctttctgtcactgtggcttagttttgcttgtgccagaattttatttgtttgcttgttaatatctattgatatattttcagtgaacattacctattcactaaaactgaaccagc

SEQ ID NO: 51599 - DNA, 811 bp, Homo sapiens
tggggatgtataagacaaccatttgacacaggtagaaaacttttacttttttaagcccattcccctggtaaacaatatatgtacacacctacatatttgaggtatgtgttcaggtttttacttatggggtcacaatatttaggctttcccttaatttattaacaggataataatagtactccagcttcaaaaaattgtgaaaattaaatgttaagtatattaaataaaacacatataatatatacatgtacatataaagtatttaaaataaagcctcacatttgtgattaatatatgctacctttaggaaaatgatttaacctttatggaaaggaaaagaaattgagtcctcacagagttccaggcactttcataatcatttctaatcccaaacactttccatgagaagtagttactgtctccactttagcaataaggaaacctatatttggggatttagtacccaggagagttgtttcagctaagtacacaagactgaaaaacagcctacatgattttaactcccagacctattttagagtgcaaatacttttttagaatattaagataaacctaaatcaaattttttatatagaagcttatggtcgtgaaaagtttattggtcaattttattatacttcctttaaaaattcaaaagaaaatgtgttatttaatagttaaccagctttttcagataaacatctttctccttcagcagaacattgctaattactatttctgtaccctgtccctttctataaaaaatttcccaaaattataccgtgaaaaagtgttcaagtaaacactgctg

SEQ ID NO: 51600 - DNA, 343 bp, Homo sapiens
ctctcagggaggtggtgtgggggaagcacctctctgaccagacctgtgtaccctcttctttccttaggacaggagtgactagggtcatcaaggacaagctggggccagagagacatttcccagagtgactccagctcaaggcctccctgtggtcaggcttctttgtgtgtttgctcctagataggcctctctaggtactcaggaggtggaatagaattccaggaccatagccccagatggaagggagcttagagactgtctctcttaatagccccattagataaataaggaaatcaaggttctgagagaaaagggggctgggccagagtcacccagcaagtca

SEQ ID NO: 51601 - DNA, 454 bp, Homo sapiens
  misc_feature (446)..(446): n is a, c, g, or t
  misc_feature (450)..(450): n is a, c, g, or t
ttttgagacagagtcttgctctgttacccaggctggagtgcagtggtgtgatctcggctcactgtagccttgacttcccagggtcaagccatcctcccatctcagcttcctgaggagctggaactctaggcgtgtgccaatacaccctgctaatttttgtatgttttgtagagagggggtctcttcatgttacccgggctggtcctgaactcctaagctcgagccatctgtccaccttggcctcccgaagttctgggattacaggtgtgagccaccacgccccgcccacagctaatgttgtagttgctagttctccatattgattaaagcaacaataacagtaacctctacccttttgaataaaagataatgagactattataatttcaggccctcagatgatgacttagattttcaaaattgcatttgactatgaatgtaggganaaanaaaa

SEQ ID NO: 51602 - DNA, 439 bp, Homo sapiens
ggggttccaccctgttgctcaggcttgtcttgaactcctgagctcatgcagtctgcctgtctcggcctccaaaaatgctgggattacaggcatgagttaccatgcctggcctcaggaagatgtattctttaagttataagtgatgtaggattatgaaataatataaaagtaaatagacaaagcaaaatagaataatatgaaaatacaatagctgccatttttataattatccccaatttacagatgaggaaactgaggcttgaagagaatacttaatttgactgataccataaaactagtaagtagaagaacaagaattagaagccaattctgtctccaatacctgcgttctcaccactacacatattgctttctcctaaagaagcaatggtgtcccctacctgagacaggcagtgctaatttgtcaatacctgtaaga

SEQ ID NO: 51603 - DNA, 202 bp, Homo sapiens
tgatgaacatttggctattatgaataatgttattataaatgtacaactatctgtttgagttcctgcttgcaattcttttggacatatagctggttcattttttttcgacccacctacctgtttatgtttttagagatagggtctcactttctcatccaggcagtggcacgatagctcactgtaacctcaaacttctgggctc

SEQ ID NO: 51604 - DNA, 497 bp, Homo sapiens
gtgttatgaggatataggagtggctcagaatcccaggttgcaagtctcccagcactgtactcggccatagttcttaaaccgcatgtgaatctataattatctcaaagagcatgttgagatgagggaattgcaaccatgtgtgaggtgagggtatagtgttctagtgtgtcatagtgagggacaaggctccatcccgaggctgtaggggacagtccattctttcagtggttgttggtgtcccttgacttgtggcatcactccaaaacctgcttccatggccacagtgcctccttcctatgccgccgcctctcctcagtgtgtgtgctctgtgtgccctcttataaggacatatgtcattggatttagggcccagttggctaatccaggataagtcttttcttcaagatccttaatcaccttttgtcatataaggcattacttgttcagtatgtaaagggtatgagaagcctgtgcaatgtggcaagactcctatctac

SEQ ID NO: 51605 - DNA, 1013 bp, Homo sapiens
actggctaatggtaacctgggggaggaagtcgggtaagttgcatggagaaggcaacccttgaacacttgcaaggagctaacaatacctgcttctggagtatttaaacgccagtgggtatgctaaatacttttacctcttagaccacctactaaccttacaaagtagtccactttgctcacccagttttacagattgatgaaactgaagcagacagatattgttaacctatcaaaggtcaccctgcaagtgtgtgattatagtccaagcagcttgtacttgttgcctatttgttttgcctttcctgtgcatttgccaggcagatgagagtggggtaagacattgcagagaaaaagtaagaaaaggccgtcatgaaacaatttcattttcagaccttataagcacgttacaagtactgatatttatgcttaagttcacgggagtcctggccagaaataaagctggaaggacaagtggggggcagattgtgaaggatccttcaagacctgcttcctctagagaatgggagactacccaagataactaaacagggaagtgatcaggttttgtgtcttagaaaagtgttgcagtgttgatgcaaatgtgactagaagggtgacttggaacctggattgaagggtgggagatgggagaaaggaatgcagtctggcagcagctacagcagtccaggtgggaaaacccagagcctgaactaaggttgtaactagaggggatagggtggaagagctggattagagatgttgacaagataaagtcagtaggacttaaagactgacaagtaaggattttccaaaagtgagagctgtggaatgaattgtcttaaaatgttgcagtgagttcctcctcatcaatccaagtgctcgatcagaggctagacctttagttagcagtcacgggaaaattccccattctcacggggatttagactaggtcttaaccatactttaccaagattccagtagcaaagcacccaaaagtaatcgcaataaaattc

SEQ ID NO: 51606 - DNA, 240 bp, Homo sapiens
aaaaatattgaggtaggttaggattttttttgttttatattcaattatagaatatatttccctgtgtcataatgtgattaggtcattaattacttcattggcttcaaaagcacaataataatcactttgtaaagcatggtaataatcacatacagcaagaaaacagtatgaataaccttataccttttattttaatatcattgaccacccaatcacatatgcacaatactacttattttc

SEQ ID NO: 51607 - DNA, 937 bp, Homo sapiens
gacctggactgctctatctgtcttcacatggattgtggctcataacaatagctaaatgtggaattctgtgtatccgagacgtttatactttggaaacatttgcttggtgtcggagtcattctcaccagggtcatgggattcagtcaatgagaatttcaatggatggacaaaacattctggtgaatgggagagatgatggcacccttgtctacctaaagtggaagcgatttggaggacacctagccagtgaaattctggactattaccagaaactattaatttccctgagcagcgccatggacaaggagaatcattatttaagcacaacaccaaaagtttccgtagatttgggatccgattctgaacacacaaaacagaaggcaagcactgacttatcacaagatgaattagttctaaccgatgttaagaaggaaattccttggatacaacaaaaaagccaagaggccatcaaaaaggaggttaatctgttttccaagaaaaggaaagagataaaacaaggaatcaaatcactttccaaaactattctgaatatgatggaagaaaatgacaaactagaaaatattgcaaaattagaccaacaggaatttggtctggatcttgaggaactagaaaggcttcatgatgaaagtcaggaagaagtggcaaagatgataaaggatgtagagatgcataacttagccaagagctatttggctgaacttatcaaagaagaatgttggaattcgatggctgtgaaaggtcgagctcttaagtgttttcatatcccctgtgtggttgaaaacttcccgatgaaagcgcgcacggttgaagagctgaaagaattggaaagagttttacagcaaaagaagattgaagcagagtgtcttaaagtactattttaaatatacatgtgtttatataagtgatgtgctttatt

SEQ ID NO: 51608 - DNA, 1012 bp, Homo sapiens
gacctggactgctctatctgtcttcacatggattgtggctcataacaatagctaaatgtggaattctgtgtatccgagacgtttatactttggaaacatttgcttggtgtcggagtcattctcaccagggtcatgggattcagtcaatgagaatttcaatggatggacaaaacattctggtgaatgggagagatgatggcacccttgtctacctaaagtggaagcgatttggaggacacctagccagtgaaattctggactattaccagaaactattaatttccctgagcagcgccatggacaaggagaatcattatttaagcacaacaccaaaagtttccgtagatttgggatccgattctgaacacacaaaacagaaggcaagcactgacttatcacaagatgaattagttctaaccgatgttaagaaggaaattccttggatacaacaaaaaagccaagaggccatcaaaaaggaggttaatctgttttccaagaaaaggaaagagataaaacaaggaatcaaatcactttccaaaactattctgaatatgatggaagaaaatgacaaactagaaaatattgcaaaattagaccaacaggaatttggtctggatcttgaggaactagaaaggcttcatgatgaaagtcaggaagaagtggcaaagatgataaaggatgtagagatgcataacttagccaagagctatttggctgaacttatcaaagaagaatgttggaattcgatggctgtgaaaggtcgagctcttaagtgttttcatatcccctgtgtggttgaaaacttcccgatgaaagcgcgcacggttgaagagctgaaagaattggaaagagttttacagcaaaagaagattgaagcagagtgtcttaaactacggaaggaaattgtagaggctcagtctggagttaagttgattaaacagcgtcatgaagaggatgatgaagaagaggaagaggaagacaagacagtaaaatatagcaatttgcccaatta

SEQ ID NO: 51609 - DNA, 568 bp, Homo sapiens
atatacttgttctgtttcaggccatcaaaaaggaggttaatctgttttccaagaaaaggaaagagataaaacaaggaatcaaatcactttccaaaactattctgaatatgatggaagaaaatgacaaactagaaaatattgcaaaattagaccaacaggaatttggtctggatcttgaggaactagaaaggcttcatgatgaaagtcaggaagaagtggcaaagatgataaaggatgtagagatgcataacttagccaagagctatttggctgaacttatcaaagaagaatgttggaattcgatggctgtgaaaggtcgagctcttaagtgttttcatatcccctgtgtggttgaaaacttcccgatgaaagcgcgcacggttgaagagctgaaagaattggaaagagttttacagcaaaagaagattgaagcagagtgtcttaaactacggaaggaaattgtagaggctcagtctggagttaagttgattaaacagcgtcatgaagaggatgatgaagaagaggaagaggaagacaagacagtaaaatatagcaatttgcccaatta

SEQ ID NO: 51610 - DNA, 503 bp, Homo sapiens
gacctggactgctctatctgtcttcacatggattgtggctcataacaatagctaaatgtggaattctgtgtatccgagacgtttatactttggaaacatttgcttggtgtcggagtcattctcaccagggtcatgggattcagtcaatgagaatttcaatggatggacaaaacattctggtgaatgggagagatgatggcacccttgtctacctaaagtggaagcgatttggaggacacctagccagtgaaattctggactattaccagaaactattaatttccctgagcagcgccatggacaaggagaatcattatttaagcacaacaccaaaagtttccgtagatttgggatccgattctgaacacacaaaacagaaggcaagcactgacttatcacaagatgaattagttctaaccgatgttaagaaggaaattccttggatacaacaaaaaagccaagaggtatttgtgaaacatggggtaggtttgaaatagtgctct

SEQ ID NO: 51611 - DNA, 321 bp, Homo sapiens
tcccaggtttccaagcacctgcccacttacactcaagacagccaggaccactctgtaggaggggaggccgggacactgcaatgagcccggattgtcagctgttcccagccccttgccttagtgacttcaggcagcacatccctgattccaggagtccatcgggtcctggcatcttggggactggctggacaaacgctggactgcaaataatccgtgttgccagttgagtttccacaagtcacagcatattcttttaatctacaaacctgggtcctattgtgtgaaccaaaaatgcaagtttgattcagttccatgatgcca

SEQ ID NO: 51612 - DNA, 2442 bp, Homo sapiens
  misc_feature (2386)..(2386): n is a, c, g, or t
atgtggatgatacagtgtactacgatgttacaatggcacagtggctatgatgtcactaagcaataggaatgtttcagctccattacagtcttatggggccattgttaaatatgcagtccatcactgaaacgcatggctgcatgtggtagaaggtttcaattcataaatattaatttatactgctggtttatgactaacccaggaaactgcataatgattaacaaatgctacgatataaccaagtgaattgcaaagtcatctacacctgtattaaagttcagctcagaaaggactgtttggactgtgtgtatctagcactacgtagaagagaaagtcaagggcaaagttcccactctcaagaactttatcttgttgggttcatgaaagggtttctggtgacacagagtaggtatataatcagcaaaatgtggtctgcggttcaaatgagtgctcatgccagagattggttgggtgccagctatcagttcttccaccctgtccctggaagctatctgctacctctggggctggcacaacccagggtgtggctgcgactgcctagggtgtggccactgtgaactgagctgcatccccttcctggtgcacacccgcacacacaaaagtcactctctaaggagtgggaatatctatctcttcgccttggaatcttcagaaaataatgatgtagcaaatgatagtttttttgaatgttgatttaattaagctgattctttctttgaaagagaagatttaatgatttttcactccctattgcatttatgttttccacaactacgacaagagttttctctgtgttctgaattcttctttcttaagatttctctttctggattagtcataaaccagtctttcttaaatacattcagtttcttccctggtttcaatagatattgagggaagaaacggaaacctgaattggttagatgcatactttataccagacactgtgccagatgatagagattatttcaggtgtgtattcaggggacggggtgcgtggtggtggtcattctgaaagacacctgcagttgcagctcaaatcatttattccgtaagtatctatgagcgtgcacactgtgcttgacatggaagatgccagacaaacgtggtcctgctctgttttaagtgaaggttgttatggtgtataaagcaggacacctcacttggtaggagtgcaaggaggtatcagggagggctgttctgctgcccttctcgcaggcagcttttcaggcattgctcctgcacctatgcagacgtgtccatggctcgtgcgggggaccctcagggagaacagtcacgctgctgccccaggcacttgcactgtccctatgactgagtatgcatcctctgcaaaccactgctgtagcatcagactctgggtacccttactgtgaattcactgcctttccaaggtcctaactgttgctggctctgcttgtcatcatccagattcataacgccatacataccttaacaaagtgtgaggagagtaactttcactagggtgcaaatgcccatcaagtttaacctcacagattgcatttatactttaaaagaggagctcagtagtaaatattaatttgtaattatagattctaactgtggattgtagagcagttgctttgctgtgacaggcatctatgcaagaggcacttctcttatcttgccatctacctaccctagcctcttaaaattaagaaaaatagaagtcagtgactaagccaccaaatttgaatgtgttacctgggctagctggagtgttttgggggagaattctaaaacctgctctggtcttagctctgccctcatttactgagcctctatttccttttctataaagtggagctaataggagttttgtgaagagtaaaagtgagctgaaaagtgctgggctgacacaaggtagccctgcacatagccagggagcccagcatcctgtccaaagattagagtctgaaagctcactctactgatttgcaaactttaacctaaagcaaatatgcttaattttattgtccttacatttattgcttctgagagacaccttttttttttttaaggcaaggtcttgctctgttgccccatgctgcagtgaggtggtgcaatcatagctcactacagcctcagcctcctgggctcaggtgatcctcccacttcagcctcctgagtagacatgagagtctccctgtgtggcccaggctgcctggctcaggagttcaagaatagcctggccaacatggcaaaacctcgtttctactaaaaatacaaaaattagctgggtgtggtggtgcgcatctgtaatcccagctacttgggaggctgaggcaggagaatcacttgaacccgggagatggaggttgcagtnagccgagatcgtgccactgcactccagcccgggcgacaagagtgaaactccatctc

SEQ ID NO: 51613 - DNA, 416 bp, Homo sapiens
taaataatagagacaaggtctcgctatgctgcccaggctgatctcaaactcctggactcaagcaatcctcctgccttggcctcccaaagtgctaggattataggagtgatccactatgtccagcctccaaatcctttctaaacactaggacttttcatgaaaagaaaaaagctatgccagttagacacacacagaaatctcatgattttattttgaatttctttgactaaattgaacttacaaataagtttattatggccaggcgtggcagtgcacacctgtaatcccagcactttgggaggctgaggcgggcagatcacttgagctcaggagttcaagaccagcctggcgaacatagtgagacctcatctctacaaaaaatacaaaattagcggccgggagtggtggctcacgcc

SEQ ID NO: 51614 - DNA, 400 bp, Homo sapiens
ggaagggtgaggattgaaaaactacttaacgggtactatgcccgctacttgggttgtgaaattatttatacaccaaaccccagtgacacgcagtttaccagtataacaaacctgcacatgtaccccctgaactaaagcaaaagttggaagaacaaaaataaagacttcagacaccaactacaactttgggagtttccaaaaactaccctctggttcaaaattcactagaaagactcacagaaccactgaaatatattaaagtcacatccattgtagtcacattatacaaattacaaccagccataggaagagatgcataaggcagagtctttttttcctcctctgtattagtccattttcatgcttctgataaagacatacccgagactgggcaatttac

SEQ ID NO: 51615 - DNA, 240 bp, Homo sapiens
ggagaggaaggcatctgtgctgggggtcaagggacgtggagtggtctcagccactgtctgtcttcatcctgtatttgccatgtccatgcgagagcatgctggacatgagtttccctcaccccttgacctctttggagtagacatgttacaatcagtttcaagcccatctctggtctgaggtgagaatacagaatatttacttacctaccccctgcccaactttggtttgactgactgttt

SEQ ID NO: 51616 - DNA, 2387 bp, Homo sapiens
caaaaaacccaggctccaagggattatgacaactaagattcctcttactggagcaagaactaccccataggctggaaaaatagcttcatgaagtttaagaacaagcaggaacatgggagaaatgaggaattccagttcctatcttgtaaaaatgctttcatatgtgacctgagggaccaggagaggtgaagggagcccctggttctcttataaaatctctaagtttttacaccacttcaagaaatatagtcagccctctttgtatagagcattaggaagcaagagcgtggtgaagctgacatttctcaggcacattgacatttaaaatacaaacttttctcttaaagatctcactggttggacatctcttctcctccgtccttcccttcgctctacttttgttccaagccgcccctgcctctccagggctaggagtgggacaggggtgggagaggtggtctcaccaggctgctggccccacggagcctgtctccctggggatgggaacggggatagaagacaggggaggaggcgcgcgcccgttttgggggttccgggtaggctgtgaggaccgcttttggtgagagtgccttgagcagcggggagcagttggattcaacttcagggcacaggagaagttaggagaagagggagagggaaagagtgggacacacagaaccagggtgcccagccaggcgagggtccgaggcaggaacgttctagcctcttcccgtgcgagtcctgctgcctctttgagcctccgtgtcttcatcactgaggaagggatttgacctgatgagaggaaggtgcccctggcttcccagtatgatgagctgccgcactacccaggcatcgtggatggccccgcagccctggctagcttcccagagacagtgcccgcagtaccagggccctatggcccgcaccggcctccccagcccctgcccccaggcttggacagcgacggcctgaagagggagaaggatgagatctatggacacccgctcttccccctcttggccctggtctttgagaaatgtgaactggctacatgctctccccgtgacggggccggagctgggctggggacaccccctggaggtgacgtctgctcctctgattccttcaacgaggacatcgctgcctttgccaagcaggttcgctctgagaggcccctcttctcctccaacccagaactggacaatctgatgatccaggccatccaggtgctgcggttccacctgctggagctggagaaggtccacgacctgtgcgacaacttctgtcaccgctacatcacctgcctcaagggaaagatgcccatcgacctggtcatcgaggatcgggacggcggctgcagggaggacttcgaggactacccagcctcctgccccagcctcccagaccagaataatatgtggattcgagaccatgaggatagtgggtctgtacatttggggaccccaggtccatccagtgggggcctggcctcccagagtggggacaactccagtgaccaaggagacgggctggacaccagcgtggcctctcccagttctggtggagaagatgaggacttggaccaggagcgacggcgaaacaagaagagggggatcttccccaaggtggccaccaacatcatgcgagcctggttgttccagcacctctcgcacccgtacccctcggaggagcagaagaaacagctggcgcaggacacggggctcaccatcctgcaagtcaacaactggttcattaacgcccggagacgcatcgtgcaacctatgatcgatcaatccaaccgcacagggcagggtgcagccttcagcccagagggccagcccatcgggggctataccgagacgcagccacacgtggccgtccggcctccgggatcagtggggatgagtttgaacttggaaggagaatggcattatctatagaggctgatgcaggagagacccagcctccggctgtgacccccagcctcacacctgcctctggttcccgcctggtcctccagcttcaggaccccacctccaaaggcccctctgctcaatgcctacctccctagggccctgctgggacatgggggcctgagtgcccatccaagggctctcaaggacaccggcaaggcctccaggccctgagccccacttctgccttcacctctgcctgggacccgagctgggctcctgggccttggtccccagaagatggcggctagggcctcgccgccaggacagagaagggacggggtggctgggcagtcagggaaggagggtcgcccggatccgacattttggagagattccttcactctcctgtcccccctacctcccttctctaatttcttcttttttttaatgataaagtcttaaaaacacgga

SEQ ID NO: 51617 - DNA, 1356 bp, Homo sapiens
cgtccgctcgcttcggcggacagtgggttaagcatctccgccgtggaacttccggatgtgaccacagagagggagagaccgggaacggggagcgcggctgccagcacccctgagccgccgccggaccctccgtcgccccgggccgccccccgccccctgcggtccccggggtccatgcgcggagtccccacccggcccggcgcctgccgctgacggcggcgggggtgggggggcgcgcgcctggcctcctgcccacccccaggcttggacagcgacggcctgaagagggagaaggatgagatctatggacacccgctcttccccctcttggccctggtctttgagaaatgtgaactggctacatgctctccccgtgacggggccggagctgggctggggacaccccctggaggtgacgtctgctcctctgattccttcaacgaggacatcgctgcctttgccaagcaggttcgctctgagaggcccctcttctcctccaacccagaactggacaatctgatgatccaggccatccaggtgctgcggttccacctgctggagctggagaaggtccacgacctgtgcgacaacttctgtcaccgctacatcacctgcctcaagggaaagatgcccatcgacctggtcatcgaggatcgggacggcggctgcagggaggacttcgaggactacccagcctcctgccccagcctcccagaccagaataatatgtggattcgagaccatgaggatagtgggtctgtacatttggggaccccaggtccatccagtgggggcctggcctcccagagtggggacaactccagtgaccaaggagacgggctggacaccagcgtggcctctcccagttctggtggagaagatgaggacttggaccaggagcgacggcgaaacaagaagagggggatcttccccaaggtggccaccaacatcatgcgagcctggttgttccagcacctctcgcacccgtacccctcggaggagcagaagaaacagctggcgcaggacacggggctcaccatcctgcaagtcaacaactggttattaacgccggagacgcatcgtgccagcttatgatcgaacaatcccaccgaccacggcagtggcagctttcgcccagaagggcaggcccacgggggtaccgaacggcacccactggccgcgggcccgagaaaggaggacacgacccgacggacaaggcacacacagcgcggccggacccccggtgggccaaaacggctggccgggccaaaaccacggccggagaccacacgggaggggcaccacaccaccctcaccggggaccccgcaaagtacaccccgataaaaacgcaacac

SEQ ID NO: 51618 - DNA, 276 bp, Homo sapiens
ctcggcctgtacgacatgagaagatctggcaccacaccttctacaacgagctgcgcgtgccccggaggagcacccatgtgctgctgaccgaggcccccctgaaccccaaggccacacagatggacatagagccaaacagccccaggtactgcccggcaaactcagatataaccacacttgggcccggactgaccacggtgccctcttgcacacacgtgaccctggccacatcacagtcgggctgcagccgagatcacacgcacacaccactcacag

SEQ ID NO: 51619 - DNA, 2093 bp, Homo sapiens
cgtccgctcgcttcggcggacagtgggttaagcatctccgccgtggaacttccggatgtgaccacagagagggagagaccgggaacggggagcgcggctgccagcacccctgagccgccgccggaccctccgtcgccccgggccgccccccgccccctgcggtccccggtgtgtccgtctcgggacggttcgattccctccagagccggggaagggacggggggggcccagaggagggggcctcgggcgccccgcctgcgcctgctgcccccgccccggcggcgatgcgctcctggccgtgacccccgctgggggcgggggccggggtccatgcgcggagtccccacccggcccggcgcctgccgctgacggcggcgggggtgggggggcgcgcgcctggcctcctgcccaccccctggcgtcaacaccgtgggccgtcaggggctgcggccccgggctgcgccctcccccgcggccaggctctggagggacccaggagctgccgccggcctcagcccatggcccggaggtatgatgagctgccgcactacccaggcatcgtggatggccccgcagccctggctagcttcccagagacagtgcccgcagtaccagggccctatggcccgcaccggcctccccagcccctgcccccaggcttggacagcgacggcctgaagagggagaaggatgagatctatggacacccgctcttccccctcttggccctggtctttgagaaatgtgaactggctacatgctctccccgtgacggggccggagctgggctggggacaccccctggaggtgacgtctgctcctctgattccttcaacgaggacatcgctgcctttgccaagcaggttcgctctgagaggcccctcttctcctccaacccagaactggacaatctgatgatccaggccatccaggtgctgcggttccacctgctggagctggagaaggtccacgacctgtgcgacaacttctgtcaccgctacatcacctgcctcaagggaaagatgcccatcgacctggtcatcgaggatcgggacggcggctgcagggaggacttcgaggactacccagcctcctgccccagcctcccagaccagaataatatgtggattcgagaccatgaggatagtgggtctgtacatttggggaccccaggtccatccagtgggggcctggcctcccagagtggggacaactccagtgaccaaggagacgggctggacaccagcgtggcctctcccagttctggtggagaagatgaggacttggaccaggagcgacggcgaaacaagaagagggggatcttccccaaggtggccaccaacatcatgcgagcctggttgttccagcacctctcgcacccgtacccctcggaggagcagaagaaacagctggcgcaggacacggggctcaccatcctgcaagtcaacaactggttcattaacgcccggagacgcatcgtgcaacctatgatcgatcaatccaaccgcacagggcagggtgcagccttcagcccagagggccagcccatcgggggctataccgagacgcagccacacgtggccgtccggcctccgggatcagtggggatgagtttgaacttggaaggagaatggcattatctatagaggctgatgcaggagagacccagcctccggctgtgacccccagcctcacacctgcctctggttcccgcctggtcctccagcttcaggaccccacctccaaaggcccctctgctcaatgcctacctccctagggccctgctgggacatgggggcctgagtgcccatccaagggctctcaaggacaccggcaaggcctccaggccctgagccccacttctgccttcacctctgcctgggacccgagctgggctcctgggccttggtccccagaagatggcggctagggcctcgccgccaggacagagaagggacggggtggctgggcagtcagggaaggagggtcgcccggatccgacattttggagagattccttcactctcctgtcccccctacctcccttctctaatttcttcttttttttaatgataaagtcttaaaaacacgga

SEQ ID NO: 51620 - DNA, 2042 bp, Homo sapiens
cgtccgctcgcttcggcggacagtgggttaagcatctccgccgtggaacttccggatgtgaccacagagagggagagaccgggaacggggagcgcggctgccagcacccctgagccgccgccggaccctccgtcgccccgggccgccccccgccccctgcggtccccggtgtgtccgtctcgggacggttcgattccctccagagccggggaagggacggggggggcccagaggagggggcctcgggcgccccgcctgcgcctgctgcccccgccccggcggcgatgcgctcctggccgtgacccccgctgggggcgggggccggggtccatgcgcggagtccccacccggcccggcgcctgccgctgacggcggcgggggtgggggggcgcgcgcctggcctcctgcccaccccctggcgtcaacaccgtgggccgtcaggggctgcggccccgggctgcgccctcccccgcggccaggctctggagggacccaggagctgccgccggcctcagcccatggcccggaggtatgatgagctgccgcactacccaggcatcgtggatggccccgcagccctggctagcttcccagagacagtgcccgcagtaccagggccctatggcccgcaccggcctccccagcccctgcccccaggcttggacagcgacggcctgaagagggagaaggatgagatctatggacacccgctcttccccctcttggccctggtctttgagaaatgtgaactggctacatgctctccccgtgacggggccggagctgggctggggacaccccctggaggtgacgtctgctcctctgattccttcaacgaggacatcgctgcctttgccaagcaggttcgctctgagaggcccctcttctcctccaacccagaactggacaatctgatgatccaggccatccaggtgctgcggttccacctgctggagctggagaagggaaagatgcccatcgacctggtcatcgaggatcgggacggcggctgcagggaggacttcgaggactacccagcctcctgccccagcctcccagaccagaataatatgtggattcgagaccatgaggatagtgggtctgtacatttggggaccccaggtccatccagtgggggcctggcctcccagagtggggacaactccagtgaccaaggagacgggctggacaccagcgtggcctctcccagttctggtggagaagatgaggacttggaccaggagcgacggcgaaacaagaagagggggatcttccccaaggtggccaccaacatcatgcgagcctggttgttccagcacctctcgcacccgtacccctcggaggagcagaagaaacagctggcgcaggacacggggctcaccatcctgcaagtcaacaactggttcattaacgcccggagacgcatcgtgcaacctatgatcgatcaatccaaccgcacagggcagggtgcagccttcagcccagagggccagcccatcgggggctataccgagacgcagccacacgtggccgtccggcctccgggatcagtggggatgagtttgaacttggaaggagaatggcattatctatagaggctgatgcaggagagacccagcctccggctgtgacccccagcctcacacctgcctctggttcccgcctggtcctccagcttcaggaccccacctccaaaggcccctctgctcaatgcctacctccctagggccctgctgggacatgggggcctgagtgcccatccaagggctctcaaggacaccggcaaggcctccaggccctgagccccacttctgccttcacctctgcctgggacccgagctgggctcctgggccttggtccccagaagatggcggctagggcctcgccgccaggacagagaagggacggggtggctgggcagtcagggaaggagggtcgcccggatccgacattttggagagattccttcactctcctgtcccccctacctcccttctctaatttcttcttttttttaatgataaagtcttaaaaacacgga

SEQ ID NO: 51621 - DNA, 2300 bp, Homo sapiens
cgtccgctcgcttcggcggacagtgggttaagcatctccgccgtggaacttccggatgtgaccacagagagggagagaccgggaacggggagcgcggctgccagcacccctgagccgccgccggaccctccgtcgccccgggccgccccccgccccctgcggtccccggtgtgtccgtctcgggacggttcgattccctccagagccggggaagggacggggggggcccagaggagggggcctcgggcgccccgcctgcgcctgctgcccccgccccggcggcgatgcgctcctggccgtgacccccgctgggggcgggggccggggtccatgcgcggagtccccacccggcccggcgcctgccgctgacggcggcgggggtgggggggcgcgcgcctggcctcctgcccaccccctggcgtcaacaccgtgggccgtcaggggctgcggccccgggctgcgccctcccccgcggccaggctctggagggacccaggagctgccgccggcctcagcccatggcccggaggtatgatgagctgccgcactacccaggcatcgtggatggccccgcagccctggctagcttcccagagacagtgcccgcagtaccagggccctatggcccgcaccggcctccccagcccctgcccccaggcttggacagcgacggcctgaagagggagaaggatgagatctatggacacccgctcttccccctcttggccctggtctttgagaaatgtgaactggctacatgctctccccgtgacggggccggagctgggctggggacaccccctggaggtgacgtctgctcctctgattccttcaacgaggacatcgctgcctttgccaagcaggttcgctctgagaggcccctcttctcctccaacccagaactggacaatctgatgatccaggccatccaggtgctgcggttccacctgctggagctggagaaggtccacgacctgtgcgacaacttctgtcaccgctacatcacctgcctcaagggaaagatgcccatcgacctggtcatcgaggatcgggacggcggctgcagggaggacttcgaggactacccagcctcctgccccagcctcccagaccagaataatatgtggattcgagaccatgaggatagtgggtctgtacatttggggaccccaggtccatccagtgggggcctggcctcccagagtggggacaactccagtgaccaaggagacgggctggacaccagcgtggcctctcccagttctggtggagaagatgaggacttggaccaggagcgacggcgaaacaagaagagggggatcttccccaaggtggccaccaacatcatgcgagcctggttgttccagcacctctcggcgggggctggcaggcatgtaattgccccaagcctgaggctcccttggtctccatcctggggagcgcagagacgctcagaagcgccggttctcccagacgtctgcctgggcctgggctccccatcccccggaccccggtgggccagaccttggggttcagactgcggccggccaggcaggcagagtgactcttgctggtggctgcagcacccgtacccctcggaggagcagaagaaacagctggcgcaggacacggggctcaccatcctgcaagtcaacaactggttcattaacgcccggagacgcatcgtgcaacctatgatcgatcaatccaaccgcacagggcagggtgcagccttcagcccagagggccagcccatcgggggctataccgagacgcagccacacgtggccgtccggcctccgggatcagtggggatgagtttgaacttggaaggagaatggcattatctatagaggctgatgcaggagagacccagcctccggctgtgacccccagcctcacacctgcctctggttcccgcctggtcctccagcttcaggaccccacctccaaaggcccctctgctcaatgcctacctccctagggccctgctgggacatgggggcctgagtgcccatccaagggctctcaaggacaccggcaaggcctccaggccctgagccccacttctgccttcacctctgcctgggacccgagctgggctcctgggccttggtccccagaagatggcggctagggcctcgccgccaggacagagaagggacggggtggctgggcagtcagggaaggagggtcgcccggatccgacattttggagagattccttcactctcctgtcccccctacctcccttctctaatttcttcttttttttaatgataaagtcttaaaaacacgga

SEQ ID NO: 51622 - DNA, 2959 bp, Homo sapiens
cgtccgctcgcttcggcggacagtgggttaagcatctccgccgtggaacttccggatgtgaccacagagagggagagaccgggaacggggagcgcggctgccagcacccctgagccgccgccggaccctccgtcgccccgggccgccccccgccccctgcggtccccggtgtgtccgtctcgggacggttcgattccctccagagccggggaagggacggggggggcccagaggagggggcctcgggcgccccgcctgcgcctgctgcccccgccccggcggcgatgcgctcctggccgtgacccccgctgggggcgggggccggggtccatgcgcggagtccccacccggcccggcgcctgccgctgacggcggcgggggtgggggggcgcgcgcctggcctcctgcccaccccctggcgtcaacaccgtgggccgtcaggggctgcggccccgggctgcgccctcccccgcggccaggctctggagggacccaggagctgccgccggcctcagcccatggcccggaggtatgatgagctgccgcactacccaggcatcgtggatggccccgcagccctggctagcttcccagagacagtgcccgcagtaccagggccctatggcccgcaccggcctccccagcccctgcccccaggcttggacagcgacggcctgaagagggagaaggatgagatctatggacacccgctcttccccctcttggccctggtctttgagaaatgtgaactggctacatgctctccccgtgacggggccggagctgggctggggacaccccctggaggtgacgtctgctcctctgattccttcaacgaggacatcgctgcctttgccaagcaggttcgctctgagaggcccctcttctcctccaacccagaactggacaatctgatgatccaggccatccaggtgctgcggttccacctgctggagctggagaaggtccacgacctgtgcgacaacttctgtcaccgctacatcacctgcctcaagggaaagatgcccatcgacctggtcatcgaggatcgggacggcggctgcagggaggacttcgaggactacccagcctcctgccccagcctcccagaccagaataatatgtggattcgagaccatgaggatagtgggtctgtacatttggggaccccaggtccatccagtgggggcctggcctcccagagtggggacaactccagtgaccaaggagacgggctggacaccagcgtggcctctcccagttctggtggagaagatgaggacttggaccaggagcgacggcgaaacaagaagagggggatcttccccaaggtggccaccaacatcatgcgagcctggttgttccagcacctctcgcacccgtacccctcggaggagcagaagaaacagctggcgcaggacacggggctcaccatcctgcaagtcaacaactggttcattaacgcccggagacgcatcgtgcaacctatgatcgatcaatccaaccgcacagggcagggtgcagccttcagcccagagggccagcccatcgggggctataccgagacgcagccacacgtggccgtccggcctccgggatcagtggggatgagtttgaacttggaaggagaatggcattatctatagaggctgatgcaggagaggtgtgagggtctaagggctggggattgtgcaattctcaaacctccattagacctcaggactccaagagtgggcacttccagagtagtgggtcagcctgggtccctgtactgtgggttctctgaggcttgatgggaagatattcatccatctgtccgtccgtccatccatccatccatccatccatcctcctcctccatgtatccatccatctacccactcactcacccatccatatctttatccatccgttactcaattactcattcacccgcaatccatccatccaaacctagtccacccacctacccactcattacccatctgaccacacattcacccactcactccattcatctctccactcgccaacccactcatccatctacctccacactgaccaaccacccacacatctacccatttatctgtgcattcacccacctccctacccaggcttccacccacctacccatcaactcacccatccatccacccacacatcccattatccatatatccacccacccaccacccactatccatccatccatccatacctacatacacccattcatctatgatacatctccaaacataaactgagcccttggctgggcacggtagctcacgcctgtaatcccagcactttaggaggctgaggcaggtggatcacctgaggtcagaagttcgagaccagcctggccaacatggtaaaaccctgtctctactaaaaatacaaaaattagccaggtgtggtggcatgtacccatagtcccagctactctggaggctgaggcaggagaatcacttgaacccaggaggcggaggttacagtgagccaagatcaacctgggcaataaagtgagactccatctaaaaaaaaaaaaaaaaaaaaattgagccctcactccatcctgacatgcctcaggtagggtctggatcttgagaagattctggtcttgtggggaagttggcaaccccagtgacaatccagtgtaacagttcaaacaataaaacgtagtttccccataggagggagtcatcagctatctctggggtatcagggaagatttcctagaggaagtggcctctggatggggcactgaaggatgaataggagtccactgggcagagtagggagtaatgtggaaggggggcattatttgactttcccaggccttgagtcttctgtggcctggtatgatggcggcactttagagcatcttctcatttagtccttacaacgatcccgaaaggggagactattaacaattttaatttcatagataagaaga

SEQ ID NO: 51623 - DNA, 1118 bp, Homo sapiens
aggcggagtttgcggtgagcagagatcgcgccactgcattccagcctggcgacagagcaagactccatctcaaataaataaataaataaatggatagggagagggccacacagagactctgacagattcagagagggagggcctgggctttgcttccctccccgacgccagtgaagcccctcccccacgccacaggagccccctcccccaacacagtctctctaatcagagctggccagttaacctctaattgctggaacaggcgggggctggcaggcatgtaattgccccaagcctgaggctcccttggttccccatcccccggaccccggtgggccagaccttggggttcagactgcggccggccaggcaggcagagtgactcttgctggtggctgcagcacccgtacccctcggaggagcagaagaaacagctggcgcaggacacggggctcaccatcctgcaagtcaacaactggttcattaacgcccggagacgcatcgtgcaacctatgatcgatcaatccaaccgcacagggcagggtgcagccttcagcccagagggccagcccatcgggggctataccgagacgcagccacacgtggccgtccggcctccgggatcagtggggatgagtttgaacttggaaggagaatggcattatctatagaggctgatgcaggagagacccagcctccggctgtgacccccagcctcacacctgcctctggttcccgcctggtcctccagcttcaggaccccacctccaaaggcccctctgctcaatgcctacctccctagggccctgctgggacatgggggcctgagtgcccatccaagggctctcaaggacaccggcaaggcctccaggccctgagccccacttctgccttcacctctgcctgggacccgagctgggctcctgggccttggtccccagaagatggcggctagggcctcgccgccaggacagagaagggacggggtggctgggcagtcagggaaggagggtcgcccggatccgacattttggagagattccttcactctcctgtcccccctacctcccttctctaatttcttcttttttttaatgataaagtcttaaaaacacgga

SEQ ID NO: 51624 - DNA, 1751 bp, Homo sapiens
cgtccgctcgcttcggcggacagtgggttaagcatctccgccgtggaacttccggatgtgaccacagagagggagagaccgggaacggggagcgcggctgccagcacccctgagccgccgccggaccctccgtcgccccgggccgccccccgccccctgcggtccccggtgtgtccgtctcgggacggttcgattccctccagagccggggaagggacggggggggcccagaggagggggcctcgggcgccccgcctgcgcctgctgcccccgccccggcggcgatgcgctcctggccgtgacccccgctgggggcgggggccggggtccatgcgcggagtccccacccggcccggcgcctgccgctgacggcggcgggggtgggggggcgcgcgcctggcctcctgcccaccccctggcgtcaacaccgtgggccgtcaggggctgcggccccgggctgcgccctcccccgcggccaggctctggagggacccaggagctgccgccggcctcagcccatggcccggaggtatgatgagctgccgcactacccaggcatcgtggatggccccgcagccctggctagcttcccagagacagtgcccgcagtaccagggccctatggcccgcaccggcctccccagcccctgcccccaggcttggacagcgacggcctgaagagggagaaggatgagatctatggacacccgctcttccccctcttggccctggtctttgagaaatgtgaactggctacatgctctccccgtgacggggccggagctgggctggggacaccccctggaggtgacgtctgctcctctgattccttcaacgaggacatcgctgcctttgccaagcaggttcgctctgagaggcccctcttctcctccaacccagaactggacaatctgatgatccaggccatccaggtgctgcggttccacctgctggagctggagaaggtccacgacctgtgcgacaacttctgtcaccgctacatcacctgcctcaagggaaagatgcccatcgacctggtcatcgaggatcgggacggcggctgcagggaggacttcgaggactacccagcctcctgccccagcctcccagaccagaataatatgtggattcgagaccatgaggatagtgggtctgtacatttggggaccccaggtccatccagtgggggcctggcctcccagagtggggacaactccagtgaccaaggagacgggctggacaccagcgtggcctctcccagttctggtggagaagatgaggacttggaccaggagcgacggcgaaacaagaagagggggatcttccccaaggtggccaccaacatcatgcgagcctggttgttccagcacctctcgcacccgtacccctcggaggagcagaagaaacagctggcgcaggacacggggctcaccatcctgcaagtcaacaactggttattaacgccggagacgcatcgtgccagcttatgatcgaacaatcccaccgaccacggcagtggcagctttcgcccagaagggcaggcccacgggggtaccgaacggcacccactggccgcgggcccgagaaaggaggacacgacccgacggacaaggcacacacagcgcggccggacccccggtgggccaaaacggctggccgggccaaaaccacggccggagaccacacgggaggggcaccacaccaccctcaccggggaccccgcaaagtacaccccgataaaaacgcaacac

SEQ ID NO: 51625 - DNA, 1718 bp, Homo sapiens
cgtccgctcgcttcggcggacagtgggttaagcatctccgccgtggaacttccggatgtgaccacagagagggagagaccgggaacggggagcgcggctgccagcacccctgagccgccgccggaccctccgtcgccccgggccgccccccgccccctgcggtccccggtgtgtccgtctcgggacggttcgattccctccagagccggggaagggacggggggggcccagaggagggggcctcgggcgccccgcctgcgcctgctgcccccgccccggcggcgatgcgctcctggccgtgacccccgctgggggcgggggccggggtccatgcgcggagtccccacccggcccggcgcctgccgctgacggcggcgggggtgggggggcgcgcgcctggcctcctgcccaccccctggcgtcaacaccgtgggccgtcaggggctgcggccccgggctgcgccctcccccgcggccaggctctggagggacccaggagctgccgccggcctcagcccatggcccggaggtatgatgagctgccgcactacccaggcatcgtggatggccccgcagccctggctagcttcccagagacagtgcccgcagtaccagggccctatggcccgcaccggcctccccagcccctgcccccaggcttggacagcgacggcctgaagagggagaaggatgagatctatggacacccgctcttccccctcttggccctggtctttgagaaatgtgaactggctacatgctctccccgtgacggggccggagctgggctggggacaccccctggaggtgacgtctgctcctctgattccttcaacgaggacatcgctgcctttgccaagcaggttcgctctgagaggcccctcttctcctccaacccagaactggacaatctgatgatccaggccatccaggtgctgcggttccacctgctggagctggagaaggtccacgacctgtgcgacaacttctgtcaccgctacatcacctgcctcaagggaaagatgcccatcgacctggtcatcgaggatcgggacggcggctgcagggaggacttcgaggactacccagcctcctgccccagcctcccagaccaggtgggcccgggacgggcaccaggcatcgtcctgcagccacagctgtgcctggacaccgcatgagggcgcatgtgcactacacagcctcagacgaagccacagtcagcctgatcacagggcacgcatatgcacacagccacacacccactacacaacagctacgcagactcggatgcggctgggcaacagtgcacagacacacgcacaccagcggctgcagatgccacccacagattcagctacacccacacaggtccacatacagccacaccaactcagcaacagccatttctgctcacagccagacagtagcgtccaccgggtactcacacacgccccccagcccagccatacgacagcagcatagaacacacagccgggttccgcacgccgttctcaattgagtatgtgtccactgcatacacacacccgctccagccacacagatggacatagagccaaacagccccaggtactgcccggcaaactcagatataaccacacttgggcccggactgaccacggtgccctcttgcacacacgtgaccctggccacatcacagtcgggctgcagccgagatcacacgcacacaccactcacag

SEQ ID NO: 51626 - DNA, 824 bp, Homo sapiens
ttacaggcatgagtcaccgcgcccagcctcctgtctctctttctctctctccatttcgtctatttcttcatgacttcttctctctcttcccatgtcgttctctctgactccctccaggtctgtctctgtcctactctgcctgtctctctccttgttctctgtctctgtctgtaggtctctccctccctcacctccactctgattctctgtctccctctttctcgtcactgcgtctcttctctctgtgaccctcccacatccctgtgccattccccgccagccactctctctgtgtccccctcacattggggctgatgaggcctgcacagatgggctggggtggggccaggccccctgcccgctcctgacttggcctctcctcccctctccacagacccagcctccggctgtgacccccagcctcacacctgcctctggttcccgcctggtcctccagcttcaggaccccacctccaaaggcccctctgctcaatgcctacctccctagggccctgctgggacatgggggcctgagtgcccatccaagggctctcaaggacaccggcaaggcctccaggccctgagccccacttctgccttcacctctgcctgggacccgagctgggctcctgggccttggtccccagaagatggcggctagggcctcgccgccaggacagagaagggacggggtggctgggcagtcagggaaggagggtcgcccggatccgacattttggagagattccttcactctcctgtcccccctacctcccttctctaatttcttcttttttttaatgataaagtcttaaaaacacgga

SEQ ID NO: 51627 - DNA, 348 bp, Homo sapiens
cctctctatccccctctctctgccctcccccacccgcagtctctctcctctgttcctgggcttcctcctccatctcagccgcccgcacctcaccgtccccccttttttctgctctcctccgtccttcccttcgctctacttttgttccaagccgcccctgcctctccagggctaggagtgggacaggggtgggagaggtggtctcaccaggctgctggccccacggagcctgtctccctggggatgggaacggggatagaagacaggggaggaggcgcgcgcccgttttgggggttccgggtaggctgtgaggaccgcttttggtgagagtgccttgagcagcgggga

SEQ ID NO: 51628 - DNA, 232 bp, Homo sapiens
gcagattaaatctatatcaaaattctactatctactcacaggaaaagtataattttgaactacttttatataatattttgccaatattatagagaaaattaatttgtatatatttatgataggtatttaaattgcttgaaacatgtagaatactgcttagctgtatctagtgaagcaacacatatgcatatgctatatgttgtgaccttgggtagaagtttgaatcctgggt

SEQ ID NO: 51629 - DNA, 638 bp, Homo sapiens
accaatattgatatcacaatttttattctttgcttattaataagattttatttacacatgcgtattactatatgacattcttgtaaagtgaatttaggcatgctccatgccttcttttgttgctcaatagtgtcttctggttttggtcatctctatttgccatcatcttatcaattctatgatgatgtcaatgataataataatgacaatgataattaacctttgatgaatactgttttctatatatatatatatatatatatatatatatatatatatatatatatatacactcttgaggggcggtgtggtttaatagaaagtgaatagatttgctaataacaagatcttccttcgaattctggctctccttcctaccacctgatgattttgaccaagtcatgccttctctgcttcttagttttctcttctctaagataatgagattgagactgacactgagcgttgtttgggaatcacatgagaaaatgcatgtaagacacttagtagaacagctggtgctctgcgggtgctagtgtctttccttcctcaagaatatttgtcggataaagtatctagtatgatagttttgtgagtttcaaagaaacactatttgaagttgaaaacctcatgaaaat

SEQ ID NO: 51630 - DNA, 281 bp, Homo sapiens
ctgcttatagccttgagggtcctggcaagtcattaagcctctctgtgcctctggttcctcctctgtgacatagagataatattactagtccttttttacctcaggatcaaatggagagaaaatgacaacaacaaaatgaaagtgaaaacggtttgaatatcatgatctctgactcagcctccaaggcccaaacctcttacagggctgagaatacaggaggcccttggaaaatacttgctgatcaaatgagaagctccaagttggatttctgaaataatgag

SEQ ID NO: 51631 - DNA, 396 bp, Homo sapiens
ggctggggtcaggagctggctgagggcggctggcgagagaagagggccctggagagggccttaaggggcttagcgttagctctgagcctctggtctggggggttggcgacagcagcttgcaagaagggtggtgagagcagggctgggggctttgtttccggccgcgggtctgcggacactgcacaaaatggagggggaaagggggtgagcgcgcagctggcgtgggtcgagcggactgctattgggtggaggaggctggagagagcagcgtccccctccctgcggctcagccagcgccctcctctcgtgccgtaaaggtcaagtcctccgcgccacggccgcctctatggtcagggccgatcgctgccgccgcctcaagaaggcacaggacgcaca

SEQ ID NO: 51632 - DNA, 2178 bp, Homo sapiens
taggcggggtcacgcggaaggccgggcagcgcagggcgaaaggaggctgtgtcctcagcctcctccctcggcacgcgcctcccatcctgacggggactgagagcccaggagagctcggggcgtgtccaaactgccgcgccgccctgctccgggtttgtcttcctccctccgtttctccttccgctgtatctagcatttcggttcctggaaaggttaccggagctgcgattggggctgggaccaaagttgagtcctggaaagggagcctggagagcggcggtgctgggaggcccggccagctcgatcgcaggcttccacctggcggccaatgcttgtttgctactgatgggtgtgagcaagttagatattctataccggagacttctcctaacaaaactttttatcagaggatggggaaggccagaagatctcaaaagactctttgaattcagaaagatgattggaaatcgggaaagatgccagaatctggtttcaagcgattatccagtacacattgataagattgaagagcaatcagattgtaagatcctagatggacactttgtttcccccatggctcactatgtgcctgatatcatgccaattgaatctgttattgcaaggttccaatttattgtgcctaaagaatggaacagcaaatatagacctgtatgcattcatcttgctggaacaggagatcatcattactggaggcgacgaacactaatggcccgtcctatgattaaagaagcccgaatggcttctttattgttagaaaacccttattatggctgcaggaaacccaaggaccaagtatggcttccttagcggtatccaactggcctaagcccatgccattgattccatgcctgtcttggtccacagcatctggggtcttcactacgggtgtgttgagtaaatcaattaattggagggagctggaaaagcaatattatacccagacagtttatgaagaagaaattattcacatgcttgaatactgtggaacagattctttcaaaatgggacaagagtttgtgaaacacttcactagcagtgcagacaagctaactaaccttaatctggtttccagaactttaaatttagatatatcaaaccaagttgtatcccaaaaacctgctgactgccataattctagcaaaacatctgtcagtgcgacatcagaaggactcttattgcaagatacctctaagatgaagcgcttcaatcaaacactttcaaccaacaaaagtggttatacaagtcgcaaccctcagtcataccacctacttagtaaagaacaaagcagaaacagtcttcggaaagagtctttaatatttatgaaaggagtcatggatgaatgtactcatgtagcaaatttctcagtcccagttgatccaagcctcattatagtggttcaagccaaagaagatgcctatattccacgaacaggagttcgaagtttacaagaaatttggcctggttgtgaaatccgatacttagaagggggtcatattagtgcttatctttttaaacaaggactcttcaggtaagacggctggtctaaacatgtattcgttcatttgttgtttgttttctggattttttgcttcaacaaatgtaaaagatcacatatttttatagtctgtttcaatctttgaattccctcctcacctcccacaaatctcacagagttacttttccctctttcctagaatttgatcttcttattttcttctagagaactaagcatgatgcatattataggcatgctttatcgtgtggctttcccctcttcaaatattaatggccaggtattttaggatgtgagaaggaagatcatggcttgttaaagttgctttggtgcatcaagagttttttcactctattctgatgttttttcagaatggcctgaacatctgtggaataatttagcaatgtttttcagttagcaagtgaatattgaaccttaaataagaagtgcttttaatgtgaacaaccttatatgactccactattttagttagaacttataaaaacttttatgctggctgggcgcggtggcttacgcctgtaatcccagcactttgggaggcggaggcgggtgtatcacgaggtcaggagatcaaggccatcctggctaacacggtgaaaccccgtctctagtaaaaatacaaa

SEQ ID NO: 51633 - DNA, 1412 bp, Homo sapiens
acacccattctggggagggtaactgcctatttcatagctatttagagaggatgtcaagttgcaagccacagataaatttggaaataacttacagtaaaggcattgtttgtcccccctttttgttagttacttagagtttttctttcatatttaattttagacaagccatctatgatgcatttgaccgcttcctccataaatacgctaactagttggattattatatgtaaccagtgtggccatgatgtttcttacaaaagggagcttcatcctgtgatcatgtgaaggacaagcagacagcactaatatatctaatcgctatcaatttggtctggaattcattgttacacatcagttaactataaacttcgaatacatttgaataatttcaagataatatttgaagtaaataatgttaaagtgtttttactattgtttattggaatcccatatattcagtgtttagtctgttgttactgtttatgaaaaactaaatttttaatcatgaataatttattaaattaaataaatttattcatagaaacttttctgggttttagtaaaattgctaaatcaaaccaagattttaatatatcagcatttactttgtacccttataacatttcactcttgacttgatttgagaaacatgtttattttttgaatgttcttgtgttcaactaattttctgctgtggaaataaatacttatgatatataaaatcagtgttaactttgaattctaaaatatcctgatagcttcatagataagtgcttttctttttcttttttttttcttttaacatgtacctctacttgaatgtaagtgcttttaataatcaaagtgagtggcagggtgcggtggctcacgcctgtaatcccagcactgggatgctgaagcgggcagattacctgaggttgggagttcaagaccagcctgaccaatatggagaaaccccctctctactacaaatacaaaaaattagccaagcatggtggcgcatgcctataatcccagatactcaggaggcagaggcaggagaatcgcttgaacccgggaggcagaggttgcggtgatccgagatcacaccattgcactccagcctgggcaacaagagtgaaactccgtctcaaaataataataataaccaaaatgagtgttctgcagataaaatgcattagactttgctagactaaaactttactaaagattagggtttttaaaaaatgccaataggccgggtgcagtggctcatgcctgtaatcccagcactttgggacgctcaggcgggcggatcacaaggtcaggagtttaagaccagcctggccaacatggtgaaaccccatgtctactaaaagtacaaaaaaattagccgggcattgtggcgtgtgcctgtaatcccagctactcag

SEQ ID NO: 51634 - DNA, 902 bp, Homo sapiens
ataaatgtagagttaaaacaacaatgatcaaatattttaaaaaaaacagtactggtgaggctgctttgaaatgggcactcttgttactaatgactgaaaattagttcaaccgtttgagaaaacatattttaccatatgtatcaggagctttgaaacatcatatcccttgacaaaatgattttgattctgggaaatttattctaaggataaaaactaagaaaaaattaaataacaaaaacatgtttgtatagctttagtaaacatgtcagtaaagcattagaaatagctaaatgtctaaaatagaaatagttatgtaaactgtgattcataatattggaattttatgcaattggttgtatcccatttatttctctacctgtgttatatttatttctctaccacttaccacttttgtgaccttggacatgttacataacctttagtacctcaattttctcattgataaatgggaataatctcttaggttattgagattattaaatgattaatactgtctagaacagtgcctgataaataataagcattcagtaagttttaactgttattattaaaaagtttacaataatgtatgaccagtatttctgatgtgaatgtaggatataggccaggtgcagtggctcacgcctgtgatcccaggactttgggaggccgaggtgggcagatgatctgaggtcaggagttcgagaccagcctggccaacatggtgaaaccctgtctctgctaaaaatataaaattagcctggcatgctggcatatgcctataatcccaactactcaggaggctgaggcaggagaatcacttgaacccaggagacaggttgcagtgagccaagatcacaccatggcattccagcctgggcaaaaagagtgaaactgtgtca

SEQ ID NO: 51635 - DNA, 783 bp, Homo sapiens
acaaagctgttaataccctattttatattaaataatgttttctttcctttcatatgttcagacagattctttcaaaatgggacaagagtttgtgaaacacttcactagcagtgcagacaagctaactaaccttaatctggtttccagaactttaaatttagatatatcaaaccaagttgtatcccaaaaacctgctgactgccataattctagcaaaacatctgtcagtgcgacatcagaaggactcttattgcaagatacctctaagatgaagcgcttcaatcaaacactttcaaccaacaaaagtggttatacaagtcgcaaccctcagtcataccacctacttagtaaagaacaaagcagaaacagtcttcggaaagagtctttaatatttatgaaaggagtcatggatgaatgtactcatgtagcaaatttctcaggtactaatttttatatgaaattgagaatatttgctgatgtgtaagtatttgtgaaatattttaaaagatgctctataagataattttatattttcaagggtatatttttttgttggctccagaatatgtttgcaaagataagttggttacttaaatgtatcatattctatctatgaaaatttaagattatcttattcattaagaaacacactggacagccgggtgtggttgctcatgcctgtaatcccagcattttgggaggctgaggcaggtggattgcttgagcccaggagttcaagaccagcctgggtaacatggtaaaaccctgtctctaccaaaaaaa

SEQ ID NO: 51636 - DNA, 2879 bp, Homo sapiens
  misc_feature (529)..(529): n is a, c, g, or t
taggcggggtcacgcggaaggccgggcagcgcagggcgaaaggaggctgtgtcctcagcctcctccctcggcacgcgcctcccatcctgacggggactgagagcccaggagagctcggggcgtgtccaaactgccgcgccgccctgctccgggtttgtcttcctccctccgtttctccttccgctgtatctagcatttcggttcctggaaaggttaccggagctgcgattggggctgggaccaaagttgagtcctggaaagggagcctggagagcggcggtgctgggaggcccggccagctcgatcgcaggcttccacctggcggccaatgcttgtttgctactgatgggtgtgagcaagttagatattctataccggagacttctcctaacaaaactttttatcagaggatggggaaggccagaagatctcaaaagactctttgaattcagaaagatgattggaaatcgggaaagatgccagaatctggtttcaagcgattatccagtacacattgataagattatgntgaaatgcttgataccaacttgattcttctaccttgttccaatttattgtgcctaaagaatggaacagcaaatatagacctgtatgcattcatcttgctggaacaggagatcatcattactggaggcgacgaacactaatggcccgtcctatgattaaagaagcccgaatggcttctttattgttagaaaacccttattatggtgcggaaacccaggacaagtagaaggtccagcttaaaaaatgtgtccgacctttttgtgatgggaggagctcttgttttagaatctgcagctctcttgcactggctagagagggaaggttacggccctttaggaatgactggaatatccatgggaggacacatggcttccttagcggtatccaactggcctaagcccatgccattgattccatgcctgtcttggtccacagcatctggggtcttcactacgggtgtgttgagtaaatcaattaattggagggagctggaaaagcaatattatacccagacagtttatgaagaagaaattattcacatgcttgaatactgtggaacagattctttcaaaatgggacaagagtttgtgaaacacttcactagcagtgcagacaagctaactaaccttaatctggtttccagaactttaaatttagatatatcaaaccaagttgtatcccaaaaacctgctgactgccataattctagcaaaacatctgtcagtgcgacatcagaaggactcttattgcaagatacctctaagatgaagcgcttcaatcaaacactttcaaccaacaaaagtggttatacaagtcgcaaccctcagtcataccacctacttagtaaagaacaaagcagaaacagtcttcggaaagagtctttaatatttatgaaaggagtcatggatgaatgtactcatgtagcaaatttctcagtcccagttgatccaagcctcattatagtggttcaagccaaagaagatgcctatattccacgaacaggagttcgaagtttacaagaaatttggcctggttgtgaaatccgatacttagaagggggtcatattagtgcttatctttttaaacaaggactcttcagacaagccatctatgatgcatttgaccgcttcctccataaatacgctaactagttggattattatatgtaaccagtgtggccatgatgtttcttacaaaagggagcttcatcctgtgatcatgtgaaggacaagcagacagcactaatatatctaatcgctatcaatttggtctggaattcattgttacacatcagttaactataaacttcgaatacatttgaataatttcaagataatatttgaagtaaataatgttaaagtgtttttactattgtttattggaatcccatatattcagtgtttagtctgttgttactgtttatgaaaaactaaatttttaatcatgaataatttattaaattaaataaatttattcatagaaacttttctgggttttagtaaaattgctaaatcaaaccaagattttaatatatcagcatttactttgtacccttataacatttcactcttgacttgatttgagaaacatgtttattttttgaatgttcttgtgttcaactaattttctgctgtggaaataaatacttatgatatataaaatcagtgttaactttgaattctaaaatatcctgatagcttcatagataagtgcttttctttttcttttttttttcttttaacatgtacctctacttgaatgtaagtgcttttaataatcaaagtgagtggcagggtgcggtggctcacgcctgtaatcccagcactgggatgctgaagcgggcagattacctgaggttgggagttcaagaccagcctgaccaatatggagaaaccccctctctactacaaatacaaaaaattagccaagcatggtggcgcatgcctataatcccagatactcaggaggcagaggcaggagaatcgcttgaacccgggaggcagaggttgcggtgatccgagatcacaccattgcactccagcctgggcaacaagagtgaaactccgtctcaaaataataataataaccaaaatgagtgttctgcagataaaatgcattagactttgctagactaaaactttactaaagattagggtttttaaaaaatgccaataggccgggtgcagtggctcatgcctgtaatcccagcactttgggacgctcaggcgggcggatcacaaggtcaggagtttaagaccagcctggccaacatggtgaaaccccatgtctactaaaagtacaaaaaaattagccgggcattgtggcgtgtgcctgtaatcccagctactcag

SEQ ID NO: 51637 - DNA, 1930 bp, Homo sapiens
  misc_feature (1912)..(1913): n is a, c, g, or t
taggcggggtcacgcggaaggccgggcagcgcagggcgaaaggaggctgtgtcctcagcctcctccctcggcacgcgcctcccatcctgacggggactgagagcccaggagagctcggggcgtgtccaaactgccgcgccgccctgctccgggtttgtcttcctccctccgtttctccttccgctgtatctagcatttcggttcctggaaaggttaccggagctgcgattggggctgggaccaaagttgagtcctggaaagggagcctggagagcggcggtgctgggaggcccggccagctcgatcgcaggcttccacctggcggccaatgcttgtttgctactgatgggtgtgagcaagttagatattctataccggagacttctcctaacaaaactttttatcagaggatggggaaggccagaagatctcaaaagactctttgaattcagaaagatgattggaaatcgggaaagatgccagaatctggtttcaagcgattatccagtacacattgataaggttccaatttattgtgcctaaagaatggaacagcaaatatagacctgtatgcattcatcttgctggaacaggagatcatcattactggaggcgacgaacactaatggcccgtcctatgattaaagaagcccgaatggcttctttattgttagaaaacccttattatggctgcaggaaacccaaggaccaagtaaggtccagcttaaaaaatgtgtccgacctttttgtgatgggaggagctcttgttttagaatctgcagctctcttgcactggctagagagggaaggttacggccctttaggaatgactggaatatccatgggaggacacatggcttccttagcggtatccaactggcctaagcccatgccattgattccatgcctgtcttggtccacagcatctggggtcttcactacgggtgtgttgagtaaatcaattaattggagggagctggaaaagcaatattatacccagacagtttatgaagaagaaattattcacatgcttgaatactgtggaacagattctttcaaaatgggacaagagtttgtgaaacacttcactagcagtgcagacaagctaactaaccttaatctggtttccagaactttaaatttagatatatcaaaccaagttgtatcccaaaaacctgctgactgccataattctagcaaaacatctgtcagtgcgacatcagaaggactcttattgcaagatacctctaagatgaagcgcttcaatcaaacactttcaaccaacaaaagtggttatacaagtcgcaaccctcagtcataccacctacttagtaaagaacaaagcagaaacagtcttcggaaagagtctttaatatttatgaaaggagtcatggatgaatgtactcatgtagcaaatttctcagtcccagttgatccaagcctcattatagtggttcaagccaaagaagatgcctatattccacgaacaggagttcgaagtttacaagaaatttggcctggttgtgaaatccgatacttagaagggggtcatattagtgcttatctttttaaacaaggactcttcagacaagccatctatgatgcatttgaccgcttcctccataaatacgctaactagttggattattatatgtaaccagtgtggccatgatgtttcttacaaaagggagcttcatcctgtgatcatgtgaaggacaagcagacagcactaatatatctaatcgctatcaatttggtctggaattcattgttacacatcagttaactataaacttcgaatacatttgaataatttcaagataatatttgaagtaaataatgttaaagtgtttttactattgtttattggaatcccatatattcagtgtttagtctgttgtacatattacgnnggatccgcaggcaccca

SEQ ID NO: 51638 - DNA, 1514 bp, Homo sapiens
tttttatatatcataagtatttatttccacagcagaaaattagttgaagacaagaatattcaaaaaataaacatgtttataaaataaagtaaagaatgaaatgttataagggtacaaagtaaatgctgatatattaatagggtggttggatttagcaattttgcaagccacagataaatttggaaataacttacagtaaaggcattgtttgtcccccctttttgttagttacttagagtttttctttcatatttaattttagacaagccatctatgatgcatttgaccgcttcctccataaatacgctaactagttggattattatatgtaaccagtgtggccatgatgtttcttacaaaagggagcttcatcctgtgatcatgtgaaggacaagcagacagcactaatatatctaatcgctatcaatttggtctggaattcattgttacacatcagttaactataaacttcgaatacatttgaataatttcaagataatatttgaagtaaataatgttaaagtgtttttactattgtttattggaatcccatatattcagtgtttagtctgttgttactgtttatgaaaaactaaatttttaatcatgaataatttattaaattaaataaatttattcatagaaacttttctgggttttagtaaaattgctaaatcaaaccaagattttaatatatcagcatttactttgtacccttataacatttcactcttgacttgatttgagaaacatgtttattttttgaatgttcttgtgttcaactaattttctgctgtggaaataaatacttatgatatataaaatcagtgttaactttgaattctaaaatatcctgatagcttcatagataagtgcttttctttttcttttttttttcttttaacatgtacctctacttgaatgtaagtgcttttaataatcaaagtgagtggcagggtgcggtggctcacgcctgtaatcccagcactgggatgctgaagcgggcagattacctgaggttgggagttcaagaccagcctgaccaatatggagaaaccccctctctactacaaatacaaaaaattagccaagcatggtggcgcatgcctataatcccagatactcaggaggcagaggcaggagaatcgcttgaacccgggaggcagaggttgcggtgatccgagatcacaccattgcactccagcctgggcaacaagagtgaaactccgtctcaaaataataataataaccaaaatgagtgttctgcagataaaatgcattagactttgctagactaaaactttactaaagattagggtttttaaaaaatgccaataggccgggtgcagtggctcatgcctgtaatcccagcactttgggacgctcaggcgggcggatcacaaggtcaggagtttaagaccagcctggccaacatggtgaaaccccatgtctactaaaagtacaaaaaaattagccgggcattgtggcgtgtgcctgtaatcccagctactcag

SEQ ID NO: 51639 - DNA, 1767 bp, Homo sapiens
taggcggggtcacgcggaaggccgggcagcgcagggcgaaaggaggctgtgtcctcagcctcctccctcggcacgcgcctcccatcctgacggggactgagagcccaggagagctcggggcgtgtccaaactgccgcgccgccctgctccgggtttgtcttcctccctccgtttctccttccgctgtatctagcatttcggttcctggaaaggttaccggagctgcgattggggctgggaccaaagttgagtcctggaaagggagcctggagagcggcggtgctgggaggcccggccagctcgatcgcaggcttccacctggcggccaatgcttgtttgctactgatgggtgtgagcaagttagatattctataccggagacttctcctaacaaaactttttatcagaggatggggaaggccagaagatctcaaaagactctttgaattcagaaagatgattggaaatcgggaaagatgccagaatctggtttcaagcgattatccagtacacattgataaggttccaatttattgtgcctaaagaatggaacagcaaatatagacctgtatgcattcatcttgctggaacaggagatcatcattactggaggcgacgaacactaatggcccgtcctatgattaaagaagcccgaatggcttctttattgttagaaaacccttattatggctgcaggaaacccaaggaccaagtaaggtccagcttaaaaaatgtgtccgacctttttgtgatgggaggagctcttgttttagaatctgcagctctcttgcactggctagagagggaaggttacggccctttaggaatgactggaatatccatgggaggacacatggcttccttagcggtatccaactggcctaagcccatgccattgattccatgcctgtcttggtccacagcatctggggtcttcactacgggtgtgttgagtaaatcaattaattggagggagctggaaaagcaatattatacccagacagtttatgaagaagaaattattcacatgcttgaatactgtggaacagattctttcaaaatgggacaagagtttgtgaaacacttcactagcagtgcagacaagctaactaaccttaatctggtttccagaactttaaatttagatatatcaaaccaagttgtatcccaaaaacctgctgactgccataattctagcaaaacatctgtcagtgcgacatcagaaggactcttattgcaagatacctctaagatgaagcgcttcaatcaaacactttcaaccaacaaaagtggttatacaagtcgcaaccctcagtcataccacctacttagtaaagaacaaagcagaaacagtcttcggaaagagtctttaatatttatgaaaggagtcatggatgaatgtactcatgtagcaaatttctcaggtactaatttttatatgaaattgagaatatttgctgatgtgtaagtatttgtgaaatattttaaaagatgctctataagataattttatattttcaagggtatatttttttgttggctccagaatatgtttgcaaagataagttggttacttaaatgtatcatattctatctatgaaaatttaagattatcttattcattaagaaacacactggacagccgggtgtggttgctcatgcctgtaatcccagcattttgggaggctgaggcaggtggattgcttgagcccaggagttcaagaccagcctgggtaacatggtaaaaccctgtctctaccaaaaaaa

SEQ ID NO: 51640 - DNA, 380 bp, Homo sapiens
taaaaattaacataaggattgtacttctattgtgcagtaaagaaattgtacttccatttcttgggagacttatgctagattttaatattagtaagtcaaatgtttgctattaaggaaacaatcatgttttaaatgcatttacagtatcagttgaggtttagacagttcttaacttaattttcaagatgacgtcagactattcacagaagaagaaatgaaactggtgcacagatataaagaaatgttcaacgttgctggtaataaatgtagagttaaaacaacaatgatcaaatattttaaaaaaaacagtactggtgaggctgctttgaaatgggcactcttgttactaatgactgaaaattagttcaaccgtttgagaa

SEQ ID NO: 51641 - DNA, 234 bp, Homo sapiens
tgcatatattagcatgtaaatacataaaataatcattttctattttgttttgtgaggctagaaggtccagcttaaaaaatgtgtccgacctttttgtgatgggaggagctcttgttttagaatctgcagctctcttgcactggctagagagggaaggttacggccctttaggaatgactggaatatccatgggaggacacgtaagcctttttatttctgcttacatttaattat

SEQ ID NO: 51642 - DNA, 754 bp, Homo sapiens
taggcggggtcacgcggaaggccgggcagcgcagggcgaaaggaggctgtgtcctcagcctcctccctcggcacgcgcctcccatcctgacggggactgagagcccaggagagctcggggcgtgtccaaactgccgcgccgccctgctccgggtttgtcttcctccctccgtttctccttccgctgtatctagcatttcggttcctggaaaggttaccggagctgcgattggggctgggaccaaagttgagtcctggaaagggagcctggagagcggcggtgctgggaggcccggccagctcgatcgcaggcttccacctggcggccaatgcttgtttgctactgatgggtgtgagcaagttagatattctataccggagacttctcctaacaaaactttttatcagaggatggggaaggccagaagatctcaaaagactctttgaattcagaaagatgattggaaatcgggaaagatgccagaatctggtttcaagcgattatccagtacacattgataaggttccaatttattgtgcctaaagaatggaacagcaaatatagacctgtatgcattcatcttgctggaacaggagatcatcattactggaggcgacgaacactaatggcccgtcctatgattaaagaagcccgaatggcttctttattgttagaaaacccttattatatgacgtcagactattcacagaagaagaaatgaaactggtgcacagatataaagaaatgttcaacg

SEQ ID NO: 51643 - DNA, 2839 bp, Homo sapiens
taggcggggtcacgcggaaggccgggcagcgcagggcgaaaggaggctgtgtcctcagcctcctccctcggcacgcgcctcccatcctgacggggactgagagcccaggagagctcggggcgtgtccaaactgccgcgccgccctgctccgggtttgtcttcctccctccgtttctccttccgctgtatctagcatttcggttcctggaaaggttaccggagctgcgattggggctgggaccaaagttgagtcctggaaagggagcctggagagcggcggtgctgggaggcccggccagctcgatcgcaggcttccacctggcggccaatgcttgtttgctactgatgggtgtgagcaagttagatattctataccggagacttctcctaacaaaactttttatcagaggatggggaaggccagaagatctcaaaagactctttgaattcagaaagatgattggaaatcgggaaagatgccagaatctggtttcaagcgattatccagtacacattgataaggttccaatttattgtgcctaaagaatggaacagcaaatatagacctgtatgcattcatcttgctggaacaggagatcatcattactggaggcgacgaacactaatggcccgtcctatgattaaagaagcccgaatggcttctttattgttagaaaacccttattatggctgcaggaaacccaaggaccaagtaaggtccagcttaaaaaatgtgtccgacctttttgtgatgggaggagctcttgttttagaatctgcagctctcttgcactggctagagagggaaggttacggccctttaggaatgactggaatatccatgggaggacacatggcttccttagcggtatccaactggcctaagcccatgccattgattccatgcctgtcttggtccacagcatctggggtcttcactacgggtgtgttgagtaaatcaattaattggagggagctggaaaagcaatattatacccagacagtttatgaagaagaaattattcacatgcttgaatactgtggaacagattctttcaaaatgggacaagagtttgtgaaacacttcactagcagtgcagacaagctaactaaccttaatctggtttccagaactttaaatttagatatatcaaaccaagttgtatcccaaaaacctgctgactgccataattctagcaaaacatctgtcagtgcgacatcagaaggactcttattgcaagatacctctaagatgaagcgcttcaatcaaacactttcaaccaacaaaagtggttatacaagtcgcaaccctcagtcataccacctacttagtaaagaacaaagcagaaacagtcttcggaaagagtctttaatatttatgaaaggagtcatggatgaatgtactcatgtagcaaatttctcagtcccagttgatccaagcctcattatagtggttcaagccaaagaagatgcctatattccacgaacaggagttcgaagtttacaagaaatttggcctggttgtgaaatccgatacttagaagggggtcatattagtgcttatctttttaaacaaggactcttcagacaagccatctatgatgcatttgaccgcttcctccataaatacgctaactagttggattattatatgtaaccagtgtggccatgatgtttcttacaaaagggagcttcatcctgtgatcatgtgaaggacaagcagacagcactaatatatctaatcgctatcaatttggtctggaattcattgttacacatcagttaactataaacttcgaatacatttgaataatttcaagataatatttgaagtaaataatgttaaagtgtttttactattgtttattggaatcccatatattcagtgtttagtctgttgttactgtttatgaaaaactaaatttttaatcatgaataatttattaaattaaataaatttattcatagaaacttttctgggttttagtaaaattgctaaatcaaaccaagattttaatatatcagcatttactttgtacccttataacatttcactcttgacttgatttgagaaacatgtttattttttgaatgttcttgtgttcaactaattttctgctgtggaaataaatacttatgatatataaaatcagtgttaactttgaattctaaaatatcctgatagcttcatagataagtgcttttctttttcttttttttttcttttaacatgtacctctacttgaatgtaagtgcttttaataatcaaagtgagtggcagggtgcggtggctcacgcctgtaatcccagcactgggatgctgaagcgggcagattacctgaggttgggagttcaagaccagcctgaccaatatggagaaaccccctctctactacaaatacaaaaaattagccaagcatggtggcgcatgcctataatcccagatactcaggaggcagaggcaggagaatcgcttgaacccgggaggcagaggttgcggtgatccgagatcacaccattgcactccagcctgggcaacaagagtgaaactccgtctcaaaataataataataaccaaaatgagtgttctgcagataaaatgcattagactttgctagactaaaactttactaaagattagggtttttaaaaaatgccaataggccgggtgcagtggctcatgcctgtaatcccagcactttgggacgctcaggcgggcggatcacaaggtcaggagtttaagaccagcctggccaacatggtgaaaccccatgtctactaaaagtacaaaaaaattagccgggcattgtggcgtgtgcctgtaatcccagctactcag

SEQ ID NO: 51644 - DNA, 2152 bp, Homo sapiens
taggcggggtcacgcggaaggccgggcagcgcagggcgaaaggaggctgtgtcctcagcctcctccctcggcacgcgcctcccatcctgacggggactgagagcccaggagagctcggggcgtgtccaaactgccgcgccgccctgctccgggtttgtcttcctccctccgtttctccttccgctgtatctagcatttcggttcctggaaaggttaccggagctgcgattggggctgggaccaaagttgagtcctggaaagggagcctggagagcggcggtgctgggaggcccggccagctcgatcgcaggcttccacctggcggccaatgcttgtttgctactgatgggtgtgagcaagttagatattctataccggagacttctcctaacaaaactttttatcagaggatggggaaggccagaagatctcaaaagactctttgaattcagaaagatgattggaaatcgggaaagatgccagaatctggtttcaagcgattatccagtacacattgataaggttccaatttattgtgcctaaagaatggaacagcaaatatagacctgtatgcattcatcttgctggaacaggagatcatcattactggaggcgacgaacactaatggcccgtcctatgattaaagaagcccgaatggcttctttattgttagaaaacccttattatggctgcaggaaacccaaggaccaagtaaggtccagcttaaaaaatgtgtccgacctttttgtgatgggaggagctcttgttttagaatctgcagctctcttgcactggctagagagggaaggttacggccctttaggaatgactggaatatccatgggaggacacatggcttccttagcggtatccaactggcctaagcccatgccattgattccatgcctgtcttggtccacagcatctggggtcttcactacgggtgtgttgagtaaatcaattaattggagggagctggaaaagcaatattatacccagacagtttatgaagaagaaattattcacatgcttgaatactgtggaacagattctttcaaaatgggacaagagtttgtgaaacacttcactagcagtgcagacaagctaactaaccttaatctggtttccagaactttaaatttagatatatcaaaccaagttgtatcccaaaaacctgctgactgccataattctagcaaaacatctgtcagtgcgacatcagaaggactcttattgcaagatacctctaagatgaagcgcttcaatcaaacactttcaaccaacaaaagtggttatacaagtcgcaaccctcagtcataccacctacttagtaaagaacaaagcagaaacagtcttcggaaagagtctttaatatttatgaaaggagtcatggatgaatgtactcatgtagcaaatttctcagtcccagttgatccaagcctcattatagtggttcaagccaaagaagatgcctatattccacgaacaggagttcgaagtttacaagaaatttggcctggttgtgaaatccgatacttagaagggggtcatattagtgcttatctttttaaacaaggactcttcaggtaagacggctggtctaaacatgtattcgttcatttgttgtttgttttctggattttttgcttcaacaaatgtaaaagatcacatatttttatagtctgtttcaatctttgaattccctcctcacctcccacaaatctcacagagttacttttccctctttcctagaatttgatcttcttattttcttctagagaactaagcatgatgcatattataggcatgctttatcgtgtggctttcccctcttcaaatattaatggccaggtattttaggatgtgagaaggaagatcatggcttgttaaagttgctttggtgcatcaagagttttttcactctattctgatgttttttcagaatggcctgaacatctgtggaataatttagcaatgtttttcagttagcaagtgaatattgaaccttaaataagaagtgcttttaatgtgaacaaccttatatgactccaccgcgcctggcctagacatgcattttcttaagcctggagggatatgggttacagtagatgtgagtgatgggattatgatggtttcccttcctatgtttgg

SEQ ID NO: 51645 - DNA, 1315 bp, Homo sapiens
taggcggggtcacgcggaaggccgggcagcgcagggcgaaaggaggctgtgtcctcagcctcctccctcggcacgcgcctcccatcctgacggggactgagagcccaggagagctcggggcgtgtccaaactgccgcgccgccctgctccgggtttgtcttcctccctccgtttctccttccgctgtatctagcatttcggttcctggaaaggttaccggagctgcgattggggctgggaccaaagttgagtcctggaaagggagcctggagagcggcggtgctgggaggcccggccagctcgatcgcaggcttccacctggcggccaatgcttgtttgctactgatgggtgtgagcaagttagatattctataccggagacttctcctaacaaaactttttatcagaggatggggaaggccagaagatctcaaaagactctttgaattcagaaagatgattggaaatcgggaaagatgccagaatctggtttcaagcgattatccagtacacattgataagattgaagagcaatcagattgtaagatcctagatggacactttgtttcccccatggctcactatgtgcctgatatcatgccaattgaatctgttattgcaaggttccaatttattgtgcctaaagaatggaacagcaaatatagacctgtatgcattcatcttgctggaacaggagatcatcattactggaggcgacgaacactaatggcccgtcctatgattaaagaagcccgaatggcttctttattgttagaaaacccttattatggctgcaggaaacccaaggaccaagtggtttctccatgttggtcaggctggtctcgaactcccgacctcaggtgatcctcccgcctcggccccccaaagtgctgggattacaggcagcatccaccgcgcccagctgaagaatttccactttggaaccaagcccagaattcagaataaggtccagcttaaaaaatgtgtccgacctttttgtgatgggaggagctcttgttttagaatctgcagctctcttgcactggctagagagggaaggttacggccctttaggaatgactggaatatccatgggaggacacatggcttccttagcggtatccaactggcctaagcccatgccattgattccatgcctgtcttggtccacagcatctggggtcttcactacgggtgtgttgagtaaatcaattaattggagggagctggaaaagcaatattatacccagacagtttatgaagaagaaattattcacatgcttgaatactgtggagtaagtatttcactttccac

SEQ ID NO: 51646 - DNA, 225 bp, Homo sapiens
tttccaggaagttcattcacttcccttgttaagaaatcacatagatagttcttctttctaaggatctgagaagtgatctatttctgttgagatacagttgttcatacaattgtgacaggtctctagatggaagttaagtctgcaatgaattgataattgacttcactagagggaaataggcttttgcaaccttttgtaaaactgtttaaatttagaatggtatgt

SEQ ID NO: 51647 - DNA, 328 bp, Homo sapiens
ccctggggggtcccttgggcatctcagcctggtgaggcactttcctccctccaagtgctggcacgtgaccaagagagggtggcatcaggaagcacctgtgcctgtgtctgtgtgaatcagatctgcctgtcgccgtgagctttgtgtctgcctggattggtgcgggggtgtgtgtgtttgtgtaccggcgtgtgattgttttggtttgctgtgatgagtgtgggtgtatttctgtgggggccatgagtgctctgtgggggtgtctgctgtgggggtgggtctgggtccccacatgcccgcggagctgtgtgtaggtgtctgtgtgctc

SEQ ID NO: 51648 - DNA, 227 bp, Homo sapiens
aagctaggcaagatggggttgcagtaaaatttttttctttctcctccatccaaactgtttttccctgggactttttcccaagcgacatgtcagctgtaaaaacacgaatcttccctctcctggtgccctgtgcccccccaccacctcccaaaacatatgctatttatcaaatctaagaataaaaagaatgcaatttcaagaaagcttttaaagatttcaatttcctt

SEQ ID NO: 51649 - DNA, 262 bp, Homo sapiens
ctgaaaatcaattcactgtaagtgtaagagtttatgcctgcattctcctttctgttccatcaatctatatgtttctccttaaacaccagtaccacccagtcttgattactatatgtttatagtaagttttgaaattactatagttttatagtgagttcttcactcttcttttttctttggaggcaggatctcactctgttattcaggctgagttcagtggcgtgaacatggcttactgcagcctcaacctccgggactcaag

SEQ ID NO: 51650 - DNA, 385 bp, Homo sapiens
gagattctcctgcctcagcctccctagtagctgggattacaagcatgcaccaccacacctggttaatttttgtatttttagtagagacagggtttcaccatgttggccaagctggactcaaactcctcacctcaaatgatccgcccaccttggcttcccaaagggttgggattagaggtgtgagccactgcacctggccaggattggaattattgggtatttggccccaaatgggaccctagctggacccgggagagaaaccagggacctggatgtctagggatgcagaccagagtgcttcgtggccagaccctggggaaagggggaggggaccaagaggaagggcagcagacccacgtggcctcgctccaactctgcagatgac

SEQ ID NO: 51651 - DNA, 336 bp, Homo sapiens
ctgcacccagacctcttgtagactttaaataatctctagttataataccgtatacaatgtaaatactatgtagaattgtgatattgtagttttaaaaatctattttttgttttattgtttattatttttttagacagggtattactgttactcaggctggagtatagtggcatgatcactccagcctcaacttcctctgctcaagagatcctcccatctcagtctcttgagtagctggaacttacagggatgtgccaccatgcctggctaattttaagaaaaattttttgtggagatggggtcttactatgttgctgtggtcagtcttggactcct

SEQ ID NO: 51652 - DNA, 388 bp, Homo sapiens
tctagtcttggccgcagaagcgagatgatgaagggaacgtcatcatttggaaagcattgcaataagacgtacacgttatgccaccactgtggctctaaggcctaccaccttcagaagtcgacctatggcaaatgtggctacactgccaagcgcaagagaaagtataactggagtaccaaggctaaaagacgaaataccaccagaactggtcaaatgaggcacctaaaaattgtataccgcagattcaggcatggattccgtgaaggaacaacacctaaacccaagagggcagctgttgcagcatccagttcatcttaagaatgtcaacgattagtcatgcaataaatgttctggttttaaaaaatacaaaataaataaataaataaat

SEQ ID NO: 51653 - DNA, 545 bp, Homo sapiens
  misc_feature (529)..(529): n is a, c, g, or t
acattgggaagccagaattacttgcaggagtaacctagtgcctatagctatggcaggtacctgcatccttgtttttgtttagtggatcctctatccttcagagactctggaacccctgtgctcttctcctcatctagtgaccctgaggtgatggagttttcaagtccttccagagaggaatgtcccaagccttcgggtagggtaagcatcatggctggcagctcacaggattgcttctacttcaggcagtgtcgtgggcatcagatgagtgccttcagccgctacaagagcagaagcagtgggcattggatggagctgagtacaggaccatacaggctaattgcaccggcacaggaatcggatataacatcatccgggtacccatgggccagctgtgacttcttccatccgcaccttacacctatggcagacacccctgatgattttccagtttgcacaatttcagcctcccagaggaagataccaagttcaaggtacccttgatttcaccgaggccttgcagtttggnccagggttcccttttc

SEQ ID NO: 51654 - DNA, 920 bp, Homo sapiens
acattgggaagccagaattacttgcaggagtaacctagtgcctatagctatggcaggtacctgcatccttgtttttgtttagtggatcctctatccttcagagactctggaacccctgtgctcttctcctcatctagtgaccctgaggtgatggagttttcaagtccttccagagaggaatgtcccaagccttcgggtagggtaagcatcatggctggcagctcacaggattgcttctacttcaggcagtgtcgtgggcatcagatgagtgagtcaaggcagtggggaggtagcacagagcctcccttctgcctcatagtcctttggtagccttccagtaagctggtggtagacttttagtaggtgctcaataaatccttttgagtgactgagaccaactttggggtgaggatttttgaaaccgtcttcagtctctccaaacagctgtgtccgttctccacatccttgtcagacctcacctctgcttgtgctccctccctcccaggtggtgcccctgcatccctaaaagcttcagtacagctcggtggtctgtgtctgcaatgccacatactgtgactcttgaccccccgacctttcctgccctaggtgccttcagccgctacaagagcagaagcagtgggcattggatggagctgagtacaggaccatacaggctaattgcaccggcacaggtaaccattacacccttcaccccccgggccaggctgggtcctcctagaggtaaacggtgtcagtgatcaccatggagtttctcccctgggcactgataaccctgtggatgtcctcaggcctgctactgatcctgcagccagaagttccagaaagtgaagggatttggaggggccgtgacagatgcaggtgccctcaacatccttgccctgtcaccccctgcccagaat

SEQ ID NO: 51655 - DNA, 536 bp, Homo sapiens
acattgggaagccagaattacttgcaggagtaacctagtgcctatagctatggcaggtacctgcatccttgtttttgtttagtggatcctctatccttcagagactctggaacccctgtgctcttctcctcatctagtgaccctgaggtgatggagttttcaagtccttccagagaggtgccttcagccgctacaagagcagaagcagtgggcattggatggagctgagtacaggaccatacaggctaattgcaccggcacaggaatcggatataacatcatccgggtacccatgggccagctgtgacttcttccatccgcaccttacacctatggcagacacccctgatgattttccagtttgcacaatttcagcctcccagaggaagataccaagttcaagatacccctgattcaccgagccctgcagttggcccagcgtcccgtttcactccttgccagcccctggacatcacccacttggctcaagaccaatggagcggtgaatgggaaggggtcactcaagggacagcccg

SEQ ID NO: 51656 - DNA, 269 bp, Homo sapiens
aaaaattgatgtgaagaggtcttacaaggcttgaaaaataattgcattaatagcagaaggaaaaaataaacttcacagacacggaaaaacaaaacaattttgaagtacttttctgttttcataacttttacaagagaagagatggaataagatgaggttggcaactgttgcattcagagccctattcattaatacaactagccaaatatgaacatcaaacagataaggcagggggaacccatgctacatttgtagagaggaaaaaaaaa

SEQ ID NO: 51657 - DNA, 270 bp, Homo sapiens
ggtaggagtaaacttaggggatggagggagaaattccaggcagaaagattggcatgccctgaggcttgtgtcatcgttagtattttgattgattttattaccttattggaacaggctgcctatatggatgtggggcttagaatgggccacactccctcgaacccacccaatttgagatttaactctgcgatttcccatcatgaactaagagtaatttgagactctgagacgcatgtccattttctattttagatgaacgtagcttggtgc

SEQ ID NO: 51658 - DNA, 221 bp, Homo sapiens
aaccttaggcccaatgatacttatagctgagtatatcaagttttaatttccatttgctcagccatcataaaacaataccaagtggaaaccatctgtaattacattttcaaacactaattcacagaaagttaagcagagagatctatacatcagtttagtctattatactttaagcagatccagagaccataaaacaactcaaaggtagccttctgcttcac

SEQ ID NO: 51659 - DNA, 350 bp, Homo sapiens
gaagatcttttctttgaggcttatttttccagctgttttgttccacttttcatttgggttgaacacgttagagaactgctgtcatgtgtacctgtcttgctgtcaccgggctccttgtgtcagtgggctgtggcttttaagggcctcactgctggtctagaagcccccattcctgctctcttccctccagcatcttcatccggttttttgttgcctctacaaagttggaaagggtctctcatttcctggttatttcttctgatgatcttggtgtgcctccttcctgtgcagcatcagcatggacttctaggcttgccagtctccctgcccttggctttctgtctaggtct

SEQ ID NO: 51660 - DNA, 943 bp, Homo sapiens
caattttgttgttggaagttcatagtgtcagacgccagcacacttgcaacgcacgaaaatgaggtagttcacgacgccgtgtttgtgctgcctcggccgccccagcctccggggccctcctggctggatgcagctcagccatcagcgtcaggctgtgttctgaaaaatcagaggacactgtgctttgctttcatctgagaagataataaataaatcaggaactcggaaaatttcaaagtcatgactgattgtactgcctgatacttgccatttctcttgggtttactgtacatgtgaccagtgccaccaggcagccacaatcttgtctgtgggtgagagagagagacagacccgcttacatgaaaatcagacctgcagaaggttatcctagttccttcctggcttgtactgacgtcatagtcctaggatgaattcaccaaggtttcgttagggggcggtcacagttttaaagtgggctttgtggaaaagttaaataaatcattttaatttaagaaacggcaggccctactttactgaaaagctgacaagtcttggtggcttttcaagtggcagagatttctaatattgtttgaccataagacaaaacaaggaactgtaacagttttcccattttccttaaactgaagtactatttataaaatactttacatttttttaaattttcaaattatagacaaacctccctaatacaaaatactaaaagtgcaatagtataaattaagagtttgcaaccacattatacaaacattacctttttattgtacagctttgataatgtgaaatattttctcacaactgtttataatgttgtgagtcatttacggtgatgtttgtctgtaactcgttccccagttattgggctacagaccacactagaaaacaactgtccacatagcagctacaaacatttaaattaaaaaaa

SEQ ID NO: 51661 - DNA, 245 bp, Homo sapiens
ctttatttatacctcagcttccaaattttatccaaatgtaatcttaggcttaaaagtctaaaattggtcactctaaaatatgtgtaaattaaaactttttttaatttcttgtaaccataaggatattaacatactgtacaaagttagttataattacaatgattcattgtatataattaatcaaaaaagttgagtattatatattttgattactaaacacgaaaattaagttttttgcaaacaca

SEQ ID NO: 51662 - DNA, 403 bp, Homo sapiens
agtcccactgctggccagaagtggagtgaggcccctgcacacttgtgagggtctgcacttcttccccctagtatgtcacagccttaacaggtatgtctatgtggcagatgctggttattcaacattcattcagcagtgactgtgtgaagattaatcctatgtgggtcatgacctctggatgctgaaaggaaggtagggctacagagaaaaaaacatttctccatgatttcattacagatcgccataaacgcttagcacaactgcaaccgtcttccaagaggaatcctcactaccagaccttggagcgggatcttattgaattacaggagcagcagctgtttgaactttttgtggtggtgtctctacagaagaaaccatcaggaataagctatattccccaggt

SEQ ID NO: 51663 - DNA, 457 bp, Homo sapiens
actcaatgtctgggtcgggtggacaggaacgtgctgtgggccccggccctttgctgtaagccttcgcaggtgccgttcattctgcccgggacgcgtctctggcctttctgaacgggtgttgcctcctcaggagcccagctgactcgtctcactgactccccctgcagccctctccaccatctggaattagctcccctgtatcttccactgcttcctcgacatctgactcactgcagtgggttctaagctgcaggaggacaagggccttattcctctgctcaccagtctgccctcagcagccaccgctggcactcagtgtgttttcaataatcgtgtgtggctgagatgcaggcgggaagcagaaggaagccttgtctgccaccatcaggccgtgttgtaagtgcaggtggccctgggctgcaagttttcaacggggacattaatcccaaagcgacgt

SEQ ID NO: 51664 - DNA, 1042 bp, Homo sapiens
  misc_feature (10)..(10): n is a, c, g, or t
  misc_feature (18)..(18): n is a, c, g, or t
  misc_feature (22)..(23): n is a, c, g, or t
attcggcacnggagagcnagcnnagcctcaaccgtcaaagctgtcagcggccggcactgtagattaacaggaaacttccaagatggaaactttgtctttccccagatataatgtagctgagattgtgattcatattcgcaataagatcttaacaggagctgatggtaaaaacctcaccaagaatgatctttatccaaatccaaagcctgaagtcttgcacatgatctacatgagagccttacaaatagtatatggaattcgactggaacatttttacatgatgccagtgaactctgaagtcatgtatccacatttaatggaaggcttcttaccattcagcaatttagttactcatctgtggagtaaagagtgattttattgtcttcgtctacattcgtatttatattacattaagttttcttaatgacatggttttctttggtaaggaatacctactatgttccttttcatttcatcccatatacattcattcaaactttcaaaattgtagactgtcatcaaacagaactgcctccaactgtgccactttctcagcatattttcaattgaacttctaagatactgtaagtcgaaaattgtttaccgtctttgtgaagaggtttgagttcttaaaagagtcttagtgtcaccaagtttatgtactatttattagaatctgtaactatactttagtattgcatgactacatgattaatatacagaaaaaatagatttcagtgctatagggttatacattatagtagaattctggcttcgtccactgaccttaagaaatatatccagaaatctctttctgaaaataagatgtttatatcctatagcttagcatttaatgtgcaaaatacttttcaatagtctttttgtacttcatcttcaagggactcatttttgcctatctgccgggtgaatgactttgagactgctgatattctatgtccaagtaagtgagaatttaaaacagttttaatgtctggcttcgatctaccatttcacctttccatcagtaaatgtaaaaaaaaaa

SEQ ID NO: 51665 - DNA, 1844 bp, Homo sapiens
agcggggaatggggcgggacttccagtaggaggcggcaagtttgaaaagtgatgacggttgacgtttgctgatttttgactttgcttgtagctgctccccgaactcgccgtcttcctgtcggcggccggcactgtagattaacaggaaacttccaagatggaaactttgtctttccccagatataatgtagctgagattgtgattcatattcgcaataagatcttaacaggagctgatggtaaaaacctcaccaagaatgatctttatccaaatccaaagcctgaagtcttgcacatgatctacatgagagccttacaaatagtatatggaattcgactggaacatttttacatgatgccagtgaactctgaagtcatgtatccacatttaatggaaggcttcttaccattcagcaatttagttactcatctggactcatttttgcctatctgccgggtgaatgactttgagactgctgatattctatgtccaaaagcaaaacggacaagtcggtttttaagtggcattatcaactttattcacttcagagaagcatgccgtgaaacgtatatggaatttctttggcaatataaatcctctgcggacaaaatgcaacagttaaacgccgcacaccaggaggcattaatgaaactggagagacttgattctgttccagttgaagagcaagaagagttcaagcagctttcagatggaattcaggagctacaacaatcactaaatcaggattttcatcaaaaaacgatagtgctgcaagagggaaattcccaaaagaagtcaaatatttcagagaaaaccaagcgtttgaatgaactaaaattgtcggtggtttctttgaaagaaatacaagagagtttgaaaacaaaaattgtggattctccagagaagttaaagaattataaagaaaaaatgaaagatacggtccagaagcttaaaaatgccagacaagaagtggtggagaaatatgaaatctatggagactcagttgactgcctgccttcatgtcagttggaagtgcagttatatcaaaagaaaatacaggacctttcagataatagggaaaaattagccagtatcttaaaggagagcctgaacttggaggaccaaattgagagtgatgagtcagaactgaagaaattgaagactgaagaaaattcgttcaaaagactgatgattgtgaagaaggaaaaacttgccacagcacaattcaaaataaataagaagcatgaagatgttaagcaatacaaacgcacagtaattgaggattgcaataaagttcaagaaaaaagaggtgctgtctatgaacgagtaaccacaattaatcaagaaatccaaaaaattaaacttggaattcaacaactaaaagatgctgctgaaagggagaaactgaagtcccaggaaatatttctaaacttgaaaactgctttggagaaataccacgacggtattgaaaaggcagcagaggactcctatgctaagatagatgagaagacagctgaactgaagaggaagatgttcaaaatgtcaacctgattaacaaaattacatgtctttttgtaaatggcttgccatcttttaattttctatttagaaagaaaagttgaagcgaatggaagtatcagaagtaccaaataatgttggcttcatcagtttttatacactctcataagtagttaataagatgaatttaatgtaggcttttattaatttataattaaaataacttgtgcagctattcatgtctctactctgccccttgttgtaaatagtttgagtaaaacaaaactagttacctttgaaatatatatatttttttctgttacta

SEQ ID NO: 51666 - DNA, 1990 bp, Homo sapiens
agcggggaatggggcgggacttccagtaggaggcggcaagtttgaaaagtgatgacggttgacgtttgctgatttttgactttgcttgtagctgctccccgaactcgccgtcttcctgtcggcggccggcactgtaggtgagcgcgagaggacggaggaaggaagcctgcagacagacgccttctccatcccaaggcgcgggcaggtgccgggacgctgggcctggcggtgttttcgtcgtgctcagcggtgggaggaggcggaagaaaccagagcctgggagattaacaggaaacttccaagatggaaactttgtctttccccagatataatgtagctgagattgtgattcatattcgcaataagatcttaacaggagctgatggtaaaaacctcaccaagaatgatctttatccaaatccaaagcctgaagtcttgcacatgatctacatgagagccttacaaatagtatatggaattcgactggaacatttttacatgatgccagtgaactctgaagtcatgtatccacatttaatggaaggcttcttaccattcagcaatttagttactcatctggactcatttttgcctatctgccgggtgaatgactttgagactgctgatattctatgtccaaaagcaaaacggacaagtcggtttttaagtggcattatcaactttattcacttcagagaagcatgccgtgaaacgtatatggaatttctttggcaatataaatcctctgcggacaaaatgcaacagttaaacgccgcacaccaggaggcattaatgaaactggagagacttgattctgttccagttgaagagcaagaagagttcaagcagctttcagatggaattcaggagctacaacaatcactaaatcaggattttcatcaaaaaacgatagtgctgcaagagggaaattcccaaaagaagtcaaatatttcagagaaaaccaagcgtttgaatgaactaaaattgtcggtggtttctttgaaagaaatacaagagagtttgaaaacaaaaattgtggattctccagagaagttaaagaattataaagaaaaaatgaaagatacggtccagaagcttaaaaatgccagacaagaagtggtggagaaatatgaaatctatggagactcagttgactgcctgccttcatgtcagttggaagtgcagttatatcaaaagaaaatacaggacctttcagataatagggaaaaattagccagtatcttaaaggagagcctgaacttggaggaccaaattgagagtgatgagtcagaactgaagaaattgaagactgaagaaaattcgttcaaaagactgatgattgtgaagaaggaaaaacttgccacagcacaattcaaaataaataagaagcatgaagatgttaagcaatacaaacgcacagtaattgaggattgcaataaagttcaagaaaaaagaggtgctgtctatgaacgagtaaccacaattaatcaagaaatccaaaaaattaaacttggaattcaacaactaaaagatgctgctgaaagggagaaactgaagtcccaggaaatatttctaaacttgaaaactgctttggagaaataccacgacggtattgaaaaggcagcagaggactcctatgctaagatagatgagaagacagctgaactgaagaggaagatgttcaaaatgtcaacctgattaacaaaattacatgtctttttgtaaatggcttgccatcttttaattttctatttagaaagaaaagttgaagcgaatggaagtatcagaagtaccaaataatgttggcttcatcagtttttatacactctcataagtagttaataagatgaatttaatgtaggcttttattaatttataattaaaataacttgtgcagctattcatgtctctactctgccccttgttgtaaatagtttgagtaaaacaaaactagttacctttgaaatatatatatttttttctgttacta

SEQ ID NO: 51667 - DNA, 485 bp, Homo sapiens
tagcacatccatatagggcttgaactatctgatcagtttattcaaacaactctacaaggaaatatttctaaacttgaaaactgctttggagaaataccacgacggtattgaaaaggcagcagaggactcctatgctaagatagatgagaagacagctgaactgaagaggaagatgttcaaaatgtcaacctgattaacaaaattacatgtctttttgtaaatggcttgccatcttttaattttctatttagaaagaaaagttgaagcgaatggaagtatcagaagtaccaaataatgttggcttcatcagtttttatacactctcataagtagttaataagatgaatttaatgtaggcttttattaatttataattaaaataacttgtgcagctattcatgtctctactctgccccttgttgtaaatagtttgagtaaaacaaaactagttacctttgaaatatatatatttttttctgttacta

SEQ ID NO: 51668 - DNA, 2073 bp, Homo sapiens
agcggggaatggggcgggacttccagtaggaggcggcaagtttgaaaagtgatgacggttgacgtttgctgatttttgactttgcttgtagctgctccccgaactcgccgtcttcctgtcggcggccggcactgtaggagctcaaactatgtagttggaaagtgtcttcatctctcgttaatgaataaattgtaactgaaattgtacttcgaaagaatgatagaatttggatattggaggaggttccaaaaggaaatactggaagtttgggaaagttaggagactaacttggagcagaaatttcattcaattattaaagggtttagaagcctagcagaaaaatttgaatttgatgtggtgggtaagattaacaggaaacttccaagatggaaactttgtctttccccagatataatgtagctgagattgtgattcatattcgcaataagatcttaacaggagctgatggtaaaaacctcaccaagaatgatctttatccaaatccaaagcctgaagtcttgcacatgatctacatgagagccttacaaatagtatatggaattcgactggaacatttttacatgatgccagtgaactctgaagtcatgtatccacatttaatggaaggcttcttaccattcagcaatttagttactcatctggactcatttttgcctatctgccgggtgaatgactttgagactgctgatattctatgtccaaaagcaaaacggacaagtcggtttttaagtggcattatcaactttattcacttcagagaagcatgccgtgaaacgtatatggaatttctttggcaatataaatcctctgcggacaaaatgcaacagttaaacgccgcacaccaggaggcattaatgaaactggagagacttgattctgttccagttgaagagcaagaagagttcaagcagctttcagatggaattcaggagctacaacaatcactaaatcaggattttcatcaaaaaacgatagtgctgcaagagggaaattcccaaaagaagtcaaatatttcagagaaaaccaagcgtttgaatgaactaaaattgtcggtggtttctttgaaagaaatacaagagagtttgaaaacaaaaattgtggattctccagagaagttaaagaattataaagaaaaaatgaaagatacggtccagaagcttaaaaatgccagacaagaagtggtggagaaatatgaaatctatggagactcagttgactgcctgccttcatgtcagttggaagtgcagttatatcaaaagaaaatacaggacctttcagataatagggaaaaattagccagtatcttaaaggagagcctgaacttggaggaccaaattgagagtgatgagtcagaactgaagaaattgaagactgaagaaaattcgttcaaaagactgatgattgtgaagaaggaaaaacttgccacagcacaattcaaaataaataagaagcatgaagatgttaagcaatacaaacgcacagtaattgaggattgcaataaagttcaagaaaaaagaggtgctgtctatgaacgagtaaccacaattaatcaagaaatccaaaaaattaaacttggaattcaacaactaaaagatgctgctgaaagggagaaactgaagtcccaggaaatatttctaaacttgaaaactgctttggagaaataccacgacggtattgaaaaggcagcagaggactcctatgctaagatagatgagaagacagctgaactgaagaggaagatgttcaaaatgtcaacctgattaacaaaattacatgtctttttgtaaatggcttgccatcttttaattttctatttagaaagaaaagttgaagcgaatggaagtatcagaagtaccaaataatgttggcttcatcagtttttatacactctcataagtagttaataagatgaatttaatgtaggcttttattaatttataattaaaataacttgtgcagctattcatgtctctactctgccccttgttgtaaatagtttgagtaaaacaaaactagttacctttgaaatatatatatttttttctgttacta

SEQ ID NO: 51669 - DNA, 2615 bp, Homo sapiens
agcggggaatggggcgggacttccagtaggaggcggcaagtttgaaaagtgatgacggttgacgtttgctgatttttgactttgcttgtagctgctccccgaactcgccgtcttcctgtcggcggccggcactgtaggagctcaaactatgtagttggaaagtgtcttcatctctcgttaatgaataaattgtaactgaaattgtacttcgaaagaatgatagaatttggatattggaggaggttccaaaaggaaatactggaagtttgggaaagttaggagactaacttggagcagaaatttcattcaattattaaagggtttagaagcctagcagaaaaatttgaatttgatgtggtgggtaagattaacaggaaacttccaagatggaaactttgtctttccccagatataatgtagctgagattgtgattcatattcgcaataagatcttaacaggagctgatggtaaaaacctcaccaagaatgatctttatccaaatccaaagcctgaagtcttgcacatgatctacatgagagccttacaaatagtatatggaattcgactggaacatttttacatgatgccagtgaactctgaagtcatgtatccacatttaatggaaggcttcttaccattcagcaatttagttactcatctgtggagtaaagagtgattttattgtcttcgtctacattcgtatttatattacattaagttttcttaatgacatggttttctttggtaaggaatacctactatgttccttttcatttcatcccatatacattcattcaaactttcaaaattgtagactgtcatcaaacagaactgcctccaactgtgccactttctcagcatattttcaattgaacttctaagatactgtaagtcgaaaattgtttaccgtctttgtgaagaggtttgagttcttaaaagagtcttagtgtcaccaagtttatgtactatttattagaatctgtaactatactttagtattgcatgactacatgattaatatacagaaaaaatagatttcagtgctatagggttatacattatagtagaattctggcttcgtccactgaccttaagaaatatatccagaaatctctttctgaaaataagatgtttatatcctatagcttagcatttaatgtgcaaaatacttttcaatagtctttttgtacttcatcttcaagggactcatttttgcctatctgccgggtgaatgactttgagactgctgatattctatgtccaaaagcaaaacggacaagtcggtttttaagtggcattatcaactttattcacttcagagaagcatgccgtgaaacgtatatggaatttctttggcaatataaatcctctgcggacaaaatgcaacagttaaacgccgcacaccaggaggcattaatgaaactggagagacttgattctgttccagttgaagagcaagaagagttcaagcagctttcagatggaattcaggagctacaacaatcactaaatcaggattttcatcaaaaaacgatagtgctgcaagagggaaattcccaaaagaagtcaaatatttcagagaaaaccaagcgtttgaatgaactaaaattgtcggtggtttctttgaaagaaatacaagagagtttgaaaacaaaaattgtggattctccagagaagttaaagaattataaagaaaaaatgaaagatacggtccagaagcttaaaaatgccagacaagaagtggtggagaaatatgaaatctatggagactcagttgactgcctgccttcatgtcagttggaagtgcagttatatcaaaagaaaatacaggacctttcagataatagggaaaaattagccagtatcttaaaggagagcctgaacttggaggaccaaattgagagtgatgagtcagaactgaagaaattgaagactgaagaaaattcgttcaaaagactgatgattgtgaagaaggaaaaacttgccacagcacaattcaaaataaataagaagcatgaagatgttaagcaatacaaacgcacagtaattgaggattgcaataaagttcaagaaaaaagaggtgctgtctatgaacgagtaaccacaattaatcaagaaatccaaaaaattaaacttggaattcaacaactaaaagatgctgctgaaagggagaaactgaagtcccaggaaatatttctaaacttgaaaactgctttggagaaataccacgacggtattgaaaaggcagcagaggactcctatgctaagatagatgagaagacagctgaactgaagaggaagatgttcaaaatgtcaacctgattaacaaaattacatgtctttttgtaaatggcttgccatcttttaattttctatttagaaagaaaagttgaagcgaatggaagtatcagaagtaccaaataatgttggcttcatcagtttttatacactctcataagtagttaataagatgaatttaatgtaggcttttattaatttataattaaaataacttgtgcagctattcatgtctctactctgccccttgttgtaaatagtttgagtaaaacaaaactagttacctttgaaatatatatatttttttctgttacta

SEQ ID NO: 51670 - DNA, 2219 bp, Homo sapiens
agcggggaatggggcgggacttccagtaggaggcggcaagtttgaaaagtgatgacggttgacgtttgctgatttttgactttgcttgtagctgctccccgaactcgccgtcttcctgtcggcggccggcactgtaggtgagcgcgagaggacggaggaaggaagcctgcagacagacgccttctccatcccaaggcgcgggcaggtgccgggacgctgggcctggcggtgttttcgtcgtgctcagcggtgggaggaggcggaagaaaccagagcctgggaggagctcaaactatgtagttggaaagtgtcttcatctctcgttaatgaataaattgtaactgaaattgtacttcgaaagaatgatagaatttggatattggaggaggttccaaaaggaaatactggaagtttgggaaagttaggagactaacttggagcagaaatttcattcaattattaaagggtttagaagcctagcagaaaaatttgaatttgatgtggtgggtaagattaacaggaaacttccaagatggaaactttgtctttccccagatataatgtagctgagattgtgattcatattcgcaataagatcttaacaggagctgatggtaaaaacctcaccaagaatgatctttatccaaatccaaagcctgaagtcttgcacatgatctacatgagagccttacaaatagtatatggaattcgactggaacatttttacatgatgccagtgaactctgaagtcatgtatccacatttaatggaaggcttcttaccattcagcaatttagttactcatctggactcatttttgcctatctgccgggtgaatgactttgagactgctgatattctatgtccaaaagcaaaacggacaagtcggtttttaagtggcattatcaactttattcacttcagagaagcatgccgtgaaacgtatatggaatttctttggcaatataaatcctctgcggacaaaatgcaacagttaaacgccgcacaccaggaggcattaatgaaactggagagacttgattctgttccagttgaagagcaagaagagttcaagcagctttcagatggaattcaggagctacaacaatcactaaatcaggattttcatcaaaaaacgatagtgctgcaagagggaaattcccaaaagaagtcaaatatttcagagaaaaccaagcgtttgaatgaactaaaattgtcggtggtttctttgaaagaaatacaagagagtttgaaaacaaaaattgtggattctccagagaagttaaagaattataaagaaaaaatgaaagatacggtccagaagcttaaaaatgccagacaagaagtggtggagaaatatgaaatctatggagactcagttgactgcctgccttcatgtcagttggaagtgcagttatatcaaaagaaaatacaggacctttcagataatagggaaaaattagccagtatcttaaaggagagcctgaacttggaggaccaaattgagagtgatgagtcagaactgaagaaattgaagactgaagaaaattcgttcaaaagactgatgattgtgaagaaggaaaaacttgccacagcacaattcaaaataaataagaagcatgaagatgttaagcaatacaaacgcacagtaattgaggattgcaataaagttcaagaaaaaagaggtgctgtctatgaacgagtaaccacaattaatcaagaaatccaaaaaattaaacttggaattcaacaactaaaagatgctgctgaaagggagaaactgaagtcccaggaaatatttctaaacttgaaaactgctttggagaaataccacgacggtattgaaaaggcagcagaggactcctatgctaagatagatgagaagacagctgaactgaagaggaagatgttcaaaatgtcaacctgattaacaaaattacatgtctttttgtaaatggcttgccatcttttaattttctatttagaaagaaaagttgaagcgaatggaagtatcagaagtaccaaataatgttggcttcatcagtttttatacactctcataagtagttaataagatgaatttaatgtaggcttttattaatttataattaaaataacttgtgcagctattcatgtctctactctgccccttgttgtaaatagtttgagtaaaacaaaactagttacctttgaaatatatatatttttttctgttacta

SEQ ID NO: 51671 - DNA, 2311 bp, Homo sapiens
  misc_feature (10)..(10): n is a, c, g, or t
  misc_feature (18)..(18): n is a, c, g, or t
  misc_feature (22)..(23): n is a, c, g, or t
attcggcacnggagagcnagcnnagcctcaaccgtcaaagctgtcagcggccggcactgtagattaacaggaaacttccaagatggaaactttgtctttccccagatataatgtagctgagattgtgattcatattcgcaataagatcttaacaggagctgatggtaaaaacctcaccaagaatgatctttatccaaatccaaagcctgaagtcttgcacatgatctacatgagagccttacaaatagtatatggaattcgactggaacatttttacatgatgccagtgaactctgaagtcatgtatccacatttaatggaaggcttcttaccattcagcaatttagttactcatctgtggagtaaagagtgattttattgtcttcgtctacattcgtatttatattacattaagttttcttaatgacatggttttctttggtaaggaatacctactatgttccttttcatttcatcccatatacattcattcaaactttcaaaattgtagactgtcatcaaacagaactgcctccaactgtgccactttctcagcatattttcaattgaacttctaagatactgtaagtcgaaaattgtttaccgtctttgtgaagaggtttgagttcttaaaagagtcttagtgtcaccaagtttatgtactatttattagaatctgtaactatactttagtattgcatgactacatgattaatatacagaaaaaatagatttcagtgctatagggttatacattatagtagaattctggcttcgtccactgaccttaagaaatatatccagaaatctctttctgaaaataagatgtttatatcctatagcttagcatttaatgtgcaaaatacttttcaatagtctttttgtacttcatcttcaagggactcatttttgcctatctgccgggtgaatgactttgagactgctgatattctatgtccaaaagcaaaacggacaagtcggtttttaagtggcattatcaactttattcacttcagagaagcatgccgtgaaacgtatatggaatttctttggcaatataaatcctctgcggacaaaatgcaacagttaaacgccgcacaccaggaggcattaatgaaactggagagacttgattctgttccagttgaagagcaagaagagttcaagcagctttcagatggaattcaggagctacaacaatcactaaatcaggattttcatcaaaaaacgatagtgctgcaagagggaaattcccaaaagaagtcaaatatttcagagaaaaccaagcgtttgaatgaactaaaattgtcggtggtttctttgaaagaaatacaagagagtttgaaaacaaaaattgtggattctccagagaagttaaagaattataaagaaaaaatgaaagatacggtccagaagcttaaaaatgccagacaagaagtggtggagaaatatgaaatctatggagactcagttgactgcctgccttcatgtcagttggaagtgcagttatatcaaaagaaaatacaggacctttcagataatagggaaaaattagccagtatcttaaaggagagcctgaacttggaggaccaaattgagagtgatgagtcagaactgaagaaattgaagactgaagaaaattcgttcaaaagactgatgattgtgaagaaggaaaaacttgccacagcacaattcaaaataaataagaagcatgaagatgttaagcaatacaaacgcacagtaattgaggattgcaataaagttcaagaaaaaagaggtgctgtctatgaacgagtaaccacaattaatcaagaaatccaaaaaattaaacttggaattcaacaactaaaagatgctgctgaaagggagaaactgaagtcccaggaaatatttctaaacttgaaaactgctttggagaaataccacgacggtattgaaaaggcagcagaggactcctatgctaagatagatgagaagacagctgaactgaagaggaagatgttcaaaatgtcaacctgattaacaaaattacatgtctttttgtaaatggcttgccatcttttaattttctatttagaaagaaaagttgaagcgaatggaagtatcagaagtaccaaataatgttggcttcatcagtttttatacactctcataagtagttaataagatgaatttaatgtaggcttttattaatttataattaaaataacttgtgcagctattcatgtctctactctgccccttgttgtaaatagtttgagtaaaacaaaactagttacctttgaaatatatatatttttttctgttacta

SEQ ID NO: 51672 - DNA, 1278 bp, Homo sapiens
aagtagacaatttcttcatctcagttatttgaggacaggtatttcattttagcctttcaaaagtgaagagcagtattttaatctattttgctgtgttaagttctgttccagttgaagagcaagaagagttcaagcagctttcagatggaattcaggagctacaacaatcactaaatcaggattttcatcaaaaaacgatagtgctgcaagagggaaattcccaaaagaagtcaaatatttcagagaaaaccaagcgtttgaatgaactaaaattgtcggtggtttctttgaaagaaatacaagagagtttgaaaacaaaaattgtggattctccagagaagttaaagaattataaagaaaaaatgaaagatacggtccagaagcttaaaaatgccagacaagaagtggtggagaaatatgaaatctatggagactcagttgactgcctgccttcatgtcagttggaagtgcagttatatcaaaagaaaatacaggacctttcagataatagggaaaaattagccagtatcttaaaggagagcctgaacttggaggaccaaattgagagtgatgagtcagaactgaagaaattgaagactgaagaaaattcgttcaaaagactgatgattgtgaagaaggaaaaacttgccacagcacaattcaaaataaataagaagcatgaagatgttaagcaatacaaacgcacagtaattgaggattgcaataaagttcaagaaaaaagaggtgctgtctatgaacgagtaaccacaattaatcaagaaatccaaaaaattaaacttggaattcaacaactaaaagatgctgctgaaagggagaaactgaagtcccaggaaatatttctaaacttgaaaactgctttggagaaataccacgacggtattgaaaaggcagcagaggactcctatgctaagatagatgagaagacagctgaactgaagaggaagatgttcaaaatgtcaacctgattaacaaaattacatgtctttttgtaaatggcttgccatcttttaattttctatttagaaagaaaagttgaagcgaatggaagtatcagaagtaccaaataatgttggcttcatcagtttttatacactctcataagtagttaataagatgaatttaatgtaggcttttattaatttataattaaaataacttgtgcagctattcatgtctctactctgccccttgttgtaaatagtttgagtaaaacaaaactagttacctttgaaatatatatatttttttctgttacta

SEQ ID NO: 51673 - DNA, 1527 bp, Homo sapiens
agcggggaatggggcgggacttccagtaggaggcggcaagtttgaaaagtgatgacggttgacgtttgctgatttttgactttgcttgtagctgctccccgaactcgccgtcttcctgtcggcggccggcactgtagattaacaggaaacttccaagatggaaactttgtctttccccagatataatgtagctgagattgtgattcatattcgcaataagatcttaacaggagctgatggtaaaaacctcaccaagaatgatctttatccaaatccaaagcctgaagtcttgcacatgatctacatgagagccttacaaatagtatatggaattcgactggaacatttttacatgatgccagtgaactctgaagtcatgtatccacatttaatggaaggcttcttaccattcagcaatttagttactcatctggactcatttttgcctatctgccgggtgaatgactttgagactgctgatattctatgtccaaaagcaaaacggacaagtcggtttttaagtggcattatcaactttattcacttcagagaagcatgccgtgaaacgtatatggaatttctttggcaatataaatcctctgcggacaaaatgcaacagttaaacgccgcacaccaggaggcattaatgaaactggagagacttgattctgttccagttgaagagcaagaagagttcaagcagctttcagatggaattcaggagctacaacaatcactaaatcaggattttcatcaaaaaacgatagtgctgcaagagggaaattcccaaaagaagtcaaatatttcagagaaaaccaagcgtttgaatgaactaaaattgtcggtggtttctttgaaagaaatacaagagagtttgaaaacaaaaattgtggattctccagagaagttaaagaattataaagaaaaaatgaaagatacggtccagaagcttaaaaatgccagacaagaagtggtggagaaatatgaaatctatggagactcagttgactgcctgccttcatgtcagttggaagtgcagttatatcaaaagaaaatacaggacctttcagataatagggaaaaattagccagtatcttaaaggaggtttgtattgtatggaattttgatgtctttattatataacagcttactatagttccttgtattttgctttcactttttgttatgttttcctaaagaaaaacagggtcattctacagtataatagatgtggcaatgtatgctatgaaaaagacacttttctttttaaacatagcagtagcaagacccaatttttaaccttctgatgaaattaataataactaacccatcacattgctgtgtatattttggaaaatagtacagtagctcccccttatccttaggagattcatttcaggacctccaggggatgcctgaaactgtggatagtaacaaaccttatatatatatatatgttttttcctttatgtacatacctatgataaagtttaatttaaaacttaggcacagtaagagattaacaa

SEQ ID NO: 51674 - DNA, 1346 bp, Homo sapiens
agcggggaatggggcgggacttccagtaggaggcggcaagtttgaaaagtgatgacggttgacgtttgctgatttttgactttgcttgtagctgctccccgaactcgccgtcttcctgtcggcggccggcactgtaggagctcaaactatgtagttggaaagtgtcttcatctctcgttaatgaataaattgtaactgaaattgtacttcgaaagaatgatagaatttggatattggaggaggttccaaaaggaaatactggaagtttgggaaagttaggagactaacttggagcagaaatttcattcaattattaaagggtttagaagcctagcagaaaaatttgaatttgatgtggtgggtaagattaacaggaaacttccaagatggaaactttgtctttccccagatataatgtagctgagattgtgattcatattcgcaataagatcttaacaggagctgatggtaaaaacctcaccaagaatgatctttatccaaatccaaagcctgaagtcttgcacatgatctacatgagagccttacaaatagtatatggaattcgactggaacatttttacatgatgccagtgaactctgaagtcatgtatccacatttaatggaaggcttcttaccattcagcaatttagttactcatctgtggagtaaagagtgattttattgtcttcgtctacattcgtatttatattacattaagttttcttaatgacatggttttctttggtaaggaatacctactatgttccttttcatttcatcccatatacattcattcaaactttcaaaattgtagactgtcatcaaacagaactgcctccaactgtgccactttctcagcatattttcaattgaacttctaagatactgtaagtcgaaaattgtttaccgtctttgtgaagaggtttgagttcttaaaagagtcttagtgtcaccaagtttatgtactatttattagaatctgtaactatactttagtattgcatgactacatgattaatatacagaaaaaatagatttcagtgctatagggttatacattatagtagaattctggcttcgtccactgaccttaagaaatatatccagaaatctctttctgaaaataagatgtttatatcctatagcttagcatttaatgtgcaaaatacttttcaatagtctttttgtacttcatcttcaagggactcatttttgcctatctgccgggtgaatgactttgagactgctgatattctatgtccaagtaagtgagaatttaaaacagttttaatgtctggcttcgatctaccatttcacctttccatcagtaaatgtaaaaaaaaaa

SEQ ID NO: 51675 - DNA, 213 bp, Homo sapiens
cttttggcttaggagcatcatgaacagagaaagtttgaagaatatctgatctaacacatttaactcctttcttaccttaattttatgagacagcagtgagtggctaaatctaaatgttttgaatcattataaaacgtgtttgctttttcccttagatagtgctgcaagagggaaattcccaaaagaagtcaaatatttcagagaaaaccaagc

SEQ ID NO: 51676 - DNA, 286 bp, Homo sapiens
tcctttttgttattaccatcgtcgttattttttattattaactgtaaaaatagtgataaatccttttgctgaatatactgactctagcaatattccagtagttgatcttcattcgtagcagttttcttctttatctgaagctcaaaagagcttttttttctttttttgagatggtgtttcactcttggtgcccagactggagtgcaatggcacgatctcggctcaccacaacctccgcctcccaggttcaagtgattctcctgcctcagcctcccgagtagctggg

SEQ ID NO: 51677 - DNA, 861 bp, Homo sapiens
gtgcagtggcacaatcatatcccactgcagcttctcaacctcctaggcacaagtgattctcccacctctttcttgagtagctgggactacagaagtgtgaaccaccttgccgaactaattttttttttttttttggcggtagtgatggcatctcactttgttgctcaggctggtcttaaactcctggcctcaaacaatctgctggcctgtgcctcccaaagtagcttggattacaggtgtgagccgctgcacctggcattctctttttcctctttattactggttctgcatattccagctgccttaatctccctgaactctgttctgtatttcccatctctttcaatattatctctctacacatttttcccataggaaactccattattttccccagaaagcattaatgattcttgtcatcccatgcagaagggacacttgattcctggaatgttattattcactggtgctttatatcccctagactattcacgaaaaccttatgttctaaaatccatgctaaagaccaataaatcgtatgaaaacactaccatatgtttaaaatgtgttaagaaagaatacaaaccacaggaaattgatactgcttttgaataaggagagttgtgaggtaaacaatcagagattatttttcactgtataggcataccttggagctactgcaactttggttccagaccaccacaataaagcagatatcacagtaaggttaaggcacataagttgttcttcccagtgcacacaaaagatatgtttacactacactgtaacctattaagtgtgcaacagcattatgtctaaaaacaaaaatgtacataccctaattttaaaatactttttgca

SEQ ID NO: 51678 - DNA, 373 bp, Homo sapiens
gatcttagaggttctttacagaagttctgcctaccttttctccgttcatcttacacgaattaaattggatagcataaaaattcaagttaaaaaacataacattcggtccggtatggtggctcacacctgtaatcccaacactttgggaggccgaggcagacagatcacttgagctcaggagttcaaggccagcctgggcaacatggtgaaaccctgtctctacaaaaaatataaaaattagctgggtatgatggtgtgtgcctgtagtcccagctccttgggtagttgatgtgggagtattgtttgagcctcggaggtcgaggctgaggtgagccatgaccataccaccacactccagccagtctgggcacag

SEQ ID NO: 51679 - DNA, 345 bp, Homo sapiens
accatgatggtttacaaatgccatggtaacatcacgaagttaccctatatggtataaaaggggaagcatgaataatccaccccttgtttagcatatcatcaagaaataatcataaaaatgggcaacccatggccctcggggctgctctgtttatgaagtagccattctttactattttcctttcctaataaacttgccttcactttactctatggactcaccctgaattctttcttgtgtgacatccaagaaccctctcttggggtctggatcgagacccctttcctgtaacagcagggcctcatcccatcatttgaaagaccttaagagttagaactgagattt

SEQ ID NO: 51680 - DNA, 750 bp, Homo sapiens
ggtgctgtgacgaccagagcaaacacgccggatgttcctgtgtaggctgtgtaaggagtgaccggaagtagaaactgggtgctccagtggcgcaatcggttagcgcgcggtacttatatggcagtatgtgtgcgagtgatgccgaggttgtgagttcgagcctcacctggagcattgttttccaacccaaaatagcattacttgaagtgcctttccccctgtaatccgactccatcgtctttaacgtgtttggaattgtgtacacagtttattgttattggtttccttagcctttttagaaccaagcaacgccaattaccaacaaaatccgttgcgccgcagtgagttagctaccttctatctccactttgttctgcacgtcgatctcaggagaagccagctcccatgttaagaagttcaaatacctagagactgcgatggtttgcagaggctcaagctaaccacatggaaagacatggagagatattccttgccaaccctcaactactccaactattctaagacatcaaacctgtcacccaccggtctgaagaggaggatgagagacaaagaaaaaagttgtctggctgcctctgctgtctacagattgaagaagatccatccagctgagcccagcctagaccagctgacttctccaataagcctgtatgaaataaatgcttattgttatgtgaccttgagctttgaagatagtttgttatgcaataattgttgattctttcaccctgt

SEQ ID NO: 51681 - DNA, 408 bp, Homo sapiens
cagcccaggcagtaagaaaacatatcagcttccacttttacctttaaggagaagccagctcccatgttaagaagttcaaatacctagagactgcgatggtttgcagaggctcaagctaaccacatggaaagacatggagagatattccttgccaaccctcaactactccaactattctaagacatcaaacctgtcacccaccggtctgaagaggaggatgagagacaaagaaaaaagttgtctggctgcctctgctgtctacagattgaagaagatccatccagctgagcccagcctagaccagctgacttctccaataagcctgtatgaaataaatgcttattgttatgtgaccttgagctttgaagatagtttgttatgcaataattgttgattctttcaccctgt

SEQ ID NO: 51682 - DNA, 775 bp, Homo sapiens
cagcccaggcagtaagaaaacatatcagcttccacttttacctttaaggagaagccagctcccatgttaagaagttcaaatacctagagactgcgatggtttgcagaggctcaagctaaccacatggaaagacatggagagatattccttgccaaccctcaactactccaactattctaagacatcaaacctgtgagtgaaaaagccatctcataccttacaactctagcagatgccacatagtgtagagataagctctctctgtcattctctgtcaaaattgtaaaatcataagcaaataaataatcacagttgcttcaagttactacatttgagcatagtattttaagccactgcatttgagatggtttgttatacagcaatagataactaaaaaacaaagtcccttgatttagacttgtccactcaacttgcttggccaatggaatggggtagaagtgatggtgtgcttattcccagcctgggccttaaaaggctttgcctatttccacttgccttcttgtacttctgctattgtcataagaaaaacaaaccgcaggtcacccaccggtctgaagaggaggatgagagacaaagaaaaaagttgtctggctgcctctgctgtctacagattgaagaagatccatccagctgagcccagcctagaccagctgacttctccaataagcctgtatgaaataaatgcttattgttatgtgaccttgagctttgaagatagtttgttatgcaataattgttgattctttcaccctgt

SEQ ID NO: 51683 - DNA, 620 bp, Homo sapiens
ggcagagggagcccgctcaggcctcagccagcacagagaggggctcccacggtgcagctgcgggctgaagggctcctgaagcgcggccagagtgggctgaggccgaggaggcgccgagagccagcgaggggatgccagcaagctgtcacctctcagaaatacaggaagaacatcaataatgttcgaagttataaattgcggaggccagaagtcagaaaacaaggtgtctgcaggaccaacctctcctctggatgctctaggagaagccagctcccatgttaagaagttcaaatacctagagactgcgatggtttgcagaggctcaagctaaccacatggaaagacatggagagatattccttgccaaccctcaactactccaactattctaagacatcaaacctgtcacccaccggtctgaagaggaggatgagagacaaagaaaaaagttgtctggctgcctctgctgtctacagattgaagaagatccatccagctgagcccagcctagaccagctgacttctccaataagcctgtatgaaataaatgcttattgttatgtgaccttgagctttgaagatagtttgttatgcaataattgttgattctttcaccctgt

SEQ ID NO: 51684 - DNA, 987 bp, Homo sapiens
ggcagagggagcccgctcaggcctcagccagcacagagaggggctcccacggtgcagctgcgggctgaagggctcctgaagcgcggccagagtgggctgaggccgaggaggcgccgagagccagcgaggggatgccagcaagctgtcacctctcagaaatacaggaagaacatcaataatgttcgaagttataaattgcggaggccagaagtcagaaaacaaggtgtctgcaggaccaacctctcctctggatgctctaggagaagccagctcccatgttaagaagttcaaatacctagagactgcgatggtttgcagaggctcaagctaaccacatggaaagacatggagagatattccttgccaaccctcaactactccaactattctaagacatcaaacctgtgagtgaaaaagccatctcataccttacaactctagcagatgccacatagtgtagagataagctctctctgtcattctctgtcaaaattgtaaaatcataagcaaataaataatcacagttgcttcaagttactacatttgagcatagtattttaagccactgcatttgagatggtttgttatacagcaatagataactaaaaaacaaagtcccttgatttagacttgtccactcaacttgcttggccaatggaatggggtagaagtgatggtgtgcttattcccagcctgggccttaaaaggctttgcctatttccacttgccttcttgtacttctgctattgtcataagaaaaacaaaccgcaggtcacccaccggtctgaagaggaggatgagagacaaagaaaaaagttgtctggctgcctctgctgtctacagattgaagaagatccatccagctgagcccagcctagaccagctgacttctccaataagcctgtatgaaataaatgcttattgttatgtgaccttgagctttgaagatagtttgttatgcaataattgttgattctttcaccctgt

SEQ ID NO: 51685 - DNA, 1794 bp, Homo sapiens
accactcacacaaaccccctcctagactttggcttcagaaagcacagatgtgacccaggcttactaaagagacaactccacagccctgggaacacacccttgagccaaacttggttgaagactaggtcttccctggcaagttccggaagaatggacttactgacttttatcaactcttctcactgccaaggccaacagcatctgaggtatagctttttgggagtacctgctttcttgcctcctggaggatattttctgtcctgggcttcatggcccctctcttccctgttacacattgctgtgctcagagcctttgcagctgcgacctagttgaatccacataggctccttccacacggtggaagatctgctgcttcactcacagaccaggagttctcaatcagaggtggttttgtccctcaggcctttggcaacatctagagacagttttgattgccacgcctggaggtgggatgtgtgtgctactggcatctagtggctgctaaacatcctacactgcataggatagtccccactacccccagccaagaattatctgactccaggggtcaatattgccaagactgggaaacactgatatagacagtgttgtccctgcctcctgggttagggtaaattttcaccccaaccctggacaaacagtgccttttgacactcatgcaactgttggggaaggactggactgggatccttgaattctccccagactttgacttttgataactctgcatatagcaagagtgattcttgaaagagctgtggctccatgctgaatgcacacatgtactcagagggattcaggtgggcattgttctggtgtgtgctgtgcaatggtgggaaaggacaaagctctctaaactgtctagagcaacctgccctgccccggtgtgcttggaccctttgcccagggaaccaggacatcagaaataatgttccttctgtggaaggacaacggggagctagggtagcaaagagcaataaattccaactctttatgaggtcaggagtcctttaaaaaagcctatgtcttggtctttaactgtccccttctgcaagatgtgactctatacacatggagacagattgaagaaagacttcacccatcttctaggaaataaaatcctgctcttgtcttctcccagtcactcccttatgcactgaaaggagaatttgactcccttgcacttcaaggccaggtgcctctccactagacagtcagacaaaggcaaataatggaggatagagagacaggtgttcattaggctggccatagggagaggaagggggtgacagcaggggaaaagaaactgtagtatcagttgtcacaagtagagctcggcccagctttccctcccttcccagccaccctagaattgagagtcccagtgcccctagtgtcgactttctatgtacatcctaggggtgagggagtgcggggcaatgggtaggatataaagcgtaaaggacaaattgccgcagtcttctaattgatgcttccaaactcaggaagggcttatccagtgtaaaatagccccaagcccagcaaccttctagagggctctggctgggcagatagcttttgtttttgagtctccagccctcagtcaaggaaaatataccatagctgctttcttgtcagtggcctttgagagaaagagaaaacaaatctagaattctgttcatctgatagaccgggggagctttgctatggtaggaggtttaggaagggcctttcacgcatagaaaccattgttgatattgccactcccctct

SEQ ID NO: 51686 - DNA, 165 bp, Homo sapiens
atttcatgtggaatttggggttggggggcaggctgggcaaggaacaaggcagaacactaagtaggccatggaagtggctgttctttcccccaccctgccacaccctgggagaaaaaactagactttggcttcagaaagcacagatgtgacccaggcttactaaag

SEQ ID NO: 51687 - DNA, 363 bp, Homo sapiens
tggcctccagggccagctggctgtacagccacctgcaagtctttgttcccggggttagccttgccaccctccttcaggactgcctagaattgtttcctgtcatcggggtagtaaatgtgttctcaggagcacgtgtatcttaaatatgttttaacgaatgtttacttagtttcttagaaacaaaacgtggtaaacacccagtcttattttctgggacacatgaagtgtgtttaagctgtcagctccaaaaaccctttccaagtcaaataacttaaaaaaaaaggttgtcagctaccactgcatcccagatgttagagtttatttctaaagctgttcttgggtgctgtttaatgttccagtgga

SEQ ID NO: 51688 - DNA, 933 bp, Homo sapiens
gcctccagagtagatggaattacaggtgcctgctaccatgcccacctaattttaaaaaatttttgtagagatagggtcttgctatgttgcccaggctggtctcaaactcctggcctcaagtgatcctacctcctttgcctcccaaagcactgggattataggcttgagccccctcgcccaacctgacacctttcttgaggcttgcagaagcaccaaggtgcctgcctgtgactggccgataacattttagcattttgatatgggcaggcatgctaactgagagtccagttctccagttagttcttgctttttgattggaatgttcctgcccattgctgttggaatgctcagaaagggccttggcctcctgaggacatcttcctcacatgcctgctctagcctgtgcctccccggggaaaaggagaggaccagggaagcctgtggacatcccttcctcccacaggctggaacacttttcagagtgggtgaatccactctcttttatctctctcctctttgtggcttacattattcctccccactctccttccctcattaacacacctttttgttgttgttgttgttgtcgtcgttgttgttgttgttccgggcaatatattgaaaacaaaggttactagacggcaaatcagacaacctgctttaacatctggaaatgactttgaacagagtaactcagtgtctccaggttctgctcacacatctgaatatgaaaataacaacatctgcccagcatatttttcatctgagctgctctgccccccaacctcgttgcggtgatcggttctccaacacattttgggtaactactatgtaaaagacacattgctagggaggaaatatcaatgtaaattgtggagcattatctaaatgtaaagtctcgttaccattaataaaacactcatctggaaacta

SEQ ID NO: 51689 - DNA, 429 bp, Homo sapiens
tttcctcacttttttgcctgagaaaatcctactattacaatatttatgatagatgtgagatgtagacttatctaaacttctacatttttccattttcccctgaggctaatgtgaataaaacaatgtaaataatagattacctctcctttgaaaatggaccagtgaggcaattccttggtaataactcaacacatattctactgatactgaatgttttatgtaagaccttgcaaaaatgtgtctgtttatggtcttggctacctttcatctcaatggggatgaaaaattatggactatgactttatatgtaaatcatcatgatgctatcattctttaatattcaaaaatggtttcttatattgttagggaggttgatccctttaagcataatttttaattgaaactacatttggggaatttgtagtttat

SEQ ID NO: 51690 - DNA, 2460 bp, Homo sapiens
  misc_feature (2448)..(2448): n is a, c, g, or t
tacactaaacttaaaacatttaaagtgatgtggcttctcttagagctcaagtgtgctaataattttaattgtcgttccctcatgtcattgctcttatataataatactatatttattgtaataaattaaattagaacttgcaataattttatcaagaacaaagtctaaatgatttctccttcaaatttgagatgcaattaaatgtatgaaatcctaatatcagaagttaagatcttttgacataaatatatcaagaaaatccttcaatccctcacatgtcaaataagtaaactaaggttaagaattcagttaagtaaaaagattggttaagaatttatttccttgggcttttcaaaataaaatccctttataattgcatggaaaatgttttccaatttattctggcttctggggactctgaaattttacagttcagtagatgtttctgttggtttctttttgaagaagagtggaattttagtttctgaaatataaagtgggagcactggatcctaatttcagtgtgttcatttatgcgtgttcctgagtctaaatttatttttttaaaaaataaaggtaattatccctgatctgcccatctgagaagatgttgtatagggcaaacatgaaaacatatgtgaaaggatatgaaaatgtgtaaacttctagataagcatgtaacagatacttaggcattttttcttataaaatcaatttcaacacagatgacataaattatcaaattactttgatttcattgagttttatagctttccccctctagtataaaagtgctgattactcatgatattcataggtgttttcatagccacagtatatcaaaagaagattgactagaatataaaacacccacactaataatagtaccaaacagacaattgatttgaaaacattgtttctttcttctgatcatcacattggtgtcagtttcattaattttataatgtctcctctagtggacaagagactggaaatggttcttagagataggatcttactccttcagatgattttataatttgtttactaaaatcttcttttatcttattaaagcttaggctcttggattgtgtgaaaaaaatgaggttctttcaatggctatttttatattgacttggtaaatcatttcaattttaaatattgtatgacaatggcctcatatttttcaatcataacaatcataggaaataatatattggatatttgcatatttttatgatagtatatctattactaataactgatacaaaaaatagatatttgtgcttttaataaagtaatatgagaagtaataatgacattctataaattgtcccatattctaatagttatgcataatgctttaagacttgtatactttgctttcttacatagtttttagttatcttcagaagtataaataatctattagtttataattcattgaaatatagttaaatcctctttaaatatttattttatttatttgtttaaacatgtggactttatttagaaaaattatatgattttgttactcttaatagagtttaagtacactttgtgatctgagtataattgtgcatattgaatctctggacttaaatactatggatattccagtatctcaaaattaagttgaaagttttattacagaataatgtagtattcagttctcttaagaattaaaaatcacttcgacagtcagttaagaagaaacacgacaaaaatatttttaggtaattaaataagatttgtctactaaccatcaagaataaattttaacacagttagtaaacattttattaagtataaagttggagcctgttgatcataaatgtatcagagttcactataataaaatattcaactttgccttaaattaaggaatgtttcaaaattcataaatgggctaatttgtgtccacttgaagagtttctttctttgcttttgatgctattctgtaaacaatggttccctacataattgtaatagtgttttacgttgtcacaacaccaggcaaaacccaagtgctattgcaagctttgtaaatctatcactgtcctcatccaccttatcagattcttctcttctttgtgtatgcactggtctttttaaaatctgtgatgtgtactgattgtagatttattccatactttcaagtgaatgctaataatatctaagagtaatgatttccctgagaaaactttatccatttgaatataatgaatgttcatatttcttggtgtaccaaagttataaaaaaagacagaaacaattttacatttaaaatcaatgaagtaaaacagaagatttagttaacacaattgtatttaattatttgcttaatatgtatttttaaaataacttatttgcatatgttgactaagtcatgctgttgaccctcaataaatgttaaattatgataatattgtcgacgcggccgcgaanttagtagtagta

SEQ ID NO: 51691 - DNA, 2202 bp, Homo sapiens
  misc_feature (2093)..(2093): n is a, c, g, or t
  misc_feature (2099)..(2099): n is a, c, g, or t
  misc_feature (2102)..(2102): n is a, c, g, or t
  misc_feature (2109)..(2109): n is a, c, g, or t
  misc_feature (2113)..(2113): n is a, c, g, or t
  misc_feature (2116)..(2116): n is a, c, g, or t
  misc_feature (2119)..(2120): n is a, c, g, or t
  misc_feature (2125)..(2125): n is a, c, g, or t
  misc_feature (2134)..(2134): n is a, c, g, or t
  misc_feature (2141)..(2141): n is a, c, g, or t
  misc_feature (2147)..(2147): n is a, c, g, or t
  misc_feature (2150)..(2150): n is a, c, g, or t
  misc_feature (2152)..(2153): n is a, c, g, or t
  misc_feature (2165)..(2165): n is a, c, g, or t
tacactaaacttaaaacatttaaagtgatgtggcttctcttagagctcaagtgtgctaataattttaattgtcgttccctcatgtcattgctcttatataataatactatatttattgtaataaattaaattagaacttgcaataattttatcaagaacaaagtctaaatgatttctccttcaaatttgagatgcaattaaatgtatgaaatcctaatatcagaagttaagatcttttgacataaatatatcaagaaaatccttcaatccctcacatgtcaaataagtaaactaaggttaagaattcagttaagtaaaaagattggttaagaatttatttccttgggcttttcaaaataaaatccctttataattgcatggaaaatgttttccaatttattctggcttctggggactctgaaattttacagttcagtagatgtttctgttggtttctttttgaagaagagtggaattttagtttctgaaatataaagtgggagcactggatcctaatttcagtgtgttcatttatgcgtgttcctgagtctaaatttatttttttaaaaaataaaggtaattatccctgatctgcccatctgagaagatgttgtatagggcaaacatgaaaacatatgtgaaaggatatgaaaatgtgtaaacttctagataagcatgtaacagatacttaggcattttttcttataaaatcaatttcaacacagatgacataaattatcaaattactttgatttcattgagttttatagctttccccctctagtataaaagtgctgattactcatgatattcataggtgttttcatagccacagtatatcaaaagaagattgactagaatataaaacacccacactaataatagtaccaaacagacaattgatttgaaaacattgtttctttcttctgatcatcacattggtgtcagtttcattaattttataatgtctcctctagtggacaagagactggaaatggttcttagagataggatcttactccttcagatgattttataatttgtttactaaaatcttcttttatcttattaaagcttaggctcttggattgtgtgaaaaaaatgaggttctttcaatggctatttttatattgacttggtaaatcatttcaattttaaatattgtatgacaatggcctcatatttttcaatcataacaatcataggaaataatatattggatatttgcatatttttatgatagtatatctattactaataactgatacaaaaaatagatatttgtgcttttaataaagtaatatgagaagtaataatgacattctataaattgtcccatattctaatagttatgcataatgctttaagacttgtatactttgctttcttacatagtttttagttatcttcagaagtataaataatctattagtttataattcattgaaatatagttaaatcctctttaaatatttattttatttatttgtttaaacatgtggactttatttagaaaaattatatgattttgttactcttaatagagtttaagtacactttgtgatctgagtataattgtgcatattgaatctctggacttaaatactatggatattccagtatctcaaaattaagttgaaagttttattacagaataatgtagtattcagttctcttaagaattaaaaatcacttcgacagtcagttaagaagaaacacgacaaaaatatttttaggtaattaaataagatttgtctactaaccatcaagaataaattttaacacagttagtaaacattttattaagtataaagttggagcctgttgatcataaatgtatcagagttcactataataaaatattcaactttgccttaaattaaggaatgtttcaaaattcataaatgggctaatttgtgtccacttgaagagtttctttctttgcttttgatgctattctgtaaacaatggttccctacataattgtaatagtgttttacgttgtcacaacaccaggcaaaacccaagtgctattgcaagctttgtaaatctatcactgtcctcatccaccttatcagattcttctcttctgnttgccnggntttaaancggnggntcnntggcntttcccatncggaggnaaattnaananntccggaaaatcngaaaaagggtttggggcataaaaaacattattggaaa

SEQ ID NO: 51692 - DNA, 2165 bp, Homo sapiens
cgcatagacagcccggttaatcggacgaggcaggactgcgccgcgtcttcctcaaggttgagaacaaaaacatgcacctggagtttccccggagccctctgcgtggttgagcttcggtggaatttcggggctcttggctgccagccgcgcttgcctggtagcaacagaaaccagtcctgctcgcctccgtggacatttcattaccatccagaagtgtctcccactgaaggcatccgtggttgtttttaagccacaaaaaagccacacccaagatcacctgacacccaccctgacaagtgtccatgatgctgggccctgagggaggtgaaggctttgtggtcaagctccgtggcctgccctggtcctgctctgttgaggacgtgcagaacttcctctctgactgcacgattcatgatggggccgcaggtgtccatttcatctacactagagagggcaggcagagtggtgaggcttttgttgaacttggatcagaagatgatgtaaaaatggccctgaaaaaagacagggaaagcatgggacaccggtacattgaggtgttcaagtcccacagaaccgagatggattgggtgttgaagcacagtggtcccaacagtgccgacagcgccaacgatggcttcgtgcggcttcgaggactcccatttggatgcacaaaggaagaaattgttcagttcttctcagggttggaaattgtgccaaacgggatcacattgcctgtggaccccgaaggcaagattacaggggaagcgttcgtgcagtttgcctcgcaggagttagctgagaaggctctagggaaacacaaggagaggatagggcacaggtacattgaggtgtttaagagcagccaggaggaagttaggtcatactcagatccccctctgaagttcatgtccgtgcagcggccagggccctatgaccggcccgggactgccaggaggtacattggcatcgtgaagcaggcaggcctggaaaggatgaggcctggtgcctacagcacaggctacgggggctacgaggagtacagtggcctcagtgatggctacggcttcaccaccgacctgttcgggagagacctcagctactgtctctccggaatgtatgaccacagatacggcgacagtgagttcacagtgcagagcaccacaggccactgtgtccacatgaggggcctgccgtacaaagcgaccgagaacgacatttacaacttcttctctcctctcaaccctgtgagagtccatattgagattggcccagatggaagagtgacgggtgaagcagatgttgagtttgctactcatgaagaagctgtggcagctatgtccaaagacagggccaatatgcagcacagatatatagaactcttcttgaattcaacaacaggggccagcaatggggcgtatagcagccaggtgatgcaaggcatgggggtgtctgctgcccaggccacttacagtggcctggagagccagtcagtgagtggctgttacggggccggctacagtgggcagaacagcatgggtggctatgactagttttgttaggaacatttgagttacttcaatcattttcacaggcagccaacaagcaattaagagcagttataatagaggaagctgggggacccattttgcaccatgagtttgtgaaaaatctggattaaaaaattacctcttcagtgttttctcatgcaaaattttcttctagcatgtgataatgagtaaactaaaactattttcagcttttctcaattaacattttggtagtatacttcagagtgatgttatctaagtttaagtagtttaagtatgttaaatgtggatcttttacaccacatcacagtgaacacactggggagacgtgcttttttggaaaactcaaaggtgctagctccctgattcaaagaaatatttctcatgtttgttcattctagtttatattttcatttaaaatcctttaggttaagtttaagctttttaaaagttagttttgagaattgagacacaatactaatactgtaggaattggtgaggccttgacttaaaactttctttgtactgtgatttccttttgggtgtattttgctaagtgaaacttgttaaattttttgttaactaaatttttttcttaaaataaagactttttcacaa

SEQ ID NO: 51693 - DNA, 2680 bp, Homo sapiens
gctcgcaggcgggggtttccatggtgatggtcaacaagcctcaactgcctctgctacaactgccaagttccccgcgtcccaccctcctctaggtgctccaagggaccaccggggtgcctgatacgagagcgggagtgtagagactcggaggccgaggttgagaacaaaaacatgcacctggagtttccccggagccctctgcgtggttgagcttcggtggaatttcggggctcttggctgccagccgcgcttgcctggtagcaacagaaaccagtcctgctcgcctccgtggacatttcattaccatccagaagtgtctcccactgaaggcatccgtggttgtttttaagccacaaaaaagccacacccaagatcacctgacacccaccctgacaagtgtccatgatgctgggccctgagggaggtgaaggctttgtggtcaagctccgtggcctgccctggtcctgctctgttgaggacgtgcagaacttcctctctgactgcacgattcatgatggggccgcaggtgtccatttcatctacactagagagggcaggcagagtggtgaggcttttgttgaacttggatcagaagatgatgtaaaaatggccctgaaaaaagacagggaaagcatgggacaccggtacattgaggtgttcaagtcccacagaaccgagatggattgggtgttgaagcacagtggtcccaacagtgccgacagcgccaacgatggcttcgtgcggcttcgaggactcccatttggatgcacaaaggaagaaattgttcagttcttctcagggttggaaattgtgccaaacgggatcacattgcctgtggaccccgaaggcaagattacaggggaagcgttcgtgcagtttgcctcgcaggagttagctgagaaggctctagggaaacacaaggagaggatagggcacaggtacattgaggtgtttaagagcagccaggaggaagttaggtcatactcagatccccctctgaagttcatgtccgtgcagcggccagggccctatgaccggcccgggactgccaggaggtacattggcatcgtgaagcaggcaggcctggaaaggatgaggcctggtgcctacagcacaggctacgggggctacgaggagtacagtggcctcagtgatggctacggcttcaccaccgacctgttcgggagagacctcagctactgtctctccggaatgtatgaccacagatacggcgacagtgagttcacagtgcagagcaccacaggccactgtgtccacatgaggggcctgccgtacaaagcgaccgagaacgacatttacaacttcttctctcctctcaaccctgtgagagtccatattgagattggcccagatggaagagtgacgggtgaagcagatgttgagtttgctactcatgaagaagctgtggcagctatgtccaaagacagggccaatatgcagcacagatatatagaactcttcttgaattcaacaacaggggccagcaatggggcgtatagcagccaggtgatgcaaggcatgggggtgtctgctgcccaggccacttacagtggcctggagagccagtcagtgagtggctgttacggggccggctacagtgggcagaacagcatgggtggctatgactagttttgttaggaacatttgagttacttcaatcattttcacaggcagccaacaagcaattaagagcagttataatagaggaagctgggggacccattttgcaccatgagtttgtgaaaaatctggattaaaaaattacctcttcagtgttttctcatgcaaaattttcttctagcatgtgataatgagtaaactaaaactattttcagcttttctcaattaacattttggtagtatacttcagagtgatgttatctaagtttaagtagtttaagtatgttaaatgtggatcttttacaccacatcacagtgaacacactggggagacgtgcttttttggaaaactcaaaggtgctagctccctgattcaaagaaatatttctcatgtttgttcattctagtttatattttcatttaaaatcctttaggttaagtttaagctttttaaaagttagttttgagaattgagacacaatactaatactgtaggaattggtgaggccttgacttaaaactttctttgtactgtgatttccttttgggtgtattttgctaagtgaaacttgttaaattttttgttaactaaatttttttcttaaaataaagactttttcacaatgactggcacagattactcagcaaaagatagcaaaacgggtggttgaagataattcattttaatcgtaatgtattttagtgtgaatttaaaaatttcatacatcaaatctatgatctcccttatattcttatgatgaggctaaataaaagtctaataaaaatgttaaatatgtgaatggtggaaatggtgactagcagcacacattctgggaagcatcaaatagacacacggccccagccacctgcaacttatgtgcactgttgtaaaccattcagaattttcctgctaggcccttgatgctggagtcacatctgttgatagctggagaactttagtttcaagtactacattgtgaaagcaattattttgtttctagtttttataaaatgctgatttaaacttttaaaattggtc

SEQ ID NO: 51694 - DNA, 2654 bp, Homo sapiens
acgccggacgcagaaactccgccctgccgcggtccttgcgtccttccggctccgtcgtggaagcaggactgcgccgcgtcttcctcaaggtggggttcggggggccaccgaatcgctgtcacgccggcaggttgagaacaaaaacatgcacctggagtttccccggagccctctgcgtggttgagcttcggtggaatttcggggctcttggctgccagccgcgcttgcctggtagcaacagaaaccagtcctgctcgcctccgtggacatttcattaccatccagaagtgtctcccactgaaggcatccgtggttgtttttaagccacaaaaaagccacacccaagatcacctgacacccaccctgacaagtgtccatgatgctgggccctgagggaggtgaaggctttgtggtcaagctccgtggcctgccctggtcctgctctgttgaggacgtgcagaacttcctctctgactgcacgattcatgatggggccgcaggtgtccatttcatctacactagagagggcaggcagagtggtgaggcttttgttgaacttggatcagaagatgatgtaaaaatggccctgaaaaaagacagggaaagcatgggacaccggtacattgaggtgttcaagtcccacagaaccgagatggattgggtgttgaagcacagtggtcccaacagtgccgacagcgccaacgatggcttcgtgcggcttcgaggactcccatttggatgcacaaaggaagaaattgttcagttcttctcagggttggaaattgtgccaaacgggatcacattgcctgtggaccccgaaggcaagattacaggggaagcgttcgtgcagtttgcctcgcaggagttagctgagaaggctctagggaaacacaaggagaggatagggcacaggtacattgaggtgtttaagagcagccaggaggaagttaggtcatactcagatccccctctgaagttcatgtccgtgcagcggccagggccctatgaccggcccgggactgccaggaggtacattggcatcgtgaagcaggcaggcctggaaaggatgaggcctggtgcctacagcacaggctacgggggctacgaggagtacagtggcctcagtgatggctacggcttcaccaccgacctgttcgggagagacctcagctactgtctctccggaatgtatgaccacagatacggcgacagtgagttcacagtgcagagcaccacaggccactgtgtccacatgaggggcctgccgtacaaagcgaccgagaacgacatttacaacttcttctctcctctcaaccctgtgagagtccatattgagattggcccagatggaagagtgacgggtgaagcagatgttgagtttgctactcatgaagaagctgtggcagctatgtccaaagacagggccaatatgcagcacagatatatagaactcttcttgaattcaacaacaggggccagcaatggggcgtatagcagccaggtgatgcaaggcatgggggtgtctgctgcccaggccacttacagtggcctggagagccagtcagtgagtggctgttacggggccggctacagtgggcagaacagcatgggtggctatgactagttttgttaggaacatttgagttacttcaatcattttcacaggcagccaacaagcaattaagagcagttataatagaggaagctgggggacccattttgcaccatgagtttgtgaaaaatctggattaaaaaattacctcttcagtgttttctcatgcaaaattttcttctagcatgtgataatgagtaaactaaaactattttcagcttttctcaattaacattttggtagtatacttcagagtgatgttatctaagtttaagtagtttaagtatgttaaatgtggatcttttacaccacatcacagtgaacacactggggagacgtgcttttttggaaaactcaaaggtgctagctccctgattcaaagaaatatttctcatgtttgttcattctagtttatattttcatttaaaatcctttaggttaagtttaagctttttaaaagttagttttgagaattgagacacaatactaatactgtaggaattggtgaggccttgacttaaaactttctttgtactgtgatttccttttgggtgtattttgctaagtgaaacttgttaaattttttgttaactaaatttttttcttaaaataaagactttttcacaatgactggcacagattactcagcaaaagatagcaaaacgggtggttgaagataattcattttaatcgtaatgtattttagtgtgaatttaaaaatttcatacatcaaatctatgatctcccttatattcttatgatgaggctaaataaaagtctaataaaaatgttaaatatgtgaatggtggaaatggtgactagcagcacacattctgggaagcatcaaatagacacacggccccagccacctgcaacttatgtgcactgttgtaaaccattcagaattttcctgctaggcccttgatgctggagtcacatctgttgatagctggagaactttagtttcaagtactacattgtgaaagcaattattttgtttctagtttttataaaatgctgatttaaacttttaaaattggtc

SEQ ID NO: 51695 - DNA, 2239 bp, Homo sapiens
acgccggacgcagaaactccgccctgccgcggtccttgcgtccttccggctccgtcgtggaagcaggactgcgccgcgtcttcctcaaggtggggttcggggggccaccgaatcgctgtcacgccggcaggttgagaacaaaaacatgcacctggagtttccccggagccctctgcgtggttgagcttcggtggaatttcggggctcttggctgccagccgcgcttgcctggtagcaacagaaaccagtcctgctcgcctccgtggacatttcattaccatccagaagtgtctcccactgaaggcatccgtggttgtttttaagccacaaaaaagccacacccaagatcacctgacacccaccctgacaagtgtccatgatgctgggccctgagggaggtgaaggctttgtggtcaagctccgtggcctgccctggtcctgctctgttgaggacgtgcagaacttcctctctgactgcacgattcatgatggggccgcaggtgtccatttcatctacactagagagggcaggcagagtggtgaggcttttgttgaacttggatcagaagatgatgtaaaaatggccctgaaaaaagacagggaaagcatgggacaccggtacattgaggtgttcaagtcccacagaaccgagatggattgggtgttgaagcacagtggtcccaacagtgccgacagcgccaacgatggcttcgtgcggcttcgaggactcccatttggatgcacaaaggaagaaattgttcagttcttctcagggttggaaattgtgccaaacgggatcacattgcctgtggaccccgaaggcaagattacaggggaagcgttcgtgcagtttgcctcgcaggagttagctgagaaggctctagggaaacacaaggagaggatagggcacaggtacattgaggtgtttaagagcagccaggaggaagttaggtcatactcagatccccctctgaagttcatgtccgtgcagcggccagggccctatgaccggcccgggactgccaggaggtacattggcatcgtgaagcaggcaggcctggaaaggatgaggcctggtgcctacagcacaggctacgggggctacgaggagtacagtggcctcagtgatggctacggcttcaccaccgacctgttcgggagagacctcagctactgtctctccggaatgtatgaccacagatacggcgacagtgagttcacagtgcagagcaccacaggccactgtgtccacatgaggggcctgccgtacaaagcgaccgagaacgacatttacaacttcttctctcctctcaaccctgtgagagtccatattgagattggcccagatggaagagtgacgggtgaagcagatgttgagtttgctactcatgaagaagctgtggcagctatgtccaaagacagggccaatatgcagcacagatatatagaactcttcttgaattcaacaacaggggccagcaatggggcgtatagcagccaggtgatgcaaggcatgggggtgtctgctgcccaggccacttacagtggcctggagagccagtcagtgagtggctgttacggggccggctacagtgggcagaacagcatgggtggctatgactagttttgttaggaacatttgagttacttcaatcattttcacaggcagccaacaagcaattaagagcagttataatagaggaagctgggggacccattttgcaccatgagtttgtgaaaaatctggattaaaaaattacctcttcagtgttttctcatgcaaaattttcttctagcatgtgataatgagtaaactaaaactattttcagcttttctcaattaacattttggtagtatacttcagagtgatgttatctaagtttaagtagtttaagtatgttaaatgtggatcttttacaccacatcacagtgaacacactggggagacgtgcttttttggaaaactcaaaggtgctagctccctgattcaaagaaatatttctcatgtttgttcattctagtttatattttcatttaaaatcctttaggttaagtttaagctttttaaaagttagttttgagaattgagacacaatactaatactgtaggaattggtgaggccttgacttaaaactttctttgtactgtgatttccttttgggtgtattttgctaagtgaaacttgttaaattttttgttaactaaatttttttcttaaaataaagactttttcacaa

SEQ ID NO: 51696 - DNA, 983 bp, Homo sapiens
  misc_feature (871)..(871): n is a, c, g, or t
gacataaggcaggacgaggccgcgttgttaatcggcaccgaggcttcttctctcctctcaaccctgtgagagtccatattgagattggcccagatggaagagtgacgggtgaagcagatgttgagtttgctactcatgaagaagctgtggcagctatgtccaaagacagggccaatatgcagcacagatatatagaactcttcttgaattcaacaacaggggccagcaatggggcgtatagcagccaggtgatgcaaggcatgggggtgtctgctgcccaggccacttacagtggcctggagagccagtcagtgagtggctgttacggggccggctacagtgggcagaacagcatgggtggctatgactagttttgttaggaacatttgagttacttcaatcattttcacaggcagccaacaagcaattaagagcagttataatagaggaagctgggggacccattttgcaccatgagtttgtgaaaaatctggattaaaaaattacctcttcagtgttttctcatgcaaaattttcttctagcatgtgataatgagtaaactaaaactattttcagcttttctcaattaacattttggtagtatacttcagagtgatgttatctaagtttaagtagtttaagtatgttaaatgtggatcttttacaccacatcacagtgaacacactggggagacgtgcttttttggaaaactcaaaggtgctagctccctgattcaaagaaatatttctcatgtttgttcattctagtttatattttcatttaaaatcctttaggttaagtttaagctttttaaaagttagttttgcattctatatgtggaatgggagctgataaattttgtatggatncttgggggaccgcacgtaccgtcattcggccatctcccaaaagcttcgaccaacaaacggggccatcccggcgccgcctttagccaccatgccggcaccgaccagacgcgac

SEQ ID NO: 51697 - DNA, 935 bp, Homo sapiens
  misc_feature (872)..(872): n is a, c, g, or t
  misc_feature (875)..(875): n is a, c, g, or t
  misc_feature (882)..(882): n is a, c, g, or t
  misc_feature (884)..(884): n is a, c, g, or t
  misc_feature (887)..(887): n is a, c, g, or t
  misc_feature (893)..(893): n is a, c, g, or t
ccccgctgcgccgctcgctccgccccccgcccggaagctcccgcccgagcccgcgcaggccctggggccgaccttcctgccgggccgggcggtccgaggctgctggagtgccgtgagcaggccgcgggaacgtcgccgtcaccttgtctcggggcctcggcgctgcttcccgccaaaacacgtttaccgcgcgcccgggcctcccaccttgcggaagggaccccaccaccacttggatttctgttgcaggttgagaacaaaaacatgcacctggagtttccccggagccctctgcgtggttgagcttcggtggaatttcggggctcttggctgccagccgcgcttgcctggtagcaacagaaaccagtcctgctcgcctccgtggacatttcattaccatccagaagtgtctcccactgaaggcatccgtggttgtttttaagccacaaaaaagccacacccaagatcacctgacacccaccctgacaagtgtccatgatgctgggccctgagggaggtgaaggctttgtggtcaagctccgtggcctgccctggtcctgctctgttgaggacgtgcagaacttcctctctgactgcacgattcatgatggggccgcaggtgtccatttcatctacactagagagggcaggcagagtggtgaggcttttgttgaacttggatcagaagatgatgtaaaaatggccctgaaaaaagacagggaaagcatgggacaccggtacattgaggtgttcaagtcccacagaaccgagatggattgggtgttgaagcacagtggtcccaacagtgccgacagcgccaacgatggcttcgtgcggcttcgaggactcccatttggatgcacaaaggctgnccncgctccncnggnggaaangggcacccgggtacatggccgtgggcccaagcaaatactcgc

SEQ ID NO: 51698 - DNA, 318 bp, Homo sapiens
tgagaattgagacacaatactaatactgtaggaattggtgaggccttgacttaacctaaaggattttaaatgaaaatatttctcatgtttgttcattctagtttatattttcatttaaaatcctttaggttaagtttaagctttttaaaagttagttttgagaattgagacacaatactaatactgtaggaattggtgaggccttgacttaaaactttctttgtactgtgatttccttttgggtgtattttgctaagtgaaacttgttaaattttttgttaactaaatttttttcttaaaataaagactttttcacaa

SEQ ID NO: 51699 - DNA, 764 bp, Homo sapiens
ccccgctgcgccgctcgctccgccccccgcccggaagctcccgcccgagcccgcgcaggccctggggccgaccttcctgccgggccgggcggtccgaggctgctggagtgccgtgagcaggccgcgggaacgtcgccgtcaccttgtctcggggcctcggcgctgcttcccgccaaaacacgtttaccgcgcgcccgggcctcccaccttgcggaagggaccccaccaccacttggatttctgttgcaggttgagaacaaaaacatgcacctggagtttccccggagccctctgcgtggttgagcttcggtggaatttcggggctcttggctgccagccgcgcttgcctggtagcaacagaaaccagtcctgctcgcctccgtggtaagtctagagcatgaaagtccgcgggcccggccgggtggactttggtttgagagtggaactaagtgagtaatgggggcggcgcggccagacgcgctcccagcctcctggcgagagtgctgcccggtttcccgggggcacgggagtgtgtctaggaggggaggccaggatccttcctcgagtcctgtcctgaacaaaagaaaacgaggtgggtggtggctaagaatctccatttccaaaaagcgctcccgaacgagctcttcgcagtgatacaggttggacgggattaacacttgccttcaggcagagccaatcaagataaatagggcgcgccggagtcctaccagttcggctatctgcagagtaaacagggccgttca

SEQ ID NO: 51700 - DNA, 2608 bp, Homo sapiens
tctcggccctgggccctttttcctcctcggctgcgccgcgtgtcctcggagcgcggtccctgtattggtctcctgctcctagaggttgagaacaaaaacatgcacctggagtttccccggagccctctgcgtggttgagcttcggtggaatttcggggctcttggctgccagccgcgcttgcctggtagcaacagaaaccagtcctgctcgcctccgtggacatttcattaccatccagaagtgtctcccactgaaggcatccgtggttgtttttaagccacaaaaaagccacacccaagatcacctgacacccaccctgacaagtgtccatgatgctgggccctgagggaggtgaaggctttgtggtcaagctccgtggcctgccctggtcctgctctgttgaggacgtgcagaacttcctctctgactgcacgattcatgatggggccgcaggtgtccatttcatctacactagagagggcaggcagagtggtgaggcttttgttgaacttggatcagaagatgatgtaaaaatggccctgaaaaaagacagggaaagcatgggacaccggtacattgaggtgttcaagtcccacagaaccgagatggattgggtgttgaagcacagtggtcccaacagtgccgacagcgccaacgatggcttcgtgcggcttcgaggactcccatttggatgcacaaaggaagaaattgttcagttcttctcagggttggaaattgtgccaaacgggatcacattgcctgtggaccccgaaggcaagattacaggggaagcgttcgtgcagtttgcctcgcaggagttagctgagaaggctctagggaaacacaaggagaggatagggcacaggtacattgaggtgtttaagagcagccaggaggaagttaggtcatactcagatccccctctgaagttcatgtccgtgcagcggccagggccctatgaccggcccgggactgccaggaggtacattggcatcgtgaagcaggcaggcctggaaaggatgaggcctggtgcctacagcacaggctacgggggctacgaggagtacagtggcctcagtgatggctacggcttcaccaccgacctgttcgggagagacctcagctactgtctctccggaatgtatgaccacagatacggcgacagtgagttcacagtgcagagcaccacaggccactgtgtccacatgaggggcctgccgtacaaagcgaccgagaacgacatttacaacttcttctctcctctcaaccctgtgagagtccatattgagattggcccagatggaagagtgacgggtgaagcagatgttgagtttgctactcatgaagaagctgtggcagctatgtccaaagacagggccaatatgcagcacagatatatagaactcttcttgaattcaacaacaggggccagcaatggggcgtatagcagccaggtgatgcaaggcatgggggtgtctgctgcccaggccacttacagtggcctggagagccagtcagtgagtggctgttacggggccggctacagtgggcagaacagcatgggtggctatgactagttttgttaggaacatttgagttacttcaatcattttcacaggcagccaacaagcaattaagagcagttataatagaggaagctgggggacccattttgcaccatgagtttgtgaaaaatctggattaaaaaattacctcttcagtgttttctcatgcaaaattttcttctagcatgtgataatgagtaaactaaaactattttcagcttttctcaattaacattttggtagtatacttcagagtgatgttatctaagtttaagtagtttaagtatgttaaatgtggatcttttacaccacatcacagtgaacacactggggagacgtgcttttttggaaaactcaaaggtgctagctccctgattcaaagaaatatttctcatgtttgttcattctagtttatattttcatttaaaatcctttaggttaagtttaagctttttaaaagttagttttgagaattgagacacaatactaatactgtaggaattggtgaggccttgacttaaaactttctttgtactgtgatttccttttgggtgtattttgctaagtgaaacttgttaaattttttgttaactaaatttttttcttaaaataaagactttttcacaatgactggcacagattactcagcaaaagatagcaaaacgggtggttgaagataattcattttaatcgtaatgtattttagtgtgaatttaaaaatttcatacatcaaatctatgatctcccttatattcttatgatgaggctaaataaaagtctaataaaaatgttaaatatgtgaatggtggaaatggtgactagcagcacacattctgggaagcatcaaatagacacacggccccagccacctgcaacttatgtgcactgttgtaaaccattcagaattttcctgctaggcccttgatgctggagtcacatctgttgatagctggagaactttagtttcaagtactacattgtgaaagcaattattttgtttctagtttttataaaatgctgatttaaacttttaaaattggtc

SEQ ID NO: 51701 - DNA, 2613 bp, Homo sapiens
cgaggtacgaggccgggtgttactcggcagaggggctgcgccgcgtgtcctcggagcgcggtccctgtattggtctcctgctcctagaggttgagaacaaaaacatgcacctggagtttccccggagccctctgcgtggttgagcttcggtggaatttcggggctcttggctgccagccgcgcttgcctggtagcaacagaaaccagtcctgctcgcctccgtggacatttcattaccatccagaagtgtctcccactgaaggcatccgtggttgtttttaagccacaaaaaagccacacccaagatcacctgacacccaccctgacaagtgtccatgatgctgggccctgagggaggtgaaggctttgtggtcaagctccgtggcctgccctggtcctgctctgttgaggacgtgcagaacttcctctctgactgcacgattcatgatggggccgcaggtgtccatttcatctacactagagagggcaggcagagtggtgaggcttttgttgaacttggatcagaagatgatgtaaaaatggccctgaaaaaagacagggaaagcatgggacaccggtacattgaggtgttcaagtcccacagaaccgagatggattgggtgttgaagcacagtggtcccaacagtgccgacagcgccaacgatggcttcgtgcggcttcgaggactcccatttggatgcacaaaggaagaaattgttcagttcttctcagggttggaaattgtgccaaacgggatcacattgcctgtggaccccgaaggcaagattacaggggaagcgttcgtgcagtttgcctcgcaggagttagctgagaaggctctagggaaacacaaggagaggatagggcacaggtacattgaggtgtttaagagcagccaggaggaagttaggtcatactcagatccccctctgaagttcatgtccgtgcagcggccagggccctatgaccggcccgggactgccaggaggtacattggcatcgtgaagcaggcaggcctggaaaggatgaggcctggtgcctacagcacaggctacgggggctacgaggagtacagtggcctcagtgatggctacggcttcaccaccgacctgttcgggagagacctcagctactgtctctccggaatgtatgaccacagatacggcgacagtgagttcacagtgcagagcaccacaggccactgtgtccacatgaggggcctgccgtacaaagcgaccgagaacgacatttacaacttcttctctcctctcaaccctgtgagagtccatattgagattggcccagatggaagagtgacgggtgaagcagatgttgagtttgctactcatgaagaagctgtggcagctatgtccaaagacagggccaatatgcagcacagatatatagaactcttcttgaattcaacaacaggggccagcaatggggcgtatagcagccaggtgatgcaaggcatgggggtgtctgctgcccaggccacttacagtggcctggagagccagtcagtgagtggctgttacggggccggctacagtgggcagaacagcatgggtggctatgactagttttgttaggaacatttgagttacttcaatcattttcacaggcagccaacaagcaattaagagcagttataatagaggaagctgggggacccattttgcaccatgagtttgtgaaaaatctggattaaaaaattacctcttcagtgttttctcatgcaaaattttcttctagcatgtgataatgagtaaactaaaactattttcagcttttctcaattaacattttggtagtatacttcagagtgatgttatctaagtttaagtagtttaagtatgttaaatgtggatcttttacaccacatcacagtgaacacactggggagacgtgcttttttggaaaactcaaaggtgctagctccctgattcaaagaaatatttctcatgtttgttcattctagtttatattttcatttaaaatcctttaggttaagtttaagctttttaaaagttagttttgagaattgagacacaatactaatactgtaggaattggtgaggccttgacttaaaactttctttgtactgtgatttccttttgggtgtattttgctaagtgaaacttgttaaattttttgttaactaaatttttttcttaaaataaagactttttcacaatgactggcacagattactcagcaaaagatagcaaaacgggtggttgaagataattcattttaatcgtaatgtattttagtgtgaatttaaaaatttcatacatcaaatctatgatctcccttatattcttatgatgaggctaaataaaagtctaataaaaatgttaaatatgtgaatggtggaaatggtgactagcagcacacattctgggaagcatcaaatagacacacggccccagccacctgcaacttatgtgcactgttgtaaaccattcagaattttcctgctaggcccttgatgctggagtcacatctgttgatagctggagaactttagtttcaagtactacattgtgaaagcaattattttgtttctagtttttataaaatgctgatttaaacttttaaaattggtc

SEQ ID NO: 51702 - DNA, 2613 bp, Homo sapiens
acgccggacgcagaaactccgccctgccgcggtccttgcgtccttccggctccgtcgtggaagcaggactgcgccgcgtcttcctcaaggttgagaacaaaaacatgcacctggagtttccccggagccctctgcgtggttgagcttcggtggaatttcggggctcttggctgccagccgcgcttgcctggtagcaacagaaaccagtcctgctcgcctccgtggacatttcattaccatccagaagtgtctcccactgaaggcatccgtggttgtttttaagccacaaaaaagccacacccaagatcacctgacacccaccctgacaagtgtccatgatgctgggccctgagggaggtgaaggctttgtggtcaagctccgtggcctgccctggtcctgctctgttgaggacgtgcagaacttcctctctgactgcacgattcatgatggggccgcaggtgtccatttcatctacactagagagggcaggcagagtggtgaggcttttgttgaacttggatcagaagatgatgtaaaaatggccctgaaaaaagacagggaaagcatgggacaccggtacattgaggtgttcaagtcccacagaaccgagatggattgggtgttgaagcacagtggtcccaacagtgccgacagcgccaacgatggcttcgtgcggcttcgaggactcccatttggatgcacaaaggaagaaattgttcagttcttctcagggttggaaattgtgccaaacgggatcacattgcctgtggaccccgaaggcaagattacaggggaagcgttcgtgcagtttgcctcgcaggagttagctgagaaggctctagggaaacacaaggagaggatagggcacaggtacattgaggtgtttaagagcagccaggaggaagttaggtcatactcagatccccctctgaagttcatgtccgtgcagcggccagggccctatgaccggcccgggactgccaggaggtacattggcatcgtgaagcaggcaggcctggaaaggatgaggcctggtgcctacagcacaggctacgggggctacgaggagtacagtggcctcagtgatggctacggcttcaccaccgacctgttcgggagagacctcagctactgtctctccggaatgtatgaccacagatacggcgacagtgagttcacagtgcagagcaccacaggccactgtgtccacatgaggggcctgccgtacaaagcgaccgagaacgacatttacaacttcttctctcctctcaaccctgtgagagtccatattgagattggcccagatggaagagtgacgggtgaagcagatgttgagtttgctactcatgaagaagctgtggcagctatgtccaaagacagggccaatatgcagcacagatatatagaactcttcttgaattcaacaacaggggccagcaatggggcgtatagcagccaggtgatgcaaggcatgggggtgtctgctgcccaggccacttacagtggcctggagagccagtcagtgagtggctgttacggggccggctacagtgggcagaacagcatgggtggctatgactagttttgttaggaacatttgagttacttcaatcattttcacaggcagccaacaagcaattaagagcagttataatagaggaagctgggggacccattttgcaccatgagtttgtgaaaaatctggattaaaaaattacctcttcagtgttttctcatgcaaaattttcttctagcatgtgataatgagtaaactaaaactattttcagcttttctcaattaacattttggtagtatacttcagagtgatgttatctaagtttaagtagtttaagtatgttaaatgtggatcttttacaccacatcacagtgaacacactggggagacgtgcttttttggaaaactcaaaggtgctagctccctgattcaaagaaatatttctcatgtttgttcattctagtttatattttcatttaaaatcctttaggttaagtttaagctttttaaaagttagttttgagaattgagacacaatactaatactgtaggaattggtgaggccttgacttaaaactttctttgtactgtgatttccttttgggtgtattttgctaagtgaaacttgttaaattttttgttaactaaatttttttcttaaaataaagactttttcacaatgactggcacagattactcagcaaaagatagcaaaacgggtggttgaagataattcattttaatcgtaatgtattttagtgtgaatttaaaaatttcatacatcaaatctatgatctcccttatattcttatgatgaggctaaataaaagtctaataaaaatgttaaatatgtgaatggtggaaatggtgactagcagcacacattctgggaagcatcaaatagacacacggccccagccacctgcaacttatgtgcactgttgtaaaccattcagaattttcctgctaggcccttgatgctggagtcacatctgttgatagctggagaactttagtttcaagtactacattgtgaaagcaattattttgtttctagtttttataaaatgctgatttaaacttttaaaattggtc

SEQ ID NO: 51703 - DNA, 2626 bp, Homo sapiens
ccgtgacccacgtccggctgccggtcttggatcacgaggcctccgcttcccggactccggaccccgcgcctcctcggggccgacgggccagtccctggcgtggttgagaacaaaaacatgcacctggagtttccccggagccctctgcgtggttgagcttcggtggaatttcggggctcttggctgccagccgcgcttgcctggtagcaacagaaaccagtcctgctcgcctccgtggacatttcattaccatccagaagtgtctcccactgaaggcatccgtggttgtttttaagccacaaaaaagccacacccaagatcacctgacacccaccctgacaagtgtccatgatgctgggccctgagggaggtgaaggctttgtggtcaagctccgtggcctgccctggtcctgctctgttgaggacgtgcagaacttcctctctgactgcacgattcatgatggggccgcaggtgtccatttcatctacactagagagggcaggcagagtggtgaggcttttgttgaacttggatcagaagatgatgtaaaaatggccctgaaaaaagacagggaaagcatgggacaccggtacattgaggtgttcaagtcccacagaaccgagatggattgggtgttgaagcacagtggtcccaacagtgccgacagcgccaacgatggcttcgtgcggcttcgaggactcccatttggatgcacaaaggaagaaattgttcagttcttctcagggttggaaattgtgccaaacgggatcacattgcctgtggaccccgaaggcaagattacaggggaagcgttcgtgcagtttgcctcgcaggagttagctgagaaggctctagggaaacacaaggagaggatagggcacaggtacattgaggtgtttaagagcagccaggaggaagttaggtcatactcagatccccctctgaagttcatgtccgtgcagcggccagggccctatgaccggcccgggactgccaggaggtacattggcatcgtgaagcaggcaggcctggaaaggatgaggcctggtgcctacagcacaggctacgggggctacgaggagtacagtggcctcagtgatggctacggcttcaccaccgacctgttcgggagagacctcagctactgtctctccggaatgtatgaccacagatacggcgacagtgagttcacagtgcagagcaccacaggccactgtgtccacatgaggggcctgccgtacaaagcgaccgagaacgacatttacaacttcttctctcctctcaaccctgtgagagtccatattgagattggcccagatggaagagtgacgggtgaagcagatgttgagtttgctactcatgaagaagctgtggcagctatgtccaaagacagggccaatatgcagcacagatatatagaactcttcttgaattcaacaacaggggccagcaatggggcgtatagcagccaggtgatgcaaggcatgggggtgtctgctgcccaggccacttacagtggcctggagagccagtcagtgagtggctgttacggggccggctacagtgggcagaacagcatgggtggctatgactagttttgttaggaacatttgagttacttcaatcattttcacaggcagccaacaagcaattaagagcagttataatagaggaagctgggggacccattttgcaccatgagtttgtgaaaaatctggattaaaaaattacctcttcagtgttttctcatgcaaaattttcttctagcatgtgataatgagtaaactaaaactattttcagcttttctcaattaacattttggtagtatacttcagagtgatgttatctaagtttaagtagtttaagtatgttaaatgtggatcttttacaccacatcacagtgaacacactggggagacgtgcttttttggaaaactcaaaggtgctagctccctgattcaaagaaatatttctcatgtttgttcattctagtttatattttcatttaaaatcctttaggttaagtttaagctttttaaaagttagttttgagaattgagacacaatactaatactgtaggaattggtgaggccttgacttaaaactttctttgtactgtgatttccttttgggtgtattttgctaagtgaaacttgttaaattttttgttaactaaatttttttcttaaaataaagactttttcacaatgactggcacagattactcagcaaaagatagcaaaacgggtggttgaagataattcattttaatcgtaatgtattttagtgtgaatttaaaaatttcatacatcaaatctatgatctcccttatattcttatgatgaggctaaataaaagtctaataaaaatgttaaatatgtgaatggtggaaatggtgactagcagcacacattctgggaagcatcaaatagacacacggccccagccacctgcaacttatgtgcactgttgtaaaccattcagaattttcctgctaggcccttgatgctggagtcacatctgttgatagctggagaactttagtttcaagtactacattgtgaaagcaattattttgtttctagtttttataaaatgctgatttaaacttttaaaattggtc

SEQ ID NO: 51704 - DNA, 2773 bp, Homo sapiens
ccccgctgcgccgctcgctccgccccccgcccggaagctcccgcccgagcccgcgcaggccctggggccgaccttcctgccgggccgggcggtccgaggctgctggagtgccgtgagcaggccgcgggaacgtcgccgtcaccttgtctcggggcctcggcgctgcttcccgccaaaacacgtttaccgcgcgcccgggcctcccaccttgcggaagggaccccaccaccacttggatttctgttgcaggttgagaacaaaaacatgcacctggagtttccccggagccctctgcgtggttgagcttcggtggaatttcggggctcttggctgccagccgcgcttgcctggtagcaacagaaaccagtcctgctcgcctccgtggacatttcattaccatccagaagtgtctcccactgaaggcatccgtggttgtttttaagccacaaaaaagccacacccaagatcacctgacacccaccctgacaagtgtccatgatgctgggccctgagggaggtgaaggctttgtggtcaagctccgtggcctgccctggtcctgctctgttgaggacgtgcagaacttcctctctgactgcacgattcatgatggggccgcaggtgtccatttcatctacactagagagggcaggcagagtggtgaggcttttgttgaacttggatcagaagatgatgtaaaaatggccctgaaaaaagacagggaaagcatgggacaccggtacattgaggtgttcaagtcccacagaaccgagatggattgggtgttgaagcacagtggtcccaacagtgccgacagcgccaacgatggcttcgtgcggcttcgaggactcccatttggatgcacaaaggaagaaattgttcagttcttctcagggttggaaattgtgccaaacgggatcacattgcctgtggaccccgaaggcaagattacaggggaagcgttcgtgcagtttgcctcgcaggagttagctgagaaggctctagggaaacacaaggagaggatagggcacaggtacattgaggtgtttaagagcagccaggaggaagttaggtcatactcagatccccctctgaagttcatgtccgtgcagcggccagggccctatgaccggcccgggactgccaggaggtacattggcatcgtgaagcaggcaggcctggaaaggatgaggcctggtgcctacagcacaggctacgggggctacgaggagtacagtggcctcagtgatggctacggcttcaccaccgacctgttcgggagagacctcagctactgtctctccggaatgtatgaccacagatacggcgacagtgagttcacagtgcagagcaccacaggccactgtgtccacatgaggggcctgccgtacaaagcgaccgagaacgacatttacaacttcttctctcctctcaaccctgtgagagtccatattgagattggcccagatggaagagtgacgggtgaagcagatgttgagtttgctactcatgaagaagctgtggcagctatgtccaaagacagggccaatatgcagcacagatatatagaactcttcttgaattcaacaacaggggccagcaatggggcgtatagcagccaggtgatgcaaggcatgggggtgtctgctgcccaggccacttacagtggcctggagagccagtcagtgagtggctgttacggggccggctacagtgggcagaacagcatgggtggctatgactagttttgttaggaacatttgagttacttcaatcattttcacaggcagccaacaagcaattaagagcagttataatagaggaagctgggggacccattttgcaccatgagtttgtgaaaaatctggattaaaaaattacctcttcagtgttttctcatgcaaaattttcttctagcatgtgataatgagtaaactaaaactattttcagcttttctcaattaacattttggtagtatacttcagagtgatgttatctaagtttaagtagtttaagtatgttaaatgtggatcttttacaccacatcacagtgaacacactggggagacgtgcttttttggaaaactcaaaggtgctagctccctgattcaaagaaatatttctcatgtttgttcattctagtttatattttcatttaaaatcctttaggttaagtttaagctttttaaaagttagttttgagaattgagacacaatactaatactgtaggaattggtgaggccttgacttaaaactttctttgtactgtgatttccttttgggtgtattttgctaagtgaaacttgttaaattttttgttaactaaatttttttcttaaaataaagactttttcacaatgactggcacagattactcagcaaaagatagcaaaacgggtggttgaagataattcattttaatcgtaatgtattttagtgtgaatttaaaaatttcatacatcaaatctatgatctcccttatattcttatgatgaggctaaataaaagtctaataaaaatgttaaatatgtgaatggtggaaatggtgactagcagcacacattctgggaagcatcaaatagacacacggccccagccacctgcaacttatgtgcactgttgtaaaccattcagaattttcctgctaggcccttgatgctggagtcacatctgttgatagctggagaactttagtttcaagtactacattgtgaaagcaattattttgtttctagtttttataaaatgctgatttaaacttttaaaattggtc

SEQ ID NO: 51705 - DNA, 2635 bp, Homo sapiens
  misc_feature (7)..(7): n is a, c, g, or t
  misc_feature (69)..(69): n is a, c, g, or t
attacgntgcgagaagacgacagaagggagacacaagcgcagaggtcatggcggatggccccaggtgtnaagcgcccagaaagcaggcgaacccgcggcgcccaataaacggttgagaacaaaaacatgcacctggagtttccccggagccctctgcgtggttgagcttcggtggaatttcggggctcttggctgccagccgcgcttgcctggtagcaacagaaaccagtcctgctcgcctccgtggacatttcattaccatccagaagtgtctcccactgaaggcatccgtggttgtttttaagccacaaaaaagccacacccaagatcacctgacacccaccctgacaagtgtccatgatgctgggccctgagggaggtgaaggctttgtggtcaagctccgtggcctgccctggtcctgctctgttgaggacgtgcagaacttcctctctgactgcacgattcatgatggggccgcaggtgtccatttcatctacactagagagggcaggcagagtggtgaggcttttgttgaacttggatcagaagatgatgtaaaaatggccctgaaaaaagacagggaaagcatgggacaccggtacattgaggtgttcaagtcccacagaaccgagatggattgggtgttgaagcacagtggtcccaacagtgccgacagcgccaacgatggcttcgtgcggcttcgaggactcccatttggatgcacaaaggaagaaattgttcagttcttctcagggttggaaattgtgccaaacgggatcacattgcctgtggaccccgaaggcaagattacaggggaagcgttcgtgcagtttgcctcgcaggagttagctgagaaggctctagggaaacacaaggagaggatagggcacaggtacattgaggtgtttaagagcagccaggaggaagttaggtcatactcagatccccctctgaagttcatgtccgtgcagcggccagggccctatgaccggcccgggactgccaggaggtacattggcatcgtgaagcaggcaggcctggaaaggatgaggcctggtgcctacagcacaggctacgggggctacgaggagtacagtggcctcagtgatggctacggcttcaccaccgacctgttcgggagagacctcagctactgtctctccggaatgtatgaccacagatacggcgacagtgagttcacagtgcagagcaccacaggccactgtgtccacatgaggggcctgccgtacaaagcgaccgagaacgacatttacaacttcttctctcctctcaaccctgtgagagtccatattgagattggcccagatggaagagtgacgggtgaagcagatgttgagtttgctactcatgaagaagctgtggcagctatgtccaaagacagggccaatatgcagcacagatatatagaactcttcttgaattcaacaacaggggccagcaatggggcgtatagcagccaggtgatgcaaggcatgggggtgtctgctgcccaggccacttacagtggcctggagagccagtcagtgagtggctgttacggggccggctacagtgggcagaacagcatgggtggctatgactagttttgttaggaacatttgagttacttcaatcattttcacaggcagccaacaagcaattaagagcagttataatagaggaagctgggggacccattttgcaccatgagtttgtgaaaaatctggattaaaaaattacctcttcagtgttttctcatgcaaaattttcttctagcatgtgataatgagtaaactaaaactattttcagcttttctcaattaacattttggtagtatacttcagagtgatgttatctaagtttaagtagtttaagtatgttaaatgtggatcttttacaccacatcacagtgaacacactggggagacgtgcttttttggaaaactcaaaggtgctagctccctgattcaaagaaatatttctcatgtttgttcattctagtttatattttcatttaaaatcctttaggttaagtttaagctttttaaaagttagttttgagaattgagacacaatactaatactgtaggaattggtgaggccttgacttaaaactttctttgtactgtgatttccttttgggtgtattttgctaagtgaaacttgttaaattttttgttaactaaatttttttcttaaaataaagactttttcacaatgactggcacagattactcagcaaaagatagcaaaacgggtggttgaagataattcattttaatcgtaatgtattttagtgtgaatttaaaaatttcatacatcaaatctatgatctcccttatattcttatgatgaggctaaataaaagtctaataaaaatgttaaatatgtgaatggtggaaatggtgactagcagcacacattctgggaagcatcaaatagacacacggccccagccacctgcaacttatgtgcactgttgtaaaccattcagaattttcctgctaggcccttgatgctggagtcacatctgttgatagctggagaactttagtttcaagtactacattgtgaaagcaattattttgtttctagtttttataaaatgctgatttaaacttttaaaattggtc

SEQ ID NO: 51706 - DNA, 2554 bp, Homo sapiens
tctcggccctgggccctttttcctcctcggctgcgccgcgtgtcctcggagcgcggtccctgtattggtctcctgctcctagaggttgagaacaaaaacatgcacctggagtttccccggagccctctgcgtggttgagcttcggtggaatttcggggctcttggctgccagccgcgcttgcctggtagcaacagaaaccagtcctgctcgcctccgtggacatttcattaccatccagaagtgtctcccactgaaggcatccgtggttgtttttaagccacaaaaaagccacacccaagatcacctgacacccaccctgacaagtgtccatgatgctgggccctgagggaggtgaaggctttgtggtcaagctccgtggcctgccctggtcctgctctgttgaggacgtgcagaacttcctctctgactgcacgattcatgatggggccgcaggtgtccatttcatctacactagagagggcaggcagagtggtgaggcttttgttgaacttggatcagaagatgatgtaaaaatggccctgaaaaaagacagggaaagcatgggacaccggtacattgaggtgttcaagtcccacagaaccgagatggattgggtgttgaagcacagtggtcccaacagtgccgacagcgccaacgatggcttcgtgcggcttcgaggactcccatttggatgcacaaaggaagaaattgttcagttcttctcagggttggaaattgtgccaaacgggatcacattgcctgtggaccccgaaggcaagattacaggggaagcgttcgtgcagtttgcctcgcaggagttagctgagaaggctctagggaaacacaaggagaggatagggcacaggtacattgaggtgtttaagagcagccaggaggaagttaggtcatactcagatccccctctgaagttcatgtccgtgcagcggccagggccctatgaccggcccgggactgccaggaggtacattggcatcgtgaagcaggcaggcctggaaaggatgaggcctggtgcctacagcacaggctacgggggctacgaggagtacagtggcctcagtgatggctacggcttcaccaccgacctgttcgggagagacctcagctactgtctctccggaatgtatgaccacagatacggcgacagtgagttcacagtgcagagcaccacaggccactgtgtccacatgaggggcctgccgtacaaagcgaccgagaacgacatttacaacttcttctctcctctcaaccctgtgagagtccatattgagattggcccagatggaagagtgacgggtgaagcagatgttgagtttgctactcatgaagaagctgtggcagctatgtccaaagacagggccaatatgcagcacagatatatagaactcttcttgaattcaacaacaggggccagcaatggggcgtatagcagccaggtgatgcaaggcatgggggtgtctgctgcccaggccacttacagtggcctggagagccagtcagtgagtggctgttacggggccggctacagtgggcagaacagcatgggtggctatgactagttttgttaggaacatttgagttacttcaatcattttcacaggcagccaacaagcaattaagagcagttataatagaggaagctgggggacccattttgcaccatgagtttgtgaaaaatctggattaaaaaattacctcttcagtgttttctcatgcaaaattttcttctagcatgtgataatgagtaaactaaaactattttcagcttttctcaattaacattttggtagtatacttcagagtgatgttatctaagtttaagtagtttaagtatgttaaatgtggatcttttacaccacatcacagtgaacacactggggagacgtgcttttttggaaaactcaaaggtgctagctccctgattcaaagaaatatttctcatgtttgttcattctagtttatattttcatttaaaatcctttaggttaagtttaagctttttaaaagttagttttgagaattgagacacaatactaatactgtaggaattggtgaggccttgacttaaaactttctttgtactgtgatttccttttgggtgtattttgctaagtgaaacttgttaaattttttgttaactaaatttttttcttaaaataaagactttttcacaatgactggcacagattactcagcaaaagatagcaaaacgggtggttgaagataattcattttaatcgtaatgtattttagtgtgaatttaaaaatttcatacatcaaatctatgatctcccttatattcttatgatgaggctaaataaaagtctaataaaacatcaaatagacacacggccccagccacctgcaacttatgtgcactgttgtaaaccattcagaattttcctgctaggcccttgatgctggagtcacatctgttgatagctggagaactttagtttcaagtactacattgtgaaagcaattattttgtttctagtttttataaaatgctgatttaaacttttaaaattggtc

SEQ ID NO: 51707 - DNA, 2392 bp, Homo sapiens
tctcggccctgggccctttttcctcctcggctgcgccgcgtgtcctcggagcgcggtccctgtattggtctcctgctcctagaggttgagaacaaaaacatgcacctggagtttccccggagccctctgcgtggttgagcttcggtggaatttcggggctcttggctgccagccgcgcttgcctggtagcaacagaaaccagtcctgctcgcctccgtggacatttcattaccatccagaagtgtctcccactgaaggcatccgtggttgtttttaagccacaaaaaagccacacccaagatcacctgacacccaccctgacaagtgtccatgatgctgggccctgagggaggtgaaggctttgtggtcaagctccgtggcctgccctggtcctgctctgttgaggacgtgcagaacttcctctctgactgcacgattcatgatggggccgcaggtgtccatttcatctacactagagagggcaggcagagtggtgaggcttttgttgaacttggatcagaagatgatgtaaaaatggccctgaaaaaagacagggaaagcatgggacaccggtacattgaggtgttcaagtcccacagaaccgagatggattgggtgttgaagcacagtggtcccaacagtgccgacagcgccaacgatggcttcgtgcggcttcgaggactcccatttggatgcacaaaggaagaaattgttcagttcttctcagggttggaaattgtgccaaacgggatcacattgcctgtggaccccgaaggcaagattacaggggaagcgttcgtgcagtttgcctcgcaggagttagctgagaaggctctagggaaacacaaggagaggatagggcacaggtacattgaggtgtttaagagcagccaggaggaagttaggtcatactcagatccccctctgaagttcatgtccgtgcagcggccagggccctatgaccggcccgggactgccaggaggtacattggcatcgtgaagcaggcaggcctggaaaggatgaggcctggtgcctacagcacaggctacgggggctacgaggagtacagtggcctcagtgatggctacggcttcaccaccgacctgttcgggagagacctcagctactgtctctccggaatgtatgaccacagatacggcgacagtgagttcacagtgcagagcaccacaggccactgtgtccacatgaggggcctgccgtacaaagcgaccgagaacgacatttacaacttcttctctcctctcaaccctgtgagagtccatattgagattggcccagatggaagagtgacgggtgaagcagatgttgagtttgctactcatgaagaagctgtggcagctatgtccaaagacagggccaatatgcagcacagatatatagaactcttcttgaattcaacaacaggggccagcaatggggcgtatagcagccaggtgatgcaaggcatgggggtgtctgctgcccaggccacttacagtggcctggagagccagtcagtgagtggctgttacggggccggctacagtgggcagaacagcatgggtggctatgactagttttgttaggaacatttgagttacttcaatcattttcacaggcagccaacaagcaattaagagcagttataatagaggaagctgggggacccattttgcaccatgagtttgtgaaaaatctggattaaaaaattacctcttcagtgttttctcatgcaaaattttcttctagcatgtgataatgagtaaactaaaactattttcagcttttctcaattaacattttggtagtatacttcagagtgatgttatctaagtttaagtagtttaagtatgttaaatgtggatcttttacaccacatcacagtgaacacactggggagacgtgcttttttggaaaactcaaaggtgctagctccctgattcaaagaaatatttctcatgtttgttcattctagtttatattttcatttaaaatcctttaggttaagtttaagctttttaaaagttagttttgagaattgagacacaatactaatactgtaggaattggtgaggccttgacttaaaactttctttgtactgtgatttccttttgggtgtattttgctaagtgaaacttgttaaattttttgttaactaaatttttttcttaaaataaagactttttcacaatgactggcacagattactcagcaaaagatagcaaaacgggtggttgaagataattcattttaatcgtaatgtattttagtgtgaatttaaaaatttcatacatcaaatctatgatctcccttatattcttatgattcaaacactagttcaatatctctgtcactctctctctctctctctctctcactctagctctctc

SEQ ID NO: 51708 - DNA, 2534 bp, Homo sapiens
ctagcaggaccttactggtatcccaccccacctggagtttccccggagccctctgcgtggttgagcttcggtggaatttcggggctcttggctgccagccgcgcttgcctggtagcaacagaaaccagtcctgctcgcctccgtggacatttcattaccatccagaagtgtctcccactgaaggcatccgtggttgtttttaagccacaaaaaagccacacccaagatcacctgacacccaccctgacaagtgtccatgatgctgggccctgagggaggtgaaggctttgtggtcaagctccgtggcctgccctggtcctgctctgttgaggacgtgcagaacttcctctctgactgcacgattcatgatggggccgcaggtgtccatttcatctacactagagagggcaggcagagtggtgaggcttttgttgaacttggatcagaagatgatgtaaaaatggccctgaaaaaagacagggaaagcatgggacaccggtacattgaggtgttcaagtcccacagaaccgagatggattgggtgttgaagcacagtggtcccaacagtgccgacagcgccaacgatggcttcgtgcggcttcgaggactcccatttggatgcacaaaggaagaaattgttcagttcttctcagggttggaaattgtgccaaacgggatcacattgcctgtggaccccgaaggcaagattacaggggaagcgttcgtgcagtttgcctcgcaggagttagctgagaaggctctagggaaacacaaggagaggatagggcacaggtacattgaggtgtttaagagcagccaggaggaagttaggtcatactcagatccccctctgaagttcatgtccgtgcagcggccagggccctatgaccggcccgggactgccaggaggtacattggcatcgtgaagcaggcaggcctggaaaggatgaggcctggtgcctacagcacaggctacgggggctacgaggagtacagtggcctcagtgatggctacggcttcaccaccgacctgttcgggagagacctcagctactgtctctccggaatgtatgaccacagatacggcgacagtgagttcacagtgcagagcaccacaggccactgtgtccacatgaggggcctgccgtacaaagcgaccgagaacgacatttacaacttcttctctcctctcaaccctgtgagagtccatattgagattggcccagatggaagagtgacgggtgaagcagatgttgagtttgctactcatgaagaagctgtggcagctatgtccaaagacagggccaatatgcagcacagatatatagaactcttcttgaattcaacaacaggggccagcaatggggcgtatagcagccaggtgatgcaaggcatgggggtgtctgctgcccaggccacttacagtggcctggagagccagtcagtgagtggctgttacggggccggctacagtgggcagaacagcatgggtggctatgactagttttgttaggaacatttgagttacttcaatcattttcacaggcagccaacaagcaattaagagcagttataatagaggaagctgggggacccattttgcaccatgagtttgtgaaaaatctggattaaaaaattacctcttcagtgttttctcatgcaaaattttcttctagcatgtgataatgagtaaactaaaactattttcagcttttctcaattaacattttggtagtatacttcagagtgatgttatctaagtttaagtagtttaagtatgttaaatgtggatcttttacaccacatcacagtgaacacactggggagacgtgcttttttggaaaactcaaaggtgctagctccctgattcaaagaaatatttctcatgtttgttcattctagtttatattttcatttaaaatcctttaggttaagtttaagctttttaaaagttagttttgagaattgagacacaatactaatactgtaggaattggtgaggccttgacttaaaactttctttgtactgtgatttccttttgggtgtattttgctaagtgaaacttgttaaattttttgttaactaaatttttttcttaaaataaagactttttcacaatgactggcacagattactcagcaaaagatagcaaaacgggtggttgaagataattcattttaatcgtaatgtattttagtgtgaatttaaaaatttcatacatcaaatctatgatctcccttatattcttatgatgaggctaaataaaagtctaataaaaatgttaaatatgtgaatggtggaaatggtgactagcagcacacattctgggaagcatcaaatagacacacggccccagccacctgcaacttatgtgcactgttgtaaaccattcagaattttcctgctaggcccttgatgctggagtcacatctgttgatagctggagaactttagtttcaagtactacattgtgaaagcaattattttgtttctagtttttataaaatgctgatttaaacttttaaaattggtc

SEQ ID NO: 51709 - DNA, 2043 bp, Homo sapiens
tctcgggccctgtattggtctcctgctcctagaggttgagaacagaaaccagtcctgctcgcctccgtggacatttcattaccatccagaagtgtctcccactgaaggcatccgtggttgtttttaagccacaaaaaagccacacccaagatcacctgacacccaccctgacaagtgtccatgatgctgggccctgagggaggtgaaggctttgtggtcaagctccgtggcctgccctggtcctgctctgttgaggacgtgcagaacttcctctctgactgcacgattcatgatggggccgcaggtgtccatttcatctacactagagagggcaggcagagtggtgaggcttttgttgaacttggatcagaagatgatgtaaaaatggccctgaaaaaagacagggaaagcatgggacaccggtacattgaggtgttcaagtcccacagaaccgagatggattgggtgttgaagcacagtggtcccaacagtgccgacagcgccaacgatggcttcgtgcggcttcgaggactcccatttggatgcacaaaggaagaaattgttcagttcttctcagggttggaaattgtgccaaacgggatcacattgcctgtggaccccgaaggcaagattacaggggaagcgttcgtgcagtttgcctcgcaggagttagctgagaaggctctagggaaacacaaggagaggatagggcacaggtacattgaggtgtttaagagcagccaggaggaagttaggtcatactcagatccccctctgaagttcatgtccgtgcagcggccagggccctatgaccggcccgggactgccaggaggtacattggcatcgtgaagcaggcaggcctggaaaggatgaggcctggtgcctacagcacaggctacgggggctacgaggagtacagtggcctcagtgatggctacggcttcaccaccgacctgttcgggagagacctcagctactgtctctccggaatgtatgaccacagatacggcgacagtgagttcacagtgcagagcaccacaggccactgtgtccacatgaggggcctgccgtacaaagcgaccgagaacgacatttacaacttcttctctcctctcaaccctgtgagagtccatattgagattggcccagatggaagagtgacgggtgaagcagatgttgagtttgctactcatgaagaagctgtggcagctatgtccaaagacagggccaatatgcagcacagatatatagaactcttcttgaattcaacaacaggggccagcaatggggcgtatagcagccaggtgatgcaaggcatgggggtgtctgctgcccaggccacttacagtggcctggagagccagtcagtgagtggctgttacggggccggctacagtgggcagaacagcatgggtggctatgactagttttgttaggaacatttgagttacttcaatcattttcacaggcagccaacaagcaattaagagcagttataatagaggaagctgggggacccattttgcaccatgagtttgtgaaaaatctggattaaaaaattacctcttcagtgttttctcatgcaaaattttcttctagcatgtgataatgagtaaactaaaactattttcagcttttctcaattaacattttggtagtatacttcagagtgatgttatctaagtttaagtagtttaagtatgttaaatgtggatcttttacaccacatcacagtgaacacactggggagacgtgcttttttggaaaactcaaaggtgctagctccctgattcaaagaaatatttctcatgtttgttcattctagtttatattttcatttaaaatcctttaggttaagtttaagctttttaaaagttagttttgagaattgagacacaatactaatactgtaggaattggtgaggccttgacttaaaactttctttgtactgtgatttccttttgggtgtattttgctaagtgaaacttgttaaattttttgttaactaaatttttttcttaaaataaagactttttcacaa

SEQ ID NO: 51710 - DNA, 2225 bp, Homo sapiens
tctcggccctgggccctttttcctcctcggctgcgccgcgtgtcctcggagcgcggtccctgtattggtctcctgctcctagaggttgagaacaaaaacatgcacctggagtttccccggagccctctgcgtggttgagcttcggtggaatttcggggctcttggctgccagccgcgcttgcctggtagcaacagaaaccagtcctgctcgcctccgtggacatttcattaccatccagaagtgtctcccactgaaggcatccgtggttgtttttaagccacaaaaaagccacacccaagatcacctgacacccaccctgacaagtgtccatgatgctgggccctgagggaggtgaaggctttgtggtcaagctccgtggcctgccctggtcctgctctgttgaggacgtgcagaacttcctctctgactgcacgattcatgatggggccgcaggtgtccatttcatctacactagagagggcaggcagagtggtgaggcttttgttgaacttggatcagaagatgatgtaaaaatggccctgaaaaaagacagggaaagcatgggacaccggtacattgaggtgttcaagtcccacagaaccgagatggattgggtgttgaagcacagtggtcccaacagtgccgacagcgccaacgatggcttcgtgcggcttcgaggactcccatttggatgcacaaaggaagaaattgttcagttcttctcagggttggaaattgtgccaaacgggatcacattgcctgtggaccccgaaggcaagattacaggggaagcgttcgtgcagtttgcctcgcaggagttagctgagaaggctctagggaaacacaaggagaggatagggcacaggtacattgaggtgtttaagagcagccaggaggaagttaggtcatactcagatccccctctgaagttcatgtccgtgcagcggccagggccctatgaccggcccgggactgccaggaggtacattggcatcgtgaagcaggcaggcctggaaaggatgaggcctggtgcctacagcacaggctacgggggctacgaggagtacagtggcctcagtgatggctacggcttcaccaccgacctgttcgggagagacctcagctactgtctctccggaatgtatgaccacagatacggcgacagtgagttcacagtgcagagcaccacaggccactgtgtccacatgaggggcctgccgtacaaagcgaccgagaacgacatttacaacttcttctctcctctcaaccctgtgagagtccatattgagattggcccagatggaagagtgacgggtgaagcagatgttgagtttgctactcatgaagaagctgtggcagctatgtccaaagacagggccaatatgcagcacagatatatagaactcttcttgaattcaacaacaggggccagcaatggggcgtatagcagccaggtgatgcaaggcatgggggtgtctgctgcccaggccacttacagtggcctggagagccagtcagtgagtggctgttacggggccggctacagtgggcagaacagcatgggtggctatgactagttttgttaggaacatttgagttacttcaatcattttcacaggcagccaacaagcaattaagagcagttataatagaggaagctgggggacccattttgcaccatgagtttgtgaaaaatctggattaaaaaattacctcttcagtgttttctcatgcaaaattttcttctagcatgtgataatgagtaaactaaaactattttcagcttttctcaattaacattttggtagtatacttcagagtgatgttatctaagtttaagtagtttaagtatgttaaatgtggatcttttacaccacatcacagtgaacacactggggagacgtgcttttttggaaaactcaaaggtgctagctccctgattcaaagaaatatttctcatgtttgttcattctagtttatattttcatttaaaatcctttaggttaagtttaagctttttaaaagttagttttgagaattgagacacaatactaatactgtaggaattggtgaggccttgacttaaaactttctttgtactgtgatttccttttgggtgtattttgctaagtgaaacttgttaaattttttgttaactaaatttttttcttaaaataaagactttttcacaaaaaaaaaaacggcacgagcggcacgagcggca

SEQ ID NO: 51711 - DNA, 2280 bp, Homo sapiens
  misc_feature (2239)..(2239): n is a, c, g, or t
  misc_feature (2245)..(2245): n is a, c, g, or t
  misc_feature (2276)..(2276): n is a, c, g, or t
tctcggccctgggccctttttcctcctcggctgcgccgcgtgtcctcggagcgcggtccctgtattggtctcctgctcctagaggttgagaacaaaaacatgcacctggagtttccccggagccctctgcgtggttgagcttcggtggaatttcggggctcttggctgccagccgcgcttgcctggtagcaacagaaaccagtcctgctcgcctccgtggacatttcattaccatccagaagtgtctcccactgaaggcatccgtggttgtttttaagccacaaaaaagccacacccaagatcacctgacacccaccctgacaagtgtccatgatgctgggccctgagggaggtgaaggctttgtggtcaagctccgtggcctgccctggtcctgctctgttgaggacgtgcagaacttcctctctgactgcacgattcatgatggggccgcaggtgtccatttcatctacactagagagggcaggcagagtggtgaggcttttgttgaacttggatcagaagatgatgtaaaaatggccctgaaaaaagacagggaaagcatgggacaccggtacattgaggtgttcaagtcccacagaaccgagatggattgggtgttgaagcacagtggtcccaacagtgccgacagcgccaacgatggcttcgtgcggcttcgaggactcccatttggatgcacaaaggaagaaattgttcagttcttctcagggttggaaattgtgccaaacgggatcacattgcctgtggaccccgaaggcaagattacaggggaagcgttcgtgcagtttgcctcgcaggagttagctgagaaggctctagggaaacacaaggagaggatagggcacaggtacattgaggtgtttaagagcagccaggaggaagttaggtcatactcagatccccctctgaagttcatgtccgtgcagcggccagggccctatgaccggcccgggactgccaggaggtacattggcatcgtgaagcaggcaggcctggaaaggatgaggcctggtgcctacagcacaggctacgggggctacgaggagtacagtggcctcagtgatggctacggcttcaccaccgacctgttcgggagagacctcagctactgtctctccggaatgtatgaccacagatacggcgacagtgagttcacagtgcagagcaccacaggccactgtgtccacatgaggggcctgccgtacaaagcgaccgagaacgacatttacaacttcttctctcctctcaaccctgtgagagtccatattgagattggcccagatggaagagtgacgggtgaagcagatgttgagtttgctactcatgaagaagctgtggcagctatgtccaaagacagggccaatatgcagcacagatatatagaactcttcttgaattcaacaacaggggccagcaatggggcgtatagcagccaggtgatgcaaggcatgggggtgtctgctgcccaggccacttacagtggcctggagagccagtcagtgagtggctgttacggggccggctacagtgggcagaacagcatgggtggctatgactagttttgttaggaacatttgagttacttcaatcattttcacaggcagccaacaagcaattaagagcagttataatagaggaagctgggggacccattttgcaccatgagtttgtgaaaaatctggattaaaaaattacctcttcagtgttttctcatgcaaaattttcttctagcatgtgataatgagtaaactaaaactattttcagcttttctcaattaacattttggtagtatacttcagagtgatgttatctaagtttaagtagtttaagtatgttaaatgtggatcttttacaccacatcacagtgaacacactggggagacgtgcttttttggaaaactcaaaggtgctagctccctgattcaaagaaatatttctcatgtttgttcattctagtttatattttcatttaaaatcctttaggttaagtttaagctttttaaaagttagttttgagaattgagacacaatactaatactgtaggaattggtgaggccttgacttaaaactttctttgtactgtgatttccttttgggtgtattttgctaagtgaaacttgttaaattttttgttaactaaatttttttcttaaaataaagactttttcacaaaaaaaaaaaaaaaaaaaaaaaaaaaaaaaaaaaaaaaaaaaaaaanaaaaanaaaaaaaaaaaaagagaaaaaaaaaaaaaanagaa

SEQ ID NO: 51712 - DNA, 2423 bp, Homo sapiens
tctcggccctgggccctttttcctcctcggctgcgccgcgtgtcctcggagcgcggtccctgtattggtctcctgctcctagaggttgagaacaaaaacatgcacctggagtttccccggagccctctgcgtggttgagcttcggtggaatttcggggctcttggctgccagccgcgcttgcctggtagcaacagaaaccagtcctgctcgcctccgtggacatttcattaccatccagaagtgtctcccactgaaggcatccgtggttgtttttaagccacaaaaaagccacacccaagatcacctgacacccaccctgacaagtgtccatgatgctgggccctgagggaggtgaaggctttgtggtcaagctccgtggcctgccctggtcctgctctgttgaggacgtgcagaacttcctctctgactgcacgattcatgatggggccgcaggtgtccatttcatctacactagagagggcaggcagagtggtgaggcttttgttgaacttggatcagaagatgatgtaaaaatggccctgaaaaaagacagggaaagcatgggacaccggtacattgaggtgttcaagtcccacagaaccgagatggattgggtgttgaagcacagtggtcccaacagtgccgacagcgccaacgatggcttcgtgcggcttcgaggactcccatttggatgcacaaaggaagaaattgttcagttcttctcagggttggaaattgtgccaaacgggatcacattgcctgtggaccccgaaggcaagattacaggggaagcgttcgtgcagtttgcctcgcaggagttagctgagaaggctctagggaaacacaaggagaggatagggcacaggtacattgaggtgtttaagagcagccaggaggaagttaggtcatactcagatccccctctgaagttcatgtccgtgcagcggccagggccctatgaccggcccgggactgccaggaggtacattggcatcgtgaagcaggcaggcctggaaaggatgaggcctggtgcctacagcacaggctacgggggctacgaggagtacagtggcctcagtgatggctacggcttcaccaccgacctgttcgggagagacctcagctactgtctctccggaatgtatgaccacagatacggcgacagtgagttcacagtgcagagcaccacaggccactgtgtccacatgaggggcctgccgtacaaagcgaccgagaacgacatttacaacttcttctctcctctcaaccctgtgagagtccatattgagattggcccagatggaagagtgacgggtgaagcagatgttgagtttgctactcatgaagaagctgtggcagctatgtccaaagacagggccaatatgcagcacagatatatagaactcttcttgaattcaacaacaggggccagcaatggggcgtatagcagccaggtgatgcaaggcatgggggtgtctgctgcccaggccacttacagtggcctggagagccagtcagtgagtggctgttacggggccggctacagtgggcagaacagcatgggtggctatgactagttttgttaggaacatttgagttacttcaatcattttcacaggcagccaacaagcaattaagagcagttataatagaggaagctgggggacccattttgcaccatgagtttgtgaaaaatctggattaaaaaattacctcttcagtgttttctcatgcaaaattttcttctagcatgtgataatgagtaaactaaaactattttcagcttttctcaattaacattttggtagtatacttcagagtgatgttatctaagtttaagtagtttaagtatgttaaatgtggatcttttacaccacatcacagtgaacacactggggagacgtgcttttttggaaaactcaaaggtgctagctccctgattcaaagaaatatttctcatgtttgttcattctagtttatattttcatttaaaatcctttaggttaagtttaagctttttaaaagttagttttgagaattgagacacaatactaatactgtaggaattggtgaggccttgacttaaaactttctttgtactgtgatttccttttgggtgtattttgctaagtgaaacttgttaaattttttgttaactaaatttttttcttaaaataaagactttttcacaaaaaaaaaaactaatttttacatttttcaacatataaataataacaaaaataaaatttattaaaaaaaaaaatgtataaaaaaccttgtggcccgcttggcccaagtgactttttaacttggggaagttttatgatatggggccgaatttggggttaattgggcaattcgcccttttggggagccgttatacaatttactgggcccgggttttacggttcgcttgggtttg

SEQ ID NO: 51713 - DNA, 2206 bp, Homo sapiens
gctcgcaggcgggggtttccatggtgatggtcaacaagcctcaactgcctctgctacaactgccaagttccccgcgtcccaccctcctctaggtgctccaagggaccaccggggtgcctgatacgagagcgggagtgtagagactcggaggccgaggttgagaacaaaaacatgcacctggagtttccccggagccctctgcgtggttgagcttcggtggaatttcggggctcttggctgccagccgcgcttgcctggtagcaacagaaaccagtcctgctcgcctccgtgccacaaaaaagccacacccaagatcacctgacacccaccctgacaagtgtccatgatgctgggccctgagggaggtgaaggctttgtggtcaagctccgtggcctgccctggtcctgctctgttgaggacgtgcagaacttcctctctgactgcacgattcatgatggggccgcaggtgtccatttcatctacactagagagggcaggcagagtggtgaggcttttgttgaacttggatcagaagatgatgtaaaaatggccctgaaaaaagacagggaaagcatgggacaccggtacattgaggtgttcaagtcccacagaaccgagatggattgggtgttgaagcacagtggtcccaacagtgccgacagcgccaacgatggcttcgtgcggcttcgaggactcccatttggatgcacaaaggaagaaattgttcagttcttctcagggttggaaattgtgccaaacgggatcacattgcctgtggaccccgaaggcaagattacaggggaagcgttcgtgcagtttgcctcgcaggagttagctgagaaggctctagggaaacacaaggagaggatagggcacaggtacattgaggtgtttaagagcagccaggaggaagttaggtcatactcagatccccctctgaagttcatgtccgtgcagcggccagggccctatgaccggcccgggactgccaggaggtacattggcatcgtgaagcaggcaggcctggaaaggatgaggcctggtgcctacagcacaggctacgggggctacgaggagtacagtggcctcagtgatggctacggcttcaccaccgacctgttcgggagagacctcagctactgtctctccggaatgtatgaccacagatacggcgacagtgagttcacagtgcagagcaccacaggccactgtgtccacatgaggggcctgccgtacaaagcgaccgagaacgacatttacaacttcttctctcctctcaaccctgtgagagtccatattgagattggcccagatggaagagtgacgggtgaagcagatgttgagtttgctactcatgaagaagctgtggcagctatgtccaaagacagggccaatatgcagcacagatatatagaactcttcttgaattcaacaacaggggccagcaatggggcgtatagcagccaggtgatgcaaggcatgggggtgtctgctgcccaggccacttacagtggcctggagagccagtcagtgagtggctgttacggggccggctacagtgggcagaacagcatgggtggctatgactagttttgttaggaacatttgagttacttcaatcattttcacaggcagccaacaagcaattaagagcagttataatagaggaagctgggggacccattttgcaccatgagtttgtgaaaaatctggattaaaaaattacctcttcagtgttttctcatgcaaaattttcttctagcatgtgataatgagtaaactaaaactattttcagcttttctcaattaacattttggtagtatacttcagagtgatgttatctaagtttaagtagtttaagtatgttaaatgtggatcttttacaccacatcacagtgaacacactggggagacgtgcttttttggaaaactcaaaggtgctagctccctgattcaaagaaatatttctcatgtttgttcattctagtttatattttcatttaaaatcctttaggttaagtttaagctttttaaaagttagttttgagaattgagacacaatactaatactgtaggaattggtgaggccttgacttaaaactttctttgtactgtgatttccttttgggtgtattttgctaagtgaaacttgttaaattttttgttaactaaatttttttcttaaaataaagactttttcacaa

SEQ ID NO: 51714 - DNA, 2004 bp, Homo sapiens
cgaggtacgaggccgggtgttactcggcagaggggctgcgccgcgtgtcctcggagcgcggtccctgtattggtctcctgctcctagagccacaaaaaagccacacccaagatcacctgacacccaccctgacaagtgtccatgatgctgggccctgagggaggtgaaggctttgtggtcaagctccgtggcctgccctggtcctgctctgttgaggacgtgcagaacttcctctctgactgcacgattcatgatggggccgcaggtgtccatttcatctacactagagagggcaggcagagtggtgaggcttttgttgaacttggatcagaagatgatgtaaaaatggccctgaaaaaagacagggaaagcatgggacaccggtacattgaggtgttcaagtcccacagaaccgagatggattgggtgttgaagcacagtggtcccaacagtgccgacagcgccaacgatggcttcgtgcggcttcgaggactcccatttggatgcacaaaggaagaaattgttcagttcttctcagggttggaaattgtgccaaacgggatcacattgcctgtggaccccgaaggcaagattacaggggaagcgttcgtgcagtttgcctcgcaggagttagctgagaaggctctagggaaacacaaggagaggatagggcacaggtacattgaggtgtttaagagcagccaggaggaagttaggtcatactcagatccccctctgaagttcatgtccgtgcagcggccagggccctatgaccggcccgggactgccaggaggtacattggcatcgtgaagcaggcaggcctggaaaggatgaggcctggtgcctacagcacaggctacgggggctacgaggagtacagtggcctcagtgatggctacggcttcaccaccgacctgttcgggagagacctcagctactgtctctccggaatgtatgaccacagatacggcgacagtgagttcacagtgcagagcaccacaggccactgtgtccacatgaggggcctgccgtacaaagcgaccgagaacgacatttacaacttcttctctcctctcaaccctgtgagagtccatattgagattggcccagatggaagagtgacgggtgaagcagatgttgagtttgctactcatgaagaagctgtggcagctatgtccaaagacagggccaatatgcagcacagatatatagaactcttcttgaattcaacaacaggggccagcaatggggcgtatagcagccaggtgatgcaaggcatgggggtgtctgctgcccaggccacttacagtggcctggagagccagtcagtgagtggctgttacggggccggctacagtgggcagaacagcatgggtggctatgactagttttgttaggaacatttgagttacttcaatcattttcacaggcagccaacaagcaattaagagcagttataatagaggaagctgggggacccattttgcaccatgagtttgtgaaaaatctggattaaaaaattacctcttcagtgttttctcatgcaaaattttcttctagcatgtgataatgagtaaactaaaactattttcagcttttctcaattaacattttggtagtatacttcagagtgatgttatctaagtttaagtagtttaagtatgttaaatgtggatcttttacaccacatcacagtgaacacactggggagacgtgcttttttggaaaactcaaaggtgctagctccctgattcaaagaaatatttctcatgtttgttcattctagtttatattttcatttaaaatcctttaggttaagtttaagctttttaaaagttagttttgagaattgagacacaatactaatactgtaggaattggtgaggccttgacttaaaactttctttgtactgtgatttccttttgggtgtattttgctaagtgaaacttgttaaattttttgttaactaaatttttttcttaaaataaagactttttcacaa

SEQ ID NO: 51715 - DNA, 2556 bp, Homo sapiens
tctcggccctgggccctttttcctcctcggctgcgccgcgtgtcctcggagcgcggtccctgtattggtctcctgctcctagaggttgagaacaaaaacatgcacctggagtttccccggagccctctgcgtggttgagcttcggtggaatttcggggctcttggctgccagccgcgcttgcctggtagcaacagaaaccagtcctgctcgcctccgtggacatttcattaccatccagaagtgtctcccactgaaggcatccgtggttgtttttaagatgatgctgggccctgagggaggtgaaggctttgtggtcaagctccgtggcctgccctggtcctgctctgttgaggacgtgcagaacttcctctctgactgcacgattcatgatggggccgcaggtgtccatttcatctacactagagagggcaggcagagtggtgaggcttttgttgaacttggatcagaagatgatgtaaaaatggccctgaaaaaagacagggaaagcatgggacaccggtacattgaggtgttcaagtcccacagaaccgagatggattgggtgttgaagcacagtggtcccaacagtgccgacagcgccaacgatggcttcgtgcggcttcgaggactcccatttggatgcacaaaggaagaaattgttcagttcttctcagggttggaaattgtgccaaacgggatcacattgcctgtggaccccgaaggcaagattacaggggaagcgttcgtgcagtttgcctcgcaggagttagctgagaaggctctagggaaacacaaggagaggatagggcacaggtacattgaggtgtttaagagcagccaggaggaagttaggtcatactcagatccccctctgaagttcatgtccgtgcagcggccagggccctatgaccggcccgggactgccaggaggtacattggcatcgtgaagcaggcaggcctggaaaggatgaggcctggtgcctacagcacaggctacgggggctacgaggagtacagtggcctcagtgatggctacggcttcaccaccgacctgttcgggagagacctcagctactgtctctccggaatgtatgaccacagatacggcgacagtgagttcacagtgcagagcaccacaggccactgtgtccacatgaggggcctgccgtacaaagcgaccgagaacgacatttacaacttcttctctcctctcaaccctgtgagagtccatattgagattggcccagatggaagagtgacgggtgaagcagatgttgagtttgctactcatgaagaagctgtggcagctatgtccaaagacagggccaatatgcagcacagatatatagaactcttcttgaattcaacaacaggggccagcaatggggcgtatagcagccaggtgatgcaaggcatgggggtgtctgctgcccaggccacttacagtggcctggagagccagtcagtgagtggctgttacggggccggctacagtgggcagaacagcatgggtggctatgactagttttgttaggaacatttgagttacttcaatcattttcacaggcagccaacaagcaattaagagcagttataatagaggaagctgggggacccattttgcaccatgagtttgtgaaaaatctggattaaaaaattacctcttcagtgttttctcatgcaaaattttcttctagcatgtgataatgagtaaactaaaactattttcagcttttctcaattaacattttggtagtatacttcagagtgatgttatctaagtttaagtagtttaagtatgttaaatgtggatcttttacaccacatcacagtgaacacactggggagacgtgcttttttggaaaactcaaaggtgctagctccctgattcaaagaaatatttctcatgtttgttcattctagtttatattttcatttaaaatcctttaggttaagtttaagctttttaaaagttagttttgagaattgagacacaatactaatactgtaggaattggtgaggccttgacttaaaactttctttgtactgtgatttccttttgggtgtattttgctaagtgaaacttgttaaattttttgttaactaaatttttttcttaaaataaagactttttcacaatgactggcacagattactcagcaaaagatagcaaaacgggtggttgaagataattcattttaatcgtaatgtattttagtgtgaatttaaaaatttcatacatcaaatctatgatctcccttatattcttatgatgaggctaaataaaagtctaataaaaatgttaaatatgtgaatggtggaaatggtgactagcagcacacattctgggaagcatcaaatagacacacggccccagccacctgcaacttatgtgcactgttgtaaaccattcagaattttcctgctaggcccttgatgctggagtcacatctgttgatagctggagaactttagtttcaagtactacattgtgaaagcaattattttgtttctagtttttataaaatgctgatttaaacttttaaaattggtc

SEQ ID NO: 51716 - DNA, 2484 bp, Homo sapiens
tctcggccctgggccctttttcctcctcggctgcgccgcgtgtcctcggagcgcggtccctgtattggtctcctgctcctagaggttgagaacaaaaacatgcacctggagtttccccggagccctctgcgtggttgagcttcggtggaatttcggggctcttggctgccagccgcgcttgcctggtagcaacagaaaccagtcctgctcgcctccgtggacatttcattaccatccagaagtgtctcccactgaaggcatccgtggttgtttttaagccacaaaaaagccacacccaagatcacctgacacccaccctgacaagtgtccgtgtccatttcatctacactagagagggcaggcagagtggtgaggcttttgttgaacttggatcagaagatgatgtaaaaatggccctgaaaaaagacagggaaagcatgggacaccggtacattgaggtgttcaagtcccacagaaccgagatggattgggtgttgaagcacagtggtcccaacagtgccgacagcgccaacgatggcttcgtgcggcttcgaggactcccatttggatgcacaaaggaagaaattgttcagttcttctcagggttggaaattgtgccaaacgggatcacattgcctgtggaccccgaaggcaagattacaggggaagcgttcgtgcagtttgcctcgcaggagttagctgagaaggctctagggaaacacaaggagaggatagggcacaggtacattgaggtgtttaagagcagccaggaggaagttaggtcatactcagatccccctctgaagttcatgtccgtgcagcggccagggccctatgaccggcccgggactgccaggaggtacattggcatcgtgaagcaggcaggcctggaaaggatgaggcctggtgcctacagcacaggctacgggggctacgaggagtacagtggcctcagtgatggctacggcttcaccaccgacctgttcgggagagacctcagctactgtctctccggaatgtatgaccacagatacggcgacagtgagttcacagtgcagagcaccacaggccactgtgtccacatgaggggcctgccgtacaaagcgaccgagaacgacatttacaacttcttctctcctctcaaccctgtgagagtccatattgagattggcccagatggaagagtgacgggtgaagcagatgttgagtttgctactcatgaagaagctgtggcagctatgtccaaagacagggccaatatgcagcacagatatatagaactcttcttgaattcaacaacaggggccagcaatggggcgtatagcagccaggtgatgcaaggcatgggggtgtctgctgcccaggccacttacagtggcctggagagccagtcagtgagtggctgttacggggccggctacagtgggcagaacagcatgggtggctatgactagttttgttaggaacatttgagttacttcaatcattttcacaggcagccaacaagcaattaagagcagttataatagaggaagctgggggacccattttgcaccatgagtttgtgaaaaatctggattaaaaaattacctcttcagtgttttctcatgcaaaattttcttctagcatgtgataatgagtaaactaaaactattttcagcttttctcaattaacattttggtagtatacttcagagtgatgttatctaagtttaagtagtttaagtatgttaaatgtggatcttttacaccacatcacagtgaacacactggggagacgtgcttttttggaaaactcaaaggtgctagctccctgattcaaagaaatatttctcatgtttgttcattctagtttatattttcatttaaaatcctttaggttaagtttaagctttttaaaagttagttttgagaattgagacacaatactaatactgtaggaattggtgaggccttgacttaaaactttctttgtactgtgatttccttttgggtgtattttgctaagtgaaacttgttaaattttttgttaactaaatttttttcttaaaataaagactttttcacaatgactggcacagattactcagcaaaagatagcaaaacgggtggttgaagataattcattttaatcgtaatgtattttagtgtgaatttaaaaatttcatacatcaaatctatgatctcccttatattcttatgatgaggctaaataaaagtctaataaaaatgttaaatatgtgaatggtggaaatggtgactagcagcacacattctgggaagcatcaaatagacacacggccccagccacctgcaacttatgtgcactgttgtaaaccattcagaattttcctgctaggcccttgatgctggagtcacatctgttgatagctggagaactttagtttcaagtactacattgtgaaagcaattattttgtttctagtttttataaaatgctgatttaaacttttaaaattggtc

SEQ ID NO: 51717 - DNA, 2563 bp, Homo sapiens
tctcggccctgggccctttttcctcctcggctgcgccgcgtgtcctcggagcgcggtccctgtattggtctcctgctcctagaggttgagaacaaaaacatgcacctggagtttccccggagccctctgcgtggttgagcttcggtggaatttcggggctcttggctgccagccgcgcttgcctggtagcaacagaaaccagtcctgctcgcctccgtggacatttcattaccatccagaagtgtctcccactgaaggcatccgtggttgtttttaagccacaaaaaagccacacccaagatcacctgacacccaccctgacaagtgtccatgatgctgggccctgagggaggtgaaggctttgtggtcaagctccgtggcctgccctggtcctgctctgttgaggacgtgcagaacttcctctctgactgcacgattcatgatggggccgcaggtgtccatttcatctacactagagagggcaggcagagtggtgaggcttttgttgaacttggatcagaagatgatgtaaaaatggccctgaaaaaagacagggaaagcatgggacaccggtacattgaggtgttcaagtcccacagaaccgagatggattgggtgttgaagcacagtggtcccaacagtgccgacagcgccaacgatggcttcgtgcggcttcgaggactcccatttggatgcacaaaggaagaaattgttcagttcttctcagggttggaaattgtgccaaacgggatcacattgcctgtggaccccgaaggcaagattacaggggaagcgttcgtgcagtttgcctcgcaggagttagctgagaaggctctagggaaacacaaggagaggatagggcacaggtacattgaggtgtttaagagcagccaggaggaagttaggtcatactcagatccccctctgaagttcatgtccgtgcagcggccagggccctatgaccggcccgggactgccaggaggtacattggcatcgtgaagcaggcaggcctggaaaggatgaggcctggtgcctacagcacaggctacgggggctacgaggagtacagtggcctcagtgatggctacggcttcaccaccgacctgttcgggagagacctcagctactgtctctccggaatgtatgaccacagatacggcgacagtgagttcacagtgcagagcaccacaggccactgtgtccacatgaggggcctgccgtacaaagcgaccgagaacgacatttacaacttcttctctcctctcaaccctgtgagagtccatattgagattggcccagatggaagagtgacgggtgaagcagatgttgagtttgctactcatgaagaagctgtggcagctatgtccaaagacagggccaatatgcagcacagatatatagaactcttcttgaattcaacaacaggggccagcaatggggcgtatagcagccaggtgatgcaaggcatgggggtgtctgctgcccaggccacttacagtggcctggagagccagtcagtgagtggctgttacggggccggctacagtgggcagaacagcatgggtggctatgactagttttgttaggaacatttgagttacttcaatcattttcacaggcagccaacaagcaattaagagcagttataatagaggaagctgggggacccattttgcaccatgagtttgtgaaaaatctggattaaaaaattacctcttcagtgttttctcatgcaaaattttcttctagcatgtgataatgagtaaactaaaactattttcagcttttctcaattaacattttggtagtatacttcagagtgatgttatctaagtttaagtagtttaagtatgttaaatgtggatcttttacaccacatcacagtgaacacactggggagacgtgcttttttggaaaactcaaaggtgctagctccctgattcaaagaaatatttctcatgtttgttcattctagtttatattttcatttaaaatcctttaggttaagtttaagctttttaaaagttagttttggacttaaaactttctttgtactgtgatttccttttgggtgtattttgctaagtgaaacttgttaaattttttgttaactaaatttttttcttaaaataaagactttttcacaatgactggcacagattactcagcaaaagatagcaaaacgggtggttgaagataattcattttaatcgtaatgtattttagtgtgaatttaaaaatttcatacatcaaatctatgatctcccttatattcttatgatgaggctaaataaaagtctaataaaaatgttaaatatgtgaatggtggaaatggtgactagcagcacacattctgggaagcatcaaatagacacacggccccagccacctgcaacttatgtgcactgttgtaaaccattcagaattttcctgctaggcccttgatgctggagtcacatctgttgatagctggagaactttagtttcaagtactacattgtgaaagcaattattttgtttctagtttttataaaatgctgatttaaacttttaaaattggtc

SEQ ID NO: 51718 - DNA, 2139 bp, Homo sapiens
tctcggccctgggccctttttcctcctcggctgcgccgcgtgtcctcggagcgcggtccctgtattggtctcctgctcctagaggttgagaacaaaaacatgcacctggagtttccccggagccctctgcgtggttgagcttcggtggaatttcggggctcttggctgccagccgcgcttgcctggtagcaacagaaaccagtcctgctcgcctccgtggacatttcattaccatccagaagtgtctcccactgaaggcatccgtggttgtttttaagccacaaaaaagccacacccaagatcacctgacacccaccctgacaagtgtccatgatgctgggccctgagggaggtgaaggctttgtggtcaagctccgtggcctgccctggtcctgctctgttgaggacgtgcagaacttcctctctgactgcacgattcatgatggggccgcaggtgtccatttcatctacactagagagggcaggcagagtggtgaggcttttgttgaacttggatcagaagatgatgtaaaaatggccctgaaaaaagacagggaaagcatgggacaccggtacattgaggtgttcaagtcccacagaaccgagatggattgggtgttgaagcacagtggtcccaacagtgccgacagcgccaacgatggcttcgtgcggcttcgaggactcccatttggatgcacaaaggaagaaattgttcagttcttctcagggttggaaattgtgccaaacgggatcacattgcctgtggaccccgaaggcaagattacaggggaagcgttcgtgcagtttgcctcgcaggagttagctgagaaggctctagggaaacacaaggagaggatagggcacaggtacattgaggtgtttaagagcagccaggaggaagttaggtcatactcagatccccctctgaagttcatgtccgtgcagcggccagggccctatgaccggcccgggactgccaggaggtacattggcatcgtgaagcaggcaggcctggaaaggatgaggcctggtgcctacagcacaggctacgggggctacgaggagtacagtggcctcagtgatggctacggcttcaccaccgacctgttcgggagagacctcagctactgtctctccggaatgtatgaccacagatacggcgacagtgagttcacagtgcagagcaccacaggccactgtgtccacatgaggggcctgccgtacaaagcgaccgagaacgacatttacaacttcttctctcctctcaaccctgtgagagtccatattgagattggcccagatggaagagtgacgggtgaagcagatgttgagtttgctactcatgaagaagctgtggcagctatgtccaaagacagggccaatatgcagcacagatatatagaactcttcttgaattcaacaacaggggccagcaatggggcgtatagcagccaggtgatgcaaggcatgggggtgtctgctgcccaggccacttacagtggcctggagagccagtcagtgagtggctgttacggggccggctacagtgggcagaacagcatgggtggctatgactagttttgttaggaacatttgagttacttcaatcattttcacaggcagccaacaagcaattaagagcagttataatagaggaagctgggggacccattttgcaccatgagtttgtgaaaaatctggattaaaaaattacctcttcagtgttttctcatgcaaaattttcttctagcatgtgataatgagtaaactaaaactattttcagcttttctcaattaacattttggtagtatacttcagagtgatgttatctaagtttaagtagtttaagtatgttaaatgtggatcttttacaccacatcacagtgaacacactggggagacgtgcttttttggaaaactcaaaggtgctagctccctgattcaaagaaatatttctcatgtttgttcattctagtttatattttcatttaaaatcctttaggttaagtttaagctttttaaaagttagttttgagaattgagacacaatactaatactgtaggaattggtgaggccttttctttgggccgtggaatccctctgggggttacgcgcaagtgacctggtccttttggtc

SEQ ID NO: 51719 - DNA, 2190 bp, Homo sapiens
  misc_feature (2078)..(2078): n is a, c, g, or t
tctcggccctgggccctttttcctcctcggctgcgccgcgtgtcctcggagcgcggtccctgtattggtctcctgctcctagaggttgagaacaaaaacatgcacctggagtttccccggagccctctgcgtggttgagcttcggtggaatttcggggctcttggctgccagccgcgcttgcctggtagcaacagaaaccagtcctgctcgcctccgtggacatttcattaccatccagaagtgtctcccactgaaggcatccgtggttgtttttaagccacaaaaaagccacacccaagatcacctgacacccaccctgacaagtgtccatgatgctgggccctgagggaggtgaaggctttgtggtcaagctccgtggcctgccctggtcctgctctgttgaggacgtgcagaacttcctctctgactgcacgattcatgatggggccgcaggtgtccatttcatctacactagagagggcaggcagagtggtgaggcttttgttgaacttggatcagaagatgatgtaaaaatggccctgaaaaaagacagggaaagcatgggacaccggtacattgaggtgttcaagtcccacagaaccgagatggattgggtgttgaagcacagtggtcccaacagtgccgacagcgccaacgatggcttcgtgcggcttcgaggactcccatttggatgcacaaaggaagaaattgttcagttcttctcagggttggaaattgtgccaaacgggatcacattgcctgtggaccccgaaggcaagattacaggggaagcgttcgtgcagtttgcctcgcaggagttagctgagaaggctctagggaaacacaaggagaggatagggcacaggtacattgaggtgtttaagagcagccaggaggaagttaggtcatactcagatccccctctgaagttcatgtccgtgcagcggccagggccctatgaccggcccgggactgccaggaggtacattggcatcgtgaagcaggcaggcctggaaaggatgaggcctggtgcctacagcacaggctacgggggctacgaggagtacagtggcctcagtgatggctacggcttcaccaccgacctgttcgggagagacctcagctactgtctctccggaatgtatgaccacagatacggcgacagtgagttcacagtgcagagcaccacaggccactgtgtccacatgaggggcctgccgtacaaagcgaccgagaacgacatttacaacttcttctctcctctcaaccctgtgagagtccatattgagattggcccagatggaagagtgacgggtgaagcagatgttgagtttgctactcatgaagaagctgtggcagctatgtccaaagacagggccaatatgcagcacagatatatagaactcttcttgaattcaacaacaggggccagcaatggggcgtatagcagccaggtgatgcaaggcatgggggtgtctgctgcccaggccacttacagtggcctggagagccagtcagtgagtggctgttacggggccggctacagtgggcagaacagcatgggtggctatgactagttttgttaggaacatttgagttacttcaatcattttcacaggcagccaacaagcaattaagagcagttataatagaggaagctgggggacccattttgcaccatgagtttgtgaaaaatctggattaaaaaattacctcttcagtgttttctcatgcaaaattttcttctagcatgtgataatgagtaaactaaaactattttcagcttttctcaattaacattttggtagtatacttcagagtgatgttatctaagtttaagtagtttaagtatgttaaatgtggatcttttacaccacatcacagtgaacacactggggagacgtgcttttttggaaaactcaaaggtgctagctccctgattcaaagaaatatttctcatgtttgttcattctagtttatattttcatttaaaatcctttaggttaagtttaagctttttaaaagttagttttgcattctatatgtggaatgggagctgataaattttgtatggatncttgggggaccgcacgtaccgtcattcggccatctcccaaaagcttcgaccaacaaacggggccatcccggcgccgcctttagccaccatgccggcaccgaccagacgcgac

SEQ ID NO: 51720 - DNA, 1721 bp, Homo sapiens
tctcggccctgggccctttttcctcctcggctgcgccgcgtgtcctcggagcgcggtccctgtattggtctcctgctcctagaggttgagaacaaaaacatgcacctggagtttccccggagccctctgcgtggttgagcttcggtggaatttcggggctcttggctgccagccgcgcttgcctggtagcaacagaaaccagtcctgctcgcctccgtggacatttcattaccatccagaagtgtctcccactgaaggcatccgtggttgtttttaagccacaaaaaagccacacccaagatcacctgacacccaccctgacaagtgtccatgatgctgggccctgagggaggtgaaggctttgtggtcaagctccgtggcctgccctggtcctgctctgttgaggacgtgcagaacttcctctctgactgcacgattcatgatggggccgcaggtgtccatttcatctacactagagagggcaggcagagtggtgaggcttttgttgaacttggatcagaagatgatgtaaaaatggccctgaaaaaagacagggaaagcatgggacaccggtacattgaggtgttcaagtcccacagaaccgagatggattgggtgttgaagcacagtggtcccaacagtgccgacagcgccaacgatggcttcgtgcggcttcgaggactcccatttggatgcacaaaggaagaaattgttcagttcttctcagggttggaaattgtgccaaacgggatcacattgcctgtggaccccgaaggcaagattacaggggaagcgttcgtgcagtttgcctcgcaggagttagctgagaaggctctagggaaacacaaggagaggatagggcacaggtacattgaggtgtttaagagcagccaggaggaagttaggtcatactcagatccccctctgaagttcatgtccgtgcagcggccagggccctatgaccggcccgggactgccaggaggtacattggcatcgtgaagcaggcaggcctggaaaggatgaggcctggtgcctacagcacaggctacgggggctacgaggagtacagtggcctcagtgatggctacggcttcaccaccgacctgttcgggagagacctcagctactgtctctccggaatgtatgaccacagatacggcgacagtgagttcacagtgcagagcaccacaggccactgtgtccacatgaggggcctgccgtacaaagcgaccgagaacgacatttacaacttcttctctcctctcaaccctgtgagagtccatattgagattggcccagatggaagagtgacgggtgaagcagatgttgagtttgctactcatgaagaagctgtggcagctatgtccaaagacagggccaatatgcagcacagatatatagaactcttcttgaattcaacaacaggggccagcaatggggcgtatagcagccaggtgatgcaaggcatgggggtgtctgctgcccaggccacttacagtggcctggagagccagtcagtgagtggctgttacggggccggctacagtgggcagaacagcatgggtggctatgactagttttgttaggaacatttgagttacttcaatcattttcacaggcagccaacaagcaattaagagcagttataatagaggaagctgggggacccattttgcaccatgagtttgtgaaaaatctggattaaaaaattacctcttca

SEQ ID NO: 51721 - DNA, 2042 bp, Homo sapiens
tctcggccctgggccctttttcctcctcggctgcgccgcgtgtcctcggagcgcggtccctgtattggtctcctgctcctagaggttgagaacaaaaacatgcacctggagtttccccggagccctctgcgtggttgagcttcggtggaatttcggggctcttggctgccagccgcgcttgcctggtagcaacagaaaccagtcctgctcgcctccgtggacatttcattaccatccagaagtgtctcccactgaaggcatccgtggttgtttttaagccacaaaaaagccacacccaagatcacctgacacccaccctgacaagtgtccatgatgctgggccctgagggaggtgaaggctttgtggtcaagctccgtggcctgccctggtcctgctctgttgaggacgtgcagaacttcctctctgactgcacgattcatgatggggccgcaggtgtccatttcatctacactagagagggcaggcagagtggtgaggcttttgttgaacttggatcagaagatgatgtaaaaatggccctgaaaaaagacagggaaagcatgggacaccggtacattgaggtgttcaagtcccacagaaccgagatggattgggtgttgaagcacagtggtcccaacagtgccgacagcgccaacgatggcttcgtgcggcttcgaggactcccatttggatgcacaaaggaagaaattgttcagttcttctcagggttggaaattgtgccaaacgggatcacattgcctgtggaccccgaaggcaagattacaggggaagcgttcgtgcagtttgcctcgcaggagttagctgagaaggctctagggaaacacaaggagaggatagggcacaggtacattgaggtgtttaagagcagccaggaggaagttaggtcatactcagatccccctctgaagttcatgtccgtgcagcggccagggccctatgaccggcccgggactgccaggaggtacattggcatcgtgaagcaggcaggcctggaaaggatgaggcctggtgcctacagcacaggctacgggggctacgaggagtacagtggcctcagtgatggctacggcttcaccaccgacctgttcgggagagacctcagctactgtctctccggaatgtatgaccacagatacggcgacagtgagttcacagtgcagagcaccacaggccactgtgtccacatgaggggcctgccgtacaaagcgaccgagaacgacatttacaacttcttctctcctctcaaccctgtgagagtccatattgagattggcccagatggaagagtgacgggtgaagcagatgttgagtttgctactcatgaagaagctgtggcagctatgtccaaagacagggccaatatgcagcacagatatatagaactcttcttgaattcaacaacaggggccagcaatggggcgtatagcagccaggtgatgcaaggcatgggggtgtctgctgcccaggccacttacagtggcctggagagccagtcagtgagtggctgttacggggccggctacagtgggcagaacagcatgggtggctatgactagttttgttaggaacatttgagttacttcaatcattttcacaggcagccaacaagcaattaagagcagttataatagaggaagctgggggacccattttgcaccatgagtttgtgaaaaatctggattaaaaaattacctcttcagtgttttctcatgcaaaattttcttctagcatgtgataatgagtaaactaaaactattttcagcttttctcaattaacattttggtagtatacttcagagtgatgttatctaagtttaagtagtttaagtatgttaaatgtggatcttttacaccacatcacagtgaacacactggggagtgacaggtgctaaagttgaacgagctgatggatatgaaccccagtccagaatctgtttaaagttcagacttcaatagtggcaataaaagtgctattgaacttctaaactaggggtccgagctcgattcgtatctgtctctc

SEQ ID NO: 51722 - DNA, 1867 bp, Homo sapiens
tggctagtgggcgggggtatcggacgacccgaaggcaagattacaggggaagcgttcgtgcagtttgcctcgcaggagttagctgagaaggctctagggaaacacaaggagaggatagggcacaggtacattgaggtgtttaagagcagccaggaggaagttaggtcatactcagatccccctctgaagttcatgtccgtgcagcggccagggccctatgaccggcccgggactgccaggaggtacattggcatcgtgaagcaggcaggcctggaaaggatgaggcctggtgcctacagcacaggctacgggggctacgaggagtacagtggcctcagtgatggctacggcttcaccaccgacctgttcgggagagacctcagctactgtctctccggaatgtatgaccacagatacggcgacagtgagttcacagtgcagagcaccacaggccactgtgtccacatgaggggcctgccgtacaaagcgaccgagaacgacatttacaacttcttctctcctctcaaccctgtgagagtccatattgagattggcccagatggaagagtgacgggtgaagcagatgttgagtttgctactcatgaagaagctgtggcagctatgtccaaagacagggccaatatgcagcacagatatatagaactcttcttgaattcaacaacaggggccagcaatggggcgtatagcagccaggtgatgcaaggcatgggggtgtctgctgcccaggccacttacagtggcctggagagccagtcagtgagtggctgttacggggccggctacagtgggcagaacagcatgggtggctatgactagttttgttaggaacatttgagttacttcaatcattttcacaggcagccaacaagcaattaagagcagttataatagaggaagctgggggacccattttgcaccatgagtttgtgaaaaatctggattaaaaaattacctcttcagtgttttctcatgcaaaattttcttctagcatgtgataatgagtaaactaaaactattttcagcttttctcaattaacattttggtagtatacttcagagtgatgttatctaagtttaagtagtttaagtatgttaaatgtggatcttttacaccacatcacagtgaacacactggggagacgtgcttttttggaaaactcaaaggtgctagctccctgattcaaagaaatatttctcatgtttgttcattctagtttatattttcatttaaaatcctttaggttaagtttaagctttttaaaagttagttttgagaattgagacacaatactaatactgtaggaattggtgaggccttgacttaaaactttctttgtactgtgatttccttttgggtgtattttgctaagtgaaacttgttaaattttttgttaactaaatttttttcttaaaataaagactttttcacaatgactggcacagattactcagcaaaagatagcaaaacgggtggttgaagataattcattttaatcgtaatgtattttagtgtgaatttaaaaatttcatacatcaaatctatgatctcccttatattcttatgatgaggctaaataaaagtctaataaaaatgttaaatatgtgaatggtggaaatggtgactagcagcacacattctgggaagcatcaaatagacacacggccccagccacctgcaacttatgtgcactgttgtaaaccattcagaattttcctgctaggcccttgatgctggagtcacatctgttgatagctggagaactttagtttcaagtactacattgtgaaagcaattattttgtttctagtttttataaaatgctgatttaaacttttaaaattggtc

SEQ ID NO: 51723 - DNA, 1809 bp, Homo sapiens
ccgtggtgtgtctgtgtgtgtgagagagagagagagagagagacagagaaagaaggatagggcacaggtacattgaggtgtttaagagcagccaggaggaagttaggtcatactcagatccccctctgaagttcatgtccgtgcagcggccagggccctatgaccggcccgggactgccaggaggtacattggcatcgtgaagcaggcaggcctggaaaggatgaggcctggtgcctacagcacaggctacgggggctacgaggagtacagtggcctcagtgatggctacggcttcaccaccgacctgttcgggagagacctcagctactgtctctccggaatgtatgaccacagatacggcgacagtgagttcacagtgcagagcaccacaggccactgtgtccacatgaggggcctgccgtacaaagcgaccgagaacgacatttacaacttcttctctcctctcaaccctgtgagagtccatattgagattggcccagatggaagagtgacgggtgaagcagatgttgagtttgctactcatgaagaagctgtggcagctatgtccaaagacagggccaatatgcagcacagatatatagaactcttcttgaattcaacaacaggggccagcaatggggcgtatagcagccaggtgatgcaaggcatgggggtgtctgctgcccaggccacttacagtggcctggagagccagtcagtgagtggctgttacggggccggctacagtgggcagaacagcatgggtggctatgactagttttgttaggaacatttgagttacttcaatcattttcacaggcagccaacaagcaattaagagcagttataatagaggaagctgggggacccattttgcaccatgagtttgtgaaaaatctggattaaaaaattacctcttcagtgttttctcatgcaaaattttcttctagcatgtgataatgagtaaactaaaactattttcagcttttctcaattaacattttggtagtatacttcagagtgatgttatctaagtttaagtagtttaagtatgttaaatgtggatcttttacaccacatcacagtgaacacactggggagacgtgcttttttggaaaactcaaaggtgctagctccctgattcaaagaaatatttctcatgtttgttcattctagtttatattttcatttaaaatcctttaggttaagtttaagctttttaaaagttagttttgagaattgagacacaatactaatactgtaggaattggtgaggccttgacttaaaactttctttgtactgtgatttccttttgggtgtattttgctaagtgaaacttgttaaattttttgttaactaaatttttttcttaaaataaagactttttcacaatgactggcacagattactcagcaaaagatagcaaaacgggtggttgaagataattcattttaatcgtaatgtattttagtgtgaatttaaaaatttcatacatcaaatctatgatctcccttatattcttatgatgaggctaaataaaagtctaataaaaatgttaaatatgtgaatggtggaaatggtgactagcagcacacattctgggaagcatcaaatagacacacggccccagccacctgcaacttatgtgcactgttgtaaaccattcagaattttcctgctaggcccttgatgctggagtcacatctgttgatagctggagaactttagtttcaagtactacattgtgaaagcaattattttgtttctagtttttataaaatgctgatttaaacttttaaaattggtc

SEQ ID NO: 51724 - DNA, 1504 bp, Homo sapiens
ccgtgacccacgtccggctgccggtcttggatcacgaggcctccgcttcccggactccggaccccgcgcctcctcggggccgacgggccagtccctggcgtggttgagaacaaaaacatgcacctggagtttccccggagccctctgcgtggttgagcttcggtggaatttcggggctcttggctgccagccgcgcttgcctggtagcaacagaaaccagtcctgctcgcctccgtggacatttcattaccatccagaagtgtctcccactgaaggcatccgtggttgtttttaagccacaaaaaagccacacccaagatcacctgacacccaccctgacaagtgtccatgatgctgggccctgagggaggtgaaggctttgtggtcaagctccgtggcctggagagccagtcagtgagtggctgttacggggccggctacagtgggcagaacagcatgggtggctatgactagttttgttaggaacatttgagttacttcaatcattttcacaggcagccaacaagcaattaagagcagttataatagaggaagctgggggacccattttgcaccatgagtttgtgaaaaatctggattaaaaaattacctcttcagtgttttctcatgcaaaattttcttctagcatgtgataatgagtaaactaaaactattttcagcttttctcaattaacattttggtagtatacttcagagtgatgttatctaagtttaagtagtttaagtatgttaaatgtggatcttttacaccacatcacagtgaacacactggggagacgtgcttttttggaaaactcaaaggtgctagctccctgattcaaagaaatatttctcatgtttgttcattctagtttatattttcatttaaaatcctttaggttaagtttaagctttttaaaagttagttttgagaattgagacacaatactaatactgtaggaattggtgaggccttgacttaaaactttctttgtactgtgatttccttttgggtgtattttgctaagtgaaacttgttaaattttttgttaactaaatttttttcttaaaataaagactttttcacaatgactggcacagattactcagcaaaagatagcaaaacgggtggttgaagataattcattttaatcgtaatgtattttagtgtgaatttaaaaatttcatacatcaaatctatgatctcccttatattcttatgatgaggctaaataaaagtctaataaaaatgttaaatatgtgaatggtggaaatggtgactagcagcacacattctgggaagcatcaaatagacacacggccccagccacctgcaacttatgtgcactgttgtaaaccattcagaattttcctgctaggcccttgatgctggagtcacatctgttgatagctggagaactttagtttcaagtactacattgtgaaagcaattattttgtttctagtttttataaaatgctgatttaaacttttaaaattggtc

SEQ ID NO: 51725 - DNA, 877 bp, Homo sapiens
tctcggccctgggccctttttcctcctcggctgcgccgcgtgtcctcggagcgcggtccctgtattggtctcctgctcctagaggttgagaacaaaaacatgcacctggagtttccccggagccctctgcgtggttgagcttcggtggaatttcggggctcttggctgccagccgcgcttgcctggtagcaacagaaaccagtcctgctcgcctccgtggacatttcattaccatccagaaagcatgggtggctatgactagttttgttaggaacatttgagttacttcaatcattttcacaggcagccaacaagcaattaagagcagttataatagaggaagctgggggacccattttgcaccatgagtttgtgaaaaatctggattaaaaaattacctcttcagtgttttctcatgcaaaattttcttctagcatgtgataatgagtaaactaaaactattttcagcttttctcaattaacattttggtagtatacttcagagtgatgttatctaagtttaagtagtttaagtatgttaaatgtggatcttttacaccacatcacagtgaacacactggggagacgtgcttttttggaaaactcaaaggtgctagctccctgattcaaagaaatatttctcatgtttgttcattctagtttatattttcatttaaaatcctttaggttaagtttaagctttttaaaagttagttttgagaattgagacacaatactaatactgtaggaattggtgaggccttgacttaaaactttctttgtactgtgatttccttttgggtgtattttgctaagtgaaacttgttaaattttttgttaactaaatttttttcttaaaataaagactttttcacaa

SEQ ID NO: 51726 - DNA, 1006 bp, Homo sapiens
acagatacgaccgagctgaacccctagttttagaagtttcaatagtaatagaggaagctgggggacccattttgcaccatgagtttgtgaaaaatctggattaaaaaattacctcttcagtgttttctcatgcaaaattttcttctagcatgtgataatgagtaaactaaaactattttcagcttttctcaattaacattttggtagtatacttcagagtgatgttatctaagtttaagtagtttaagtatgttaaatgtggatcttttacaccacatcacagtgaacacactggggagacgtgcttttttggaaaactcaaaggtgctagctccctgattcaaagaaatatttctcatgtttgttcattctagtttatattttcatttaaaatcctttaggttaagtttaagctttttaaaagttagttttgagaattgagacacaatactaatactgtaggaattggtgaggccttgacttaaaactttctttgtactgtgatttccttttgggtgtattttgctaagtgaaacttgttaaattttttgttaactaaatttttttcttaaaataaagactttttcacaatgactggcacagattactcagcaaaagatagcaaaacgggtggttgaagataattcattttaatcgtaatgtattttagtgtgaatttaaaaatttcatacatcaaatctatgatctcccttatattcttatgatgaggctaaataaaagtctaataaaaatgttaaatatgtgaatggtggaaatggtgactagcagcacacattctgggaagcatcaaatagacacacggccccagccacctgcaacttatgtgcactgttgtaaaccattcagaattttcctgctaggcccttgatgctggagtcacatctgttgatagctggagaactttagtttcaagtactacattgtgaaagcaattattttgtttctagtttttataaaatgctgatttaaacttttaaaattggtc

SEQ ID NO: 51727 - DNA, 1090 bp, Homo sapiens
  misc_feature (8)..(8): n is a, c, g, or t
  misc_feature (13)..(13): n is a, c, g, or t
  misc_feature (45)..(45): n is a, c, g, or t
  misc_feature (51)..(51): n is a, c, g, or t
  misc_feature (80)..(80): n is a, c, g, or t
  misc_feature (105)..(105): n is a, c, g, or t
gggctttnggggnggccccagggggaaggaaaaaggggggccttncccaanttttttggggaaaatttgggacccccaanaatttttccggcaaccccccaaccnttaagggccagttaaaaaaaggggtaatagaggaagctgggggacccattttgcaccatgagtttgtgaaaaatctggattaaaaaattacctcttcagtgttttctcatgcaaaattttcttctagcatgtgataatgagtaaactaaaactattttcagcttttctcaattaacattttggtagtatacttcagagtgatgttatctaagtttaagtagtttaagtatgttaaatgtggatcttttacaccacatcacagtgaacacactggggagacgtgcttttttggaaaactcaaaggtgctagctccctgattcaaagaaatatttctcatgtttgttcattctagtttatattttcatttaaaatcctttaggttaagtttaagctttttaaaagttagttttgagaattgagacacaatactaatactgtaggaattggtgaggccttgacttaaaactttctttgtactgtgatttccttttgggtgtattttgctaagtgaaacttgttaaattttttgttaactaaatttttttcttaaaataaagactttttcacaatgactggcacagattactcagcaaaagatagcaaaacgggtggttgaagataattcattttaatcgtaatgtattttagtgtgaatttaaaaatttcatacatcaaatctatgatctcccttatattcttatgatgaggctaaataaaagtctaataaaaatgttaaatatgtgaatggtggaaatggtgactagcagcacacattctgggaagcatcaaatagacacacggccccagccacctgcaacttatgtgcactgttgtaaaccattcagaattttcctgctaggcccttgatgctggagtcacatctgttgatagctggagaactttagtttcaagtactacattgtgaaagcaattattttgtttctagtttttataaaatgctgatttaaacttttaaaattggtc

SEQ ID NO: 51728 - DNA, 911 bp, Homo sapiens
tctcggccctgggccctttttcctcctcggctgcgccgcgtgtcctcggagcgcggtccctgtattggtctcctgctcctagaggttgagaacaaaaacatgcacctggagtttccccggagccctctgcgtggttgagcttcggtggaatttcggggctcttggctgccagccgcgcttgcctggtagcaacagaaaccagtcctgctcgcctccgtggacatttcattaccatccagaagtgtctcccactgaaggcatccgtggttgtttttaagccacaaaaaagccacacccaagatcacctgacacccaccctgacaagtgtccatgatgctgggccctgagggaggtgaaggctttgtggtcaagctccgtggcctgccctggtcctgctctgttgaggacgtgcagaacttcctctctgactgcacgattcatgatggggccgcaggtgtccatttcatctacactagagagggcaggcagagtggtgaggcttttgttgaacttggatcagaagatgatgtaaaaatggccctgaaaaaagacagggaaagcatgggacaccggtacattgaggtgttcaagtcccacagaaccgagatggattgggtgttgaagcacagtggtcccaacagtgccgacagcgccaacgatggcttcgtgcggcttcgaggactcccatttggatgcacaaaggaagaaattgttcagttcttctcagggttggaaattgtgccaaacgggatcacattgcctgtggaccccgaaggcaagattacaggggaagcgttcgtgcagtttgcctcgcaggagttagctgagaaggctctagggaaacacaaggagtttttccaagtacccggctaaggtgccagggtttactcaagaacagcatacattacgtc

SEQ ID NO: 51729 - DNA, 903 bp, Homo sapiens
acagatacgaccgagctgaacccctagttttagaagtttcaatagcatgtgataatgagtaaactaaaactattttcagcttttctcaattaacattttggtagtatacttcagagtgatgttatctaagtttaagtagtttaagtatgttaaatgtggatcttttacaccacatcacagtgaacacactggggagacgtgcttttttggaaaactcaaaggtgctagctccctgattcaaagaaatatttctcatgtttgttcattctagtttatattttcatttaaaatcctttaggttaagtttaagctttttaaaagttagttttgagaattgagacacaatactaatactgtaggaattggtgaggccttgacttaaaactttctttgtactgtgatttccttttgggtgtattttgctaagtgaaacttgttaaattttttgttaactaaatttttttcttaaaataaagactttttcacaatgactggcacagattactcagcaaaagatagcaaaacgggtggttgaagataattcattttaatcgtaatgtattttagtgtgaatttaaaaatttcatacatcaaatctatgatctcccttatattcttatgatgaggctaaataaaagtctaataaaaatgttaaatatgtgaatggtggaaatggtgactagcagcacacattctgggaagcatcaaatagacacacggccccagccacctgcaacttatgtgcactgttgtaaaccattcagaattttcctgctaggcccttgatgctggagtcacatctgttgatagctggagaactttagtttcaagtactacattgtgaaagcaattattttgtttctagtttttataaaatgctgatttaaacttttaaaattggtc

SEQ ID NO: 51730 - DNA, 854 bp, Homo sapiens
acagatacgaccgagctgaacccctagttttagaagtttcaatagattttggtagtatacttcagagtgatgttatctaagtttaagtagtttaagtatgttaaatgtggatcttttacaccacatcacagtgaacacactggggagacgtgcttttttggaaaactcaaaggtgctagctccctgattcaaagaaatatttctcatgtttgttcattctagtttatattttcatttaaaatcctttaggttaagtttaagctttttaaaagttagttttgagaattgagacacaatactaatactgtaggaattggtgaggccttgacttaaaactttctttgtactgtgatttccttttgggtgtattttgctaagtgaaacttgttaaattttttgttaactaaatttttttcttaaaataaagactttttcacaatgactggcacagattactcagcaaaagatagcaaaacgggtggttgaagataattcattttaatcgtaatgtattttagtgtgaatttaaaaatttcatacatcaaatctatgatctcccttatattcttatgatgaggctaaataaaagtctaataaaaatgttaaatatgtgaatggtggaaatggtgactagcagcacacattctgggaagcatcaaatagacacacggccccagccacctgcaacttatgtgcactgttgtaaaccattcagaattttcctgctaggcccttgatgctggagtcacatctgttgatagctggagaactttagtttcaagtactacattgtgaaagcaattattttgtttctagtttttataaaatgctgatttaaacttttaaaattggtc

SEQ ID NO: 51731 - DNA, 1016 bp, Homo sapiens
cgcatagacagcccggttaatcggacgaggcaggactgcgccgcgtcttcctcaaggttgagaacaaaaacatgcacctggagtttccccggagccctctgcgtggttgagcttcggtggaatttcggggctcttggctgccagccgcgcttgcctggtagcaacagaaaccagtcctgctcgcctccgtggacatttcattaccatccagaagtgtctcccactgaaggcatccgtggttgtttttaagccacaaaaaagccacacccaagatcttttacaccacatcacagtgaacacactggggagacgtgcttttttggaaaactcaaaggtgctagctccctgattcaaagaaatatttctcatgtttgttcattctagtttatattttcatttaaaatcctttaggttaagtttaagctttttaaaagttagttttgagaattgagacacaatactaatactgtaggaattggtgaggccttgacttaaaactttctttgtactgtgatttccttttgggtgtattttgctaagtgaaacttgttaaattttttgttaactaaatttttttcttaaaataaagactttttcacaatgactggcacagattactcagcaaaagatagcaaaacgggtggttgaagataattcattttaatcgtaatgtattttagtgtgaatttaaaaatttcatacatcaaatctatgatctcccttatattcttatgatgaggctaaataaaagtctaataaaaatgttaaatatgtgaatggtggaaatggtgactagcagcacacattctgggaagcatcaaatagacacacggccccagccacctgcaacttatgtgcactgttgtaaaccattcagaattttcctgctaggcccttgatgctggagtcacatctgttgatagctggagaactttagtttcaagtactacattgtgaaagcaattattttgtttctagtttttataaaatgctgatttaaacttttaaaattggtc

SEQ ID NO: 51732 - DNA, 867 bp, Homo sapiens
caatagcctgtgatactgagaaaataaaatctgatatcacgctctgctcaatgacagcatcagcattcactacgccatagagattctactactaggaggtaggaactcgatgttcgatgtcgtgtctcatagctcacatcagagtgaactcgctgtccggaagtgcagtcagggcgtagtcaaaggtgctagctccctgattcaaagaaatatttctcatgtttgttcattctagtttatattttcatttaaaatcctttaggttaagtttaagctttttaaaagttagttttgagaattgagacacaatactaatactgtaggaattggtgaggccttgacttaaaactttctttgtactgtgatttccttttgggtgtattttgctaagtgaaacttgttaaattttttgttaactaaatttttttcttaaaataaagactttttcacaatgactggcacagattactcagcaaaagatagcaaaacgggtggttgaagataattcattttaatcgtaatgtattttagtgtgaatttaaaaatttcatacatcaaatctatgatctcccttatattcttatgatgaggctaaataaaagtctaataaaaatgttaaatatgtgaatggtggaaatggtgactagcagcacacattctgggaagcatcaaatagacacacggccccagccacctgcaacttatgtgcactgttgtaaaccattcagaattttcctgctaggcccttgatgctggagtcacatctgttgatagctggagaactttagtttcaagtactacattgtgaaagcaattattttgtttctagtttttataaaatgctgatttaaacttttaaaattggtc

SEQ ID NO: 51733 - DNA, 604 bp, Homo sapiens
cagcggaacaagcaagagcttcaccttatttagaattgagacacaatactaatactgtaggaattggtgaggccttgacttaaaactttctttgtactgtgatttccttttgggtgtattttgctaagtgaaacttgttaaattttttgttaactaaatttttttcttaaaataaagactttttcacaatgactggcacagattactcagcaaaagatagcaaaacgggtggttgaagataattcattttaatcgtaatgtattttagtgtgaatttaaaaatttcatacatcaaatctatgatctcccttatattcttatgatgaggctaaataaaagtctaataaaaatgttaaatatgtgaatggtggaaatggtgactagcagcacacattctgggaagcatcaaatagacacacggccccagccacctgcaacttatgtgcactgttgtaaaccattcagaattttcctgctaggcccttgatgctggagtcacatctgttgatagctggagaactttagtttcaagtactacattgtgaaagcaattattttgtttctagtttttataaaatgctgatttaaacttttaaaattggtc

SEQ ID NO: 51734 - DNA, 937 bp, Homo sapiens
cgttgtggatatagttgtttcccttatattcgagagttcgctgtgtgttggacgtttctgttttagtcctcctgtttttgttctatagtttgttgtatcttctttgtgtttttttttttgttttgttgtgttgttctcattcgcggttgtaatgtctctttctgctgtgtgtgccctctcttgggtttgggcttcttttctttttggtccttcgcttggttttttttgcgagcctctgttctttctttttactggttctttttctgcttttcttgtttacttgccttcggcccccccttttggccccctctttcccgatttttgttctcttttttttcgtttcttttggtgctcctctctttttttttctttctttgtttttttttttttttgttttttgttgttttttttttttttttttttttaattgtcttttttttttttgggtgtattttgctaagtgaaacttgttaaattttttgttaactaaatttttttcttaaaataaagactttttcacaatgactggcacagattactcagcaaaagatagcaaaacgggtggttgaagataattcattttaatcgtaatgtattttagtgtgaatttaaaaatttcatacatcaaatctatgatctcccttatattcttatgatgaggctaaataaaagtctaataaaaatgttaaatatgtgaatggtggaaatggtgactagcagcacacattctgggaagcatcaaatagacacacggccccagccacctgcaacttatgtgcactgttgtaaaccattcagaattttcctgctaggcccttgatgctggagtcacatctgttgatagctggagaactttagtttcaagtactacattgtgaaagcaattattttgtttctagtttttataaaatgctgatttaaacttttaaaattggtc

SEQ ID NO: 51735 - DNA, 370 bp, Homo sapiens
cgaggtacgaggccgggtgttactcggcagaggggctgcgccgcgtgtcctcggagcgcggtccctgtattggtctcctgctcctagagccacaaaaaagccacacccaagatcacctgacacccaccctgacaagtgtccatgatgctgggccctgagggaggtgaaggctttgtggtcaagctccgtggcctgccctggtcctgctctgttgaggacgtgcagaacttcctctctgactgcacgattcatgatggggccgcaggtgtccatttcatctacactagagagggcaggcagagtggtgaggcttttgttgaacttggattcagtgaatgagaccgtagaaaggggggtaaccgaagctcga

SEQ ID NO: 51736 - DNA, 351 bp, Homo sapiens
gcaaatgggaagaagtcagttcacttcctgagtgtctaaatagcccacattcattgggccactttgcacattgctaggccctgtgctcggtgccccatgcgtatcaccacatttaacgagacactcccgttagaaaccacacttcgcagcaaaggaagccctcactcagagggtctaagacacttgcctaagcccacgtagcagggacatgtatggattgaaattcaaatccatcaagtggatagatttgaatttgaagtcatcttcctcctgtgtgaagccaagacggcctctggtcccttctgaggctcacttctcggcactccattactcatcttgcactgtccctcc

SEQ ID NO: 51737 - DNA, 183 bp, Homo sapiens
gaggaatgttagtggaaaagcaaggttttctatattaattatttaaaaaatgtctctgagactagtattaacctggaaaacttactgattatcgtaagtactatttctctctctctctttagttgccccttataaattccaggtttaacaactttttaaaatgttcttatgccatgaacatct

SEQ ID NO: 51738 - DNA, 487 bp, Homo sapiens
caaaagttgtaagagctgttttttgagttgggtggtgacttatgccttgttctagggttaatctaacagctctgtaaaccagatgttttgacctttggttgatagattgagcagcttcttcaggaagggaaagtcattctgtctttcagctttcctacattttctctgcagctccttactgggtgcacaaggaaaccaagtgagtccctggctttctgtcacaggccaccattctgcaatggttaggatatggttgctatacaagtgttatctctttaggatatcagtagagtggttttctcacaaaccctactgctgtggatatgtcaaactcagattttagtgctagagtttctattataagctttcagatttagtaacattaactctgaatctattaatacatgggaccttttttctcttgaagagaaagttagagtctctcagaaatagtcaactgaactttaaccctatccccttccaataa

SEQ ID NO: 51739 - DNA, 248 bp, Homo sapiens
cctgggcaacacagtgagaccctgtctctaaaaaaaaacaaaaattaagaaattagccaggcgttgtggcatgtgcctgtagtcctaactacttgagaggctgaggtgggaagatcacttgagcctaggaggttgaggctgcagtgagctgtgatcacaccactgcactccagcctcagtgacagagtggggtcaggaggaggggtcaggaagatctatgtataaagataggaaaattacctgcacag

SEQ ID NO: 51740 - DNA, 300 bp, Homo sapiens
cttaatcttaagaggttgtagaaggacagagatctatcttctgtcactgcttcatgctgaacaggggccatcatccctacctgctctggaggcatagaaatgtcttcgtacctgatcgaatgacttatagggactccatcttttctgcagtggcacaggctggaacactggactaattatttttctctgaaactgttgtagcctggaagacataaacttgaaccgtccgaacacctgatgaatataacaaatatttttaaaatcaaatagcacctagtgataattcataaaatacttaag

SEQ ID NO: 51741 - DNA, 180 bp, Homo sapiens
ttgccccgctgaattgtggctgtgtgtgtgaggacctgctagacagcgagctcagagcaaacagggactggtttggtggatgtgcatgccttggacctgactagcaagtcaatttttcctaatgaatgagtcccagacatcatcagtttagtaaaggtctgaggcactgaatcaatcact

SEQ ID NO: 51742 - DNA, 250 bp, Homo sapiens
cttggcttttccctacgcctgagaccctgtcactacttcgtctgaagtacagaggctctaataagactctcctgcatccttctttcttcctggaaattacattagacagtttccccaatgcatgtcccatggaacaccagtccctcctgccgttttctaggaaccaggcaagaaggagttctgtgaatgagcttccaccaagaattcctgaaacaggcttccacagagcccctcagggtaaacactggct

SEQ ID NO: 51743 - DNA, 194 bp, Homo sapiens
ataaaaactacactcatctaacatggcctaccagggcctgcctgatctcttcctcctgcctctttccctcatggttacacattgaagccaaactggccttctttctaattcctttcgaagaattgaaggctttaggaccttggtacatgctgttctcttctcttggaaaactccctcactctgtttgggtaact

SEQ ID NO: 51744 - DNA, 340 bp, Homo sapiens
caagaagcagctctgaaaatgcaaagtacctgtggtttgaattccctcaggttaatatcctgtattctttctaggtctcagatctctggggttatgctgttttgcatgatttatatcatggtcttgagggaactgaaccaccaaaggccccctcctcctgcactccccctttgattctagcagcagaaggcaacattgctaaccagggcagttaacaggccaaatccttgtcttttgggaataggatttggaaggggaaggggaatcctagagcctgcaggctgattataactacagtcagtactgtgtcccaccgaatatacagaacatgcggataaac

SEQ ID NO: 51745 - DNA, 1262 bp, Homo sapiens
tatttttaacatacttggttgggtttgagagaaatctgtggacgtaattttttgtttgtgtcaagctctatgactcatgcagtgattggtcccatgatcatggcctattagtgaaaacctccaaaggtcaggtggccaaggtgttcccacattttttctatataacttgtttcctaatagtctgcctttctacctatgattaaaaataatttttatatacaacattatttacatttcaaacatctctacgaagtcatgccattttaaggagatgaaaacagccacagagttgagtgacttgctccaaatcacataactaagccaggactagaatcccagactttcagattttctctgccctgggttataatctcttgtttttcagtgatagacctgagtcagtctgagatgcttatttatgaaacagtataccatgaatatttattatctttcttgggcatgcttttctacacattttgaatactttcaacagggattacccaagaatgcaacatctacctgtaataaatggggagaaaattagttgcctgagagaacagaatattaagcacacaaatactttccaacacagggttgtaaattgtgctcctcattttaaggtgctgtacgtgcatgtttaaggaattattaatcagtgtattctgcttgctttctgtattaaccagttccagaggatagccttagaaatgagtgtattttgaatcttaaagtttctttatatgcggcacagtgtataatgtcgtaagttaagaaaaatctgttatctttcaaagaagttacgtagtttcaaaaatgaggttttgtaatcagtgttgaaaaaactctgaactatgacttactttgaggatgatccttgagctcatgtatttgatctgctcaaaagtaataactaaagctgagttaaacagttgttatttatttcagggttctgatttttcccagctggctacacaaatggcctgtctgaatcctagtttagtgtgttttccacgatgggcagaagtcagaacattatctgcttctgtgaggatcataataaaaagttagttttaattacgagtttaaaggaattttagatttttttcagatgcagtattttaaaggaacaaaactcctgtgttgccttttgttgttgttgttgttgttgttgtttcctagagacaggttcttgatctgtcactcaggttagagtgcagtgatgtgttcatagctcactgtaaccttgaactcataagctcaag

SEQ ID NO: 51746 - DNA, 187 bp, Homo sapiens
attttttttttattactagtaggtatattgttgtactcaggctgagagtaacccggaattttacatacagctctggttaatcatttcaaataatctatatggaagattttcttaattcactttttaatgtctttgagtgtactctaaaccattattggtgtgtagtattttagcttgaagtaatcac

SEQ ID NO: 51747 - DNA, 169 bp, Homo sapiens
aaaagattagctaggcgtggtatggtggtgcacacctgtggtcccagctactagaggagctgagggggtaagatggatggctggagccggggaggttgaggctctggtgagctatgatcatgccactgtgctgcagctcagcgggtgacaaagccagaccctgtctctg

SEQ ID NO: 51748 - DNA, 319 bp, Homo sapiens
ctcactgcaacctctgcctccccggttcaagcaattctcctgcctcagcctcccgagcagctgggattacaggcatgtgccactacacccggctaattttttgtatttttagtagagacggggtttcaccatgttggccaggctggtctcaaactcttgaccccaggtgatctgcccaccttggccttccaaagtgttgggattacaggcacgagccaccactgtgcccagccagaactggatttttaacttgatttaaagaatttaaataggcccatgcagctagtggctactgtattggacaatgtctcttcagttg

SEQ ID NO: 51749 - DNA, 206 bp, Homo sapiens
cttgcatacaggtggcaagttattacattatttcttcctcctgtctacctgcagttggttttatgaggggcgttagtacacttcccaaagggcttgcccgcagggtgagaggtgcacattgaactccctcaccaggcagatgggaagtgtggccatgagagagagcttcaggggccctgggtttatgacatcgctgggccaggaat

SEQ ID NO: 51750 - DNA, 786 bp, Homo sapiens
taagagaattcatactggagagaaaccctacacgtgcgaagaatgtggcaaagcttttaaccaatcctcaactcttatattacacaagagaatccattctgggcaaaaaccttacaaatgtgaagaatgtggcaaagcctttacacggtccacaacactgaacgaacataagaaaattcatactggcgagaaaccctacaaatgtgaagaatgtggcaaagctttcatatggtccgcaagcctgaatgaacataagaatattcatactggagagaaaccctacaaatgtaaagaatgtggcaaagcttttaaccaatcctcaggccttattatacacaggagcattcattctgaacaaaaactttacaaatgtgaagaatgtggcaaagcctttactcggtccacagccctgaatgaacataagaaaattcattctggagagaaaccctacaaatgcaaagaatgtggcaaagcctataacttatcctcaacccttactaaacataagagaattcatactggagagaaacccttcacatgtgaagaatgtggcaaagccttcaattggtcctcatcccttactaaacataagataattcatactggagagaaatcctacaaatgtgaagaatgtggcaaagcttttaatcggccctcaacccttactgtacacaagcgaattcatactggcaaggaacatagttgaatgacatttctagtaatctctaattccagtgtctttacacagcaaataaattggagaatattgctcccatataaaaaaaa

SEQ ID NO: 51751 - DNA, 228 bp, Homo sapiens
cttgtctcaaactcttgagctcaagcaatcctcccactcggcttcccaaagggctaagattgcaggtgtgagtcactgcacccggcctaaattgcatcttgccagtagactgaagctcagattctgtattctacacattttaaaactcttcagtttgaagtattctttatagataccacaatacaattacttttgtaaccaaaaataataattccctcttgaaaaaaa

SEQ ID NO: 51752 - DNA, 180 bp, Homo sapiens
tctctgttctactattgatgggcggttaagaatattttgagatatgacttacatttttaggggaaaaattcgttgttatgtaaatccataattaaacagcattgaataggtaggtagattctactgtattagataattgcatcttattttgcagttacctgttttttatatattaaacat

SEQ ID NO: 51753 - DNA, 284 bp, Homo sapiens
caaagaagtagctagacgctgtggcatgtacctgtagttctagctgctcaggaggctgagtcagaatcacttcagcccaggagtttgaggctgctgtaaaccacagtgatgccactacactccagcctgggcaacaggatgacccccattcaagaaaaatgatagaggtttagtatttgtaaagtactctatgggaaaatagtattaagaatttccaggccaggcacagtggctcatgcatgtaatcccagcactttgggaggccaaggtgagtggatcacgag

SEQ ID NO: 51754 - DNA, 435 bp, Homo sapiens
agaagctgagggaaatgcttgtacttttctcttttccccatcttgagatggttcttctgggttgtgaaataccttagaaaagattgtattttcagcaatttagtctagtggagacgtagcagaatgctagggtcagccagatctgggtataattgtaactctcgtgatttgatatcttggtaatttagactagagccagagcagtttttaaagagaatcttttctgatcattttaagcagcatgataaattctaagtaaacataaattttgaataattacagagtgggcatgagctcttcctttctttgttcctctacatgcaagaaactggatgccaagcccaacctctggatgaagtgggaatctgtaaggatgacgtacctaagtctaaatcagacaaaaagacacacacaaaatacatttatacattttta

SEQ ID NO: 51755 - DNA, 613 bp, Homo sapiens
catctcccctcctccaacccccccctccccccaccacacacacacgaccagtagctactattttctgtttctgtacattttataaatggaatctctttcgtgtctagcttctctcaattttatgcttgtgagattaatccatgttgttatgtgtatttgttatctgtattatttttaaattcaaactaaaaaaatagtccctttatttgaaaactaaagcataaagtgccaacgaattctacaactcctgctgtgggaaaaaaagcagtttgtcaccctgccctcattctctatttgcttttaatgcagtggcaataatttaaagttttcagctgacttgcactatttacctccaggtctcttaagatttttagctttcacatacttctcttccctctatctcctaccctacacacttcacaaactctgtaccattccaatggctttatctttattttcatcagaaattcagcatttttcagccaggtgcggtgtctcacgcctgtaatcccagcactttgggaggctgaggtgggcagatcacttgaggtcaggagttcaagaccggcctgaccaacatggtgaaaccaggtctctaatacttaaaaaaaaa

SEQ ID NO: 51756 - DNA, 276 bp, Homo sapiens
tgggcagaagtattgtgagtgagaaccaaattccttactagtcctaccacctgagcttcaaggattgtggatatccagtggggaggagaactgatggggactggggcgagaaggtcagatctgaagaaactccaggggcatgagcagacccagcatccatggacaacgcagtatccactcacatgagcctgtgcaccaccggtgcatcggggctgcactggttgtcttgtcctttggcatccagtgaggacttcctaggagggctgttggcatttt

SEQ ID NO: 51757 - DNA, 451 bp, Homo sapiens
gagtagaaaagatataccatgctaacacagaagaaagcgggaagctgtattattacacaaagtaaacttcagaacaaggaatgttagtagagttagaaagagagactgtgtaacagataaaggagttgattccttaggaacatagaacagtcttacatgtttatgtatctaatatcagagctgtttattctctagccataatggattaaactagaaatcagtaacagaggtatccagaaaatcctcaaatgttcagaaattaaataacttcatacttacaaataatccacaggtcagagaggaagtttcaagggaaataaaaacattttgggccgggcgcagtggctcacgcctgtaatcccagcactttagggggccgaggtgggcagatcacaagataaggagatcgagaccatcctggctaacacggtgaaactctgtctcgactaaa

SEQ ID NO: 51758 - DNA, 299 bp, Homo sapiens
cctgtagatgctgcaccattttacatttccaccaggaatgtgtgaaggtacatattacctcttaatcctcacaatagccttaagagttaggttaagttactatcctaattttttaagtggggaaactgactcagagagattcagtaccttttccaaaaatcacggagctaagaagtgaaagaatcaggatttaaaatctggcagtgtggctctacaatctgctttgaactctaacgtaatatgtgcaaagcctgaagcaacttctcagtactgtatttaagagggcatatcaatgtaag

SEQ ID NO: 51759 - DNA, 166 bp, Homo sapiens
catagcaagacccaatctctaccaaaaaattaaaaattagtcaggtgtggtggtgcacgcctgtggtccgtgtggccccagctactcaggaggctgaggcggggagggagggatcacttgagcccgaaaggttgaggctgctgtgagttatgatggcaccaccaca

SEQ ID NO: 51760 - DNA, 559 bp, Homo sapiens
ttgtccttggaggtttacttttctcctctgtgtcctcccatgcataaagctgagagagttaactttacaaagaagtaatcaaatagatgaaaaataccccctaccaaggtagcccatgtaagaactaaggaaccaccaaaatcacgcatatcagttcaggagagaaagttatcatttagctgtttgacacgttgaatcttttccaaaagcaatgaagctagctcttggagtgcagaagctctcttgtgctgggccacttccctggtctcaaccaagagagagttggctccactaaagcagaaattctcagtcccatccacaatcactgacttcttctaacaagtcttctgaaaatctctttactaatttctgaaatgaaattcagaaataatataacctacctatgcatataatttttaaaatcagtgtaaggtctaaattgaaacataaagtagaaataatttacactaatacatatataacattaataatgaataattattatattaatagccttacaataaataaattggtttttaaatacagtatattcaactaa

SEQ ID NO: 51761 - DNA, 176 bp, Homo sapiens
catttccctaatattattaaacacctttttataaatttattggccatttgatttgggaatctcttctcattttaaaaattggattgtctgtctttttcttattgatttgtaagcattatttatatattttggatattagtcttttgtcaatataaatacacatatatatagaaaat

SEQ ID NO: 51762 - DNA, 843 bp, Homo sapiens
ctaaatggctgtacttttattttattttattttttttgagatggagtcactctgcactccagcctgggcgacaccgtgagactccatctaaaatagaagaaaaggtttctcttcatggacattgtttgcatctacatgtgacacttaggaatgatctgtttagtctcaatcactcactcctggatctgcctgtctctctctgagataacaaaggccttaacccctagccacctgcatcagagttggtgaggtggtttgaaacaattcatcctaatataaaaagaacagcttttgtaagggggcactgagtgtctcaaacagccgcatgggcaggaagagtgctcagtccagttttggttgaatttgtcttgttgccctaaggcctcctatgaaagactgacaggcttggactgaatcttgtgatctggacaccaagggtcacctgtgggcccagagctagctctgaagaatggggtagtttctttgagaacctccacagcaaaagtttggtcctctgttcccaatgcatgtcccactttaccagctacatcccccagtacctgcccatggctcatgactcatgaaatataaaactcagtaggcaggcataactggttcagacctgccagggctatgtgggaactatcattggtacaaaaactctaagtgtggagaagactgtggtagacaagaggggacatgtctgttctaaacgcacatcagaaacttccaatgactatggccaagtgagataagggtgtacagaacttctcaggacatgcagacctatgtgtcactcataactgaaattcaaataaatattttgtggatttcctgtggact

SEQ ID NO: 51763 - DNA, 338 bp, Homo sapiens
catttgtttgttctgcatgctgcagacattttgctctttgtcagatatctatcaatttaatccatgatgtctttgataaacagaaatattgcattttttatttagataaatcagtctttcatgatttctgctttcggtgttatgtttaaagaggtcttctctttcccagtgttatataaatatctgtctaatttttatttcattttttcagatttgaatttttactccaaatggaatttatttttgatataggtgtgattaagggtctaaatatttatttagttgttgtatcatcatttattgaaaactcacttttctactgttttaaaaattccaca

SEQ ID NO: 51764 - DNA, 402 bp, Homo sapiens
ccctccctctgcctgcttgagctgggacatggatcttctcctgccctcagccctctgggttctcagaccttcagactggaatccacatcactggccctcagctctcaggccttcaaactacaccagcagctttcctgggtctccatctggcagagagcagactgtgggacttcttaagctccatcatctcatgagccaataccttataatcaatctcttcaaaagatacacttttaggatatctattccgatagacagaccctattgtttcctgtgtctctggagagaactgtaatacactaggcaataatcagtcgtatttatagttatttcacatgacaaatgttctggtgtaattcaacagtaaaattaactcctcaataacacttaggccaacaattg

SEQ ID NO: 51765 - DNA, 348 bp, Homo sapiens
ctctgttacccaggcaggcatgcagtggcacaatcatggctcactgcagccctgacctccggtgctcctttcatctcagtcttgtgccacacccaactaattttttgtagaggtgggattttgccatgttgcccaggctggtctccaactcctgggctcaagcagtctccctaccatggcctcccaaagtgctgggatgacaggtgtaagccaccatgcctggccaggttgcttctaattatgcacagctctgtgatgagcatcatttgtagcttaatctttaggccacatccttaggataaattcttaagagaaaatctgatgaattaaagcaaatttttaaattat

SEQ ID NO: 51766 - DNA, 248 bp, Homo sapiens
atttcttattcaaactttgattttacaaatacagaaactacgattcagagaaatatagttacttgatttcacaaagctagacagtaagaatcaaggatggaattagattttctgaatccagaattttgagttttattatatcatatttttattacagcatgcttctagtggtggaagcaatccatggagtagtttacacagatgcataaatgcttatctttaaccctaaaatttaaaactttcataaa

SEQ ID NO: 51767 - DNA, 284 bp, Homo sapiens
atgtgtgtgttgggagaggggtgtggattcgttaggccaaagatttcggtaatatatttggaagagataaatgaagataaagagataaattaccttttgaataattccaaaactaaaaatgcttcccttaatttttatttctgattttcttatttctatcagagaaatgtttctcatgtgacaaatataatgctttcatatttacttctgcatgcacaacttttaattaagtattaattgattaattttttagagacaggatcttgctgtgtcatccactttgg

SEQ ID NO: 51768 - DNA, 84 bp, Homo sapiens
agttggtccgagtgttgtgggttattgttaagttgatttaacattgtctccccccacaaccgcgcttgactagcttgctgtttt

SEQ ID NO: 51769 - DNA, 222 bp, Homo sapiens
ctggtttgaagtagaaactacataggaattagactggtgctttataatttggcatacattctttgggatagtttaatacaataaggtaaaatatttcagaaaatgccacatataactccatatttacatatgctttatgaactgtaactctggctaatcaaatattaatgctttaaacagaaagcataaattttacatagcttgaaacatgtaagcagtgaa

SEQ ID NO: 51770 - DNA, 380 bp, Homo sapiens
gtcagttttgctagtacttggtgctttttctgtgtgtcttgtccatgatcaatatcctaactccattttaaaccaagtcctccaggaaataagcgagcccccacccaagtcgtttctttccctgccaaccagcttgggcctcttagttttaacgctgcaggctctctttgtgattttttgaggcgcaattctgggtgaacaggaggatgggcaggacagatcgacatttattgaatgcctatcacgtcccaggttttacatacacaatgctcgttcatcattctgacaaccttctgagggaatggggcattatctgcattttatacataaggtaacagaccaaaaaggttttagtaagtttacatagctggtagttgacg

SEQ ID NO: 51771 - DNA, 166 bp, Homo sapiens
gaagctggaacacaggctggcggcagcagggaagagtttcgctggccaggctgacgctgaggcgatggggtgctgctgaaggacgtgaaagcagaagagataggtggtcagatctagacctgaggaacgacatcacccacgccaggtcggggatggaggtagccat

SEQ ID NO: 51772 - DNA, 821 bp, Homo sapiens
tcagaactcagacccctcggctcttagtccaatgctcctctcctaacccaggttgcctttggggaccttgggggggtctctcatttcattgggaatgcctaatggcattggttgccacgtgttgccattgttggtgtatgtaagtcgctcttctgtcctcatatccccactctgtcgtcctgccccttcttgggggtggatcctgcaggagagggggaagcagccaagcaaggcttcatttctacttttccatctgcaggacccagggctgggcacatttggtgcaacaggctggaaatattctcccctaccccaccctccccatccctcctcagaggcactgggccggggactggagcctgtggtgaggtccttcccctcaaagcctgtcgggggcagccactaaatggccccaagatcccatggactcaagggattccatgtggcatcccttcccgtgctgcagaggctgggaaacttaaccacatttcccagactctcttgcagctagtgtttctgatggcatggaaatcctgccattgaatgcaaacgcacaagactagaatttggaactgagtttcgtggggagagaggcagggcatggagcatccaagcatccattttgctgtgtggatggtggtagagtgcaggcctaatgctggagctggcagttgtaatggtggcttctgaattccacagcttcttgatggaggcaggagccctggcatcttagcccagttcagcagcgttttaggcagctttcctggatgctcagacacttagtaataatatgcttgaaaaaaaaaagccctttttttccc

SEQ ID NO: 51773 - DNA, 188 bp, Homo sapiens
acattgtggtaacccctaaaatggaaggggtttgtttgtttttttgcttgtttgcttgctttaccaagtgtttacaatgagcaaggccttggaataagcattttatagacacagttttatttactctttccaacagccctagggggtaaaattactatcgccattttacagacaagaaaattgaagtt

SEQ ID NO: 51774 - DNA, 313 bp, Homo sapiens
ctttttcctgagatttttctgtttttagagttcacaggcatgtttttgtttttaacctgctgtccagcccaccccgtgtcccatgtaggacgtgtcgtatgcaggacgtgtcccgtgggcccccccccaaccttctgacatgggagtcccacggcagcctctgccagcattttcagttccaaagcctctcttgctgggcatggtgacacatgccggtgaatcctcatttgcctgggtctcgggaccctcccaccctggcctcctgactcggcacagtgttgcgtgcctgtgaatcctcatctgcctgggtctc

SEQ ID NO: 51775 - DNA, 329 bp, Homo sapiens
atggatgctgtggaaccccagaacctctccactataacctttactcattgccttaaaccagtctcaaatttacattatttcaataatatatttatttagggccacaaatccccatgcaagctccatttttagagaagttttttttttttttttaagctgttggctactttagccctcatgtagcaaaggttgctctttcttaaaatttctctgtccttcctaaagaattaattggacttgagtgtagaacctggatttgatcctgggtttatctctcactctttggcccttgaacatgttcattggtgtctttgagcatacctgtaaaa

SEQ ID NO: 51776 - DNA, 1447 bp, Homo sapiens
taaaatatgtgaaatccccttttgttctgaggattctttagtaggcaggagtgaccagattggaatatgcttggctggaaaaattaagattcaacttaacagactgttaataaccagaaccatcttctcttccgtaatgtggatttgccactgcaggtcaccctacaatgctatgttagaggtacaacactcctaccctcaggctataaacaaggtgaattattatctttatatctcttcatttagccctgatttgctgaagtgaaggcttgcttgagagttggttgcattataatttggtgagaatttaatctctcaatgacaacttacttgattccctcattctctttctgctacatagatcacagtagaccttggcagacagttctgtagttacataggtctgaattcaaaatccaggtctgccacttggcgtgctggtgaacttaagcaagtcaggcaatgcttctgatgtttttttcctcctccacaaagaataattaacatataacaatagggtctcagctagttgttttaaaaatggttagagagatgtgtggaatgaagtaagtgtgcagtaagtgttaactacaaatattattatcttagacatacagatttccatgattcatgaatggtgaagcatcttagaagacatccattctaagccaggcatggtggtgtgcacctatagtaccagttgctcagtagaatgaggcaggagaattgcttgagcctaggagtttgaggctagtatgggcaatatggtgagaccctatctcaagaaaaaagcaaaactttttttaaagcttaaaaagagagacatctgttccactactctcatcttagaggccagaaaactgaggctcagataatttcagagactttcacagatcccccaaccatttgatggcaaagccaggaatagaactctgctctcctttcccactgggacagtgggacagactgaccgatttttttctccacctctgctgtctcagcaatggtttgggacagtgtggatggaccagaagctggatagtacagagcccaggataaaaagttcagggcttcctgaagggaagctgcagtcctccctaggcccacaacacccttcgagatagaataaatacagcacccttctctacccaagttaggaaaggaagaagtgttacccaattagttgtatggggactgccaaagcacgccagtctgaagatgagcagaaactggctcattccatttggcacctagcacactaactgcaccagttaataggccacgcttttctccagagccattggctgaagagttcaaataaaaagtattgagaataggctatccaaaacagtaggctcagatgctatcacacaaagcactttatccttaagttcaatttttctaaattgtagttggctgctttggcttaataaaaaccttcataaaa

SEQ ID NO: 51777 - DNA, 155 bp, Homo sapiens
ccatggggaacaaattaatagttcattaatatggtgattcatttagtcagcaaatatgtgagtgttttcatccctatgactccaccagaattcctcttcaaggtcactaatgaccctacgttgccaagtccattggtcgaatctcagagttcatt

SEQ ID NO: 51778 - DNA, 909 bp, Homo sapiens
taactcattgggatttgttatgttcctgtaattttttcccactaacaatttcttaggaaattaaagattatggaacagatcacttacaaatcttaactcattaaaatgagcatgaataccataccctcaggagaagcagagttttgaaacacagttaagtgttagcaattgtgttctgctttaaaagaattataaaggaaataccatcatgttgaatttgttgaatatgaaagacaggaaaaattgtcatgtttcctgttgctcttttataaacactggaaacaaatttattatactagttgcatatgctttataaatttgatgacattagtcttttgatgaaaaaaatgttagaataacagaagatacttggaacatgctagaaaagggactttgtatgtaaatttgtctttttttcttaatattatacttttgttcttcaaaaattatttacattgctggtctcgagctcctgacttcaggtgatccaccaggcgtgagccacctcacccagccctgtatgcctaatttattcaggcatccgtaggcaatattcatgggttaaagattctttacccatttgaggttgcgtgagccaagaatggcaccttctgacttcagcctgtgcaacacaaggggagactccatcttcaaaaaaattattacttttggacaaaggtttcatgtagtataggaagtcaatacatactgttagtcgggccaagtggtctctcctttggtacggctcggtttttcaaatcgccacctcagctttgttcattggattcggtccagtaggccagtctaaaggcgtggcggttggcacctgccccttggcagggtacttggcgacgacatggactctactatacggggctcccacaataaggagctccaataacatctcat

SEQ ID NO: 51779 - DNA, 520 bp, Homo sapiens
tcccatttttataattattggaacatgaaactgtatttctatgaactcaatgatttttttccataaaattatatgctaagagagtcaccacaaaactatgaattctctcccgaattatttttgcttctttggagcaccatagtctttgttcaaatcacaacatgaaactgttgctgcaatgctaaagatgtgaatccaccactatcaatacggtcagggtaaaacctggagccacatgttattcaagttatttttgttatctaatgattgacatgaaaataaaatagtaagccaatattaatttgtaggcatagttgccccacttaaagtgtttacaaagattttcatgattaatctgggtttatgatttaatcctaactcattgtcattatttcctgaatgttgaactcccattataggaaattccacattttgttttgttttctttgtcttgtttaatagagataataaccatacacccctctccagaaaaaagtttttaaaaattattatgatatat

SEQ ID NO: 51780 - DNA, 199 bp, Homo sapiens
aagttctcccctcacaagcaaaatgggtccctcttgccttctcccccaaagaaatgagtatgttttacctgaccagtctgtttagtattttaaaagctgactgggcacgtggttcacgcctgtaatcccagcactttgggagaccaaggcaggaggatcacttgagcccaggagtttgagactagcctgggcaacatgg

SEQ ID NO: 51781 - DNA, 254 bp, Homo sapiens
taaatcttcccagataaaaggcctcaagtttggttattaagacaaggccttgttgacagtttcatatttaactgtttagaactcagctgtcagggctgtaatggggtgtatggccaaggggcacagggcctgggtgctgtttgtcacctttcctgcacctatccgggccctccctggtggagtgtgtctactgtttcctgcaatcccctcagttaacttctgggtgacctcgctgtgccttgcacttattcatt

SEQ ID NO: 51782 - DNA, 598 bp, Homo sapiens
cgtattatatgattccatttatataaaatgtccaggatagtcaaatcaacagagaccaaaagtagattaatggttgacagaggctgaaggtagggaggaaatggggagtgactttaatgggtacagggttttttttagataatgaaaatgttctggaattagtggtgatgcacaaccttgtacaacctttttgcaatatagtgcaataagacaatattgtacaatcttgtttatatactaaaagccattaaattacacactttaaagggggtgcattttatgacatgggaagtgtacattaaaaataaataactattccctagcaagctgactaaaaataataaaaataaaaaatatattaatacataaataagtaagctaggacaatgggatgaactaaaactgaatgtatgaatatccaagatctggcacttaatgtacttccggttcctaaagataaataactggagaatgctggggttgaagaagacgcccaaatgttttccccacaacaaaatgtttaaacctgaaatcagaaactttaaaggagaggctatactaatgttacatatagcttccagatcatctcaattttgcg

SEQ ID NO: 51783 - DNA, 1126 bp, Homo sapiens
  misc_feature (6)..(7): n is a, c, g, or t
  misc_feature (11)..(11): n is a, c, g, or t
  misc_feature (14)..(14): n is a, c, g, or t
  misc_feature (42)..(42): n is a, c, g, or t
  misc_feature (103)..(103): n is a, c, g, or t
  misc_feature (148)..(148): n is a, c, g, or t
gaattnncagntcngacaaaatgatgggaaataagtaaacanccttttaaatcttcaccagaaatcaatagggtttaaagatgatggacgttggtgttttttnctgcttaaggacttcaaccttttacgggaaaatatcttctctacntgtcagcagttttttccatgcacacaatgaatcgctgctgcaaatagaacattctgcatagaacattcttcatcattattataagaaagaagctgtgtaagactggccttggtaatgtagagccttttggggcatttttgtatgaaaagagaggaccatatcttacaattttgttttcatcataagtgtaatttatgtgccaaactttttcctcaactaaataataacagtttttatatactgagaacctcctttgtactgggcattgactgtgtgatgttttaaggtagattatttgaccccactttatagatgacaaaattggagcccagaggctctaagttcgtctgactagtgatagaactgatacttaaaaccctagtccatctgagtttaaagcttatccttttactactttccagctgtgtctctgaggacaggcactcaataggtgttcttgcccttggttctatttcttcggtagtggtatctcttattttctttctccttttccccctagtcagtaaaactaatataagtgatggccttcacatcatttaataagaggataagagctacatcatggtcattgaataaaagaatatgggttaagaactgcttcccagtatactctgcagatttgatttattatgaatgatttatgagatattagattgctgtatagtagttagcagtgtattcacaatcagctgcactctaatgccaagtgttgaaatattaactgaacgtatcatgtagtgtcctttgtttataacataataatcttgactttacaaaatagttaactttccagctgtttaatttgtacatatcattgtacaactgttatctttgagaaagcagcttatttattttgtgatttggaaatagtctttgtaattcaaactaagaaaatcaacttagttttgtaataataaatatcatggaacatacactgctaaataaaaattttcacat

SEQ ID NO: 51784 - DNA, 188 bp, Homo sapiens
ctgtccatgcaattataagatagcttaacaacaacatttctcagaacatatcgccattgttaaatgattcctgactgtgcttgcaacacaattttagtcattattgatagcagtctgctctattcactcaaaatcttctcttttctcaacccatcattcacgtgcatacatacatacacatatttaac

SEQ ID NO: 51785 - DNA, 464 bp, Homo sapiens
tttcatcatttgatctggcagcagggcagaggtgcaccaggagtaaaaacctttcaaaaaagaggtgtggctttcctcatcccctggcaaacattgtcaccaaggtgggatgttgctgctaatgggagagtcatcataaaaaactgtccctacaaggagagtgttacatggtgttgggggaagaaaacctacgcttcaggctcagagaaacctggattcaaatcctgcctctctcacttggaagctgtgttacactggggatgttatttacttgtttattagttagcacttagaatgagttcatttttaggtgagataatatattcacaatgatacacaaaagtgcacactgtgtgctccctttaccatttactatctccctccagccccaacgtgttaccactcttactagttttttgttaatctttccggcatttttaaataaaaaccaagcaaatgtaaat

SEQ ID NO: 51786 - DNA, 350 bp, Homo sapiens
ggactctctgaagcatctaaataaagacctggagcagaatgtcctcaggccctaaagcttgagtttacccagaagacaacaggtggcttgtgttctgctcagttctaggccagagcaacgggtgtcttcaaaggtttccactcacaaaagatccaattcagatggatgccttcagctccctctcccatccaaaagggagattagactccagattctctttcctgaatatcttttctcctgtgagttgtattgcttggattgagagaactgtctctgggcaaagacagttcagcaacagtggcacagatgaaaatataagtgcttccggaaccaaaacgatactcctcacc

SEQ ID NO: 51787 - DNA, 306 bp, Homo sapiens
tgcagcaggacagaggagagatgcgggtgcctcaggaggatatggcggagatgagggagtgagtcagattcgagttgggttcagaggcaggtccaaaaccctgcagtggttccatgtggaggcgaggggaggaaaggaatcagggatgactctgtggattcagctataccgtttgtgaggacaacggtgccaatctctgaaatgaggaagacggaaaaggaataggattggagacagaaggaattaagtgctgtcttttgaacgtgctgtgtgtgtgtgtgtgtgtgtgtgtgtgtctgtgtgtgt

SEQ ID NO: 51788 - DNA, 377 bp, Homo sapiens
aaagacggaaagacagaaagacaaagacagaaagagaaagaaagagtccaatgcgtggtggtaaagaaaggacaatccaggctgttaaaagcctgtcttgttacctagctcccacctggacccacatctgaacgtaaaaattgactcaagagaagaaaccatataggtcctcttgggatttctgctgtgaccctagaggctgggccgaggtccgctgaataggtagggatgactcagtgcctgctgtctagggtggctttgtgccgggcacaaagaaaggcgttcaatgaacatctggggctgctgttactgttactcccttgggttctcacaaacactctcagggtccggacacggtgcttctcagggacataaac

SEQ ID NO: 51789 - DNA, 132 bp, Homo sapiens
  misc_feature (23)..(24): n is a, c, g, or t
  misc_feature (119)..(119): n is a, c, g, or t
agtgagactccatctcggggggnnaaaaaatccctattacaaataaaagctgttgtgatccagactgcatatacctcaattccttactttctggtgctatgagattccaggcccatctngtatttcccctgc

SEQ ID NO: 51790 - DNA, 351 bp, Homo sapiens
cctttctgatcacagccccaccaccctgggcccccagcaggtgcgcctggctccctgcccacagtgtctgggtaggaagagttcggggcgggtgggagttaattgaaaggcaggcgtgtggaacgattgttggggaaggaagagacctgtagctggtatgggtgactcagccccgctgtcaggccctcacgagcaggaacaggaaggggggcagagggtgtgttaatggggagcagcgccatgcctgtgatgggcgggctctgctgcccagggttgggctgggggcccgccaagggtggctccaagttttcttggcagagcagcattaacctggggatgggagatgtggcc

SEQ ID NO: 51791 - DNA, 2022 bp, Homo sapiens
  misc_feature (1893)..(1893): n is a, c, g, or t
  misc_feature (1928)..(1928): n is a, c, g, or t
  misc_feature (1930)..(1930): n is a, c, g, or t
gagctcccacgctgctgttcttccatttccagcttttaaagagcacccgccccttcgaaccaccgaggtcatgggcgaacacaccggagcgcagaccgcgcccccccgcacacaccgcccgcctccgcgcccttgcccagaccgaggcggccgacgcgcctgcgtgcgcgctaggtataaataggtcccaggaggcagccactgggcagaactgggctacgggcgccgcgggccatggcgggcgagaaccaccagtggcagggcagcatcctctacaacatgcttatgagcgcgaagcaaacgcgcgcggctcctgaggctccagagacgcggctggtggatcagtgctggggctgttcgtgcggcgatgagcccggggtgggcagagaggggctgctgggcgggcggaacgtggcgctcctgtaccgctgctgcttttgcggtaaagaccacccacggcagggcagcatcctctacagcatgctgacgagcgcaaagcaaacgtacgcggcaccgaaggcgcccgaggcgacgctgggtccgtgctggggctgttcgtgcggctctgatcccggggtgggcagagcggggcttccgggtgggcggcccgtggcactcctgtaccgctgctgcttttgtggtgaagaccacccgcggcagggcagcatcctctacagcttgctcactagctcaaagcaaacgcacgtggctccggcagcgcccgaggcacggccagggggcgcgtggtgggaccgctcctacttcgcgcagaggccagggggtaaagaggcgctaccaggcgggcgggccacggcgcttctgtaccgctgctgcttttgcggtgaagaccacccgcagcagggcagcaccctctactgcgtgcccacgagcacaaatcaagcgcaggcggctccggaggagcggccgagggccccctggtgggacacctcctctggtgcgctgcggccggtggcgctcaagagtccacaggtggtctgcgaggcagcctcagcgggcctgttgaagacgctgcgcttcgtcaagtacttgccctgcttccaggtgctgcccctggaccagcagctggtgctggtgcgcaactgctgggcgtccctgctcatgcttgagctggcccaggaccgcttgcagttcgagactgtggaagtctcggagcccagcatgctgcagaagatcctcaccaccaggcggcgggagaccgggggcaacgagccactgcccgtgcccacgctgcagcaccatttggcaccgccggcggaggccaggaaggtgccctccgcctcccaggtccaagccatcaagtgctttctttccaaatgctggagtctgaacatcagtaccaaggagtacgcctacctcaaggggaccgtgctctttaacccggacgtgccgggcctgcagtgcgtgaagtacattcagggactccagtggggaactcagcaaatactcagtgaacacaccaggatgacgcaccaagggccccatgacagattcatcgaacttaatagtacccttttcctgctgagattcatcaatgccaatgtcattgctgaactgttcttcaggcccatcatcggcacagtcagcatggatgatatgatgctggaaatgctctgtacaaagatataaagtcatgtgggccacacaagtgcagtagtgcagttcaccatgagggaagaataaagagctgtgggcaaaagagtgtaaaatattttaaaataaactttcttaatatttttacatgcagagtatttttgtattcaattaaagaaataattttattcccagcacagtcacaaatttctctgttccatagttaaagaagacatttgccaacaggtagcatagctctgtacatcttttaaaaaaaaaatngcagggtactagtataataagctattttcacaagngnagcaatttcatggaacctgctcaaatcaaatttgtacatattgttataataaattttaaggtcttaactattaacttgattgaaaaaagctt

SEQ ID NO: 51792 - DNA, 1758 bp, Homo sapiens
gagctcccacgctgctgttcttccatttccagcttttaaagagcacccgccccttcgaaccaccgaggtcatgggcgaacacaccggagcgcagaccgcgcccccccgcacacaccgcccgcctccgcgcccttgcccagaccgaggcggccgacgcgcctgcgtgcgcgctaggtataaataggtcccaggaggcagccactgggcagaactgggctacgggcgccgcgggccatggcgggcgagaaccaccagtggcagggcagcatcctctacaacatgcttatgagcgcgaagcaaacgcgcgcggctcctgaggctccagagacgcggctggtggatcagtgctggggctgttcgtgcggcgatgagcccggggtgggcagagaggggctgctgggcgggcggaacgtggcgctcctgtaccgctgctgcttttgcggtaaagaccacccacggcagggcagcatcctctacagcatgctgacgagcgcaaagcaaacgtacgcggcaccgaaggcgcccgaggcgacgctgggtccgtgctggggctgttcgtgcggctctgatcccggggtgggcagagcggggcttccgggtgggcggcccgtggcactcctgtaccgctgctgcttttgtggtgaagaccacccgcggcagggcagcatcctctacagcttgctcactagctcaaagcaaacgcacgtggctccggcagcgcccgaggcacggccagggggcgcgtggtgggaccgctcctacttcgcgcagaggccagggggtaaagaggcgctaccaggcgggcgggccacggcgcttctgtaccgctgctgcttttgcggtgaagaccacccgcagcagggcagcaccctctactgcgtgcccacgagcacaaatcaagcgcaggcggctccggaggagcggccgagggccccctggtgggacacctcctctggtgcgctgcggccggtggcgctcaagagtccacaggtggtctgcgaggcagcctcagcgggcctgttgaagacgctgcgcttcgtcaagtacttgccctgcttccaggtgctgcccctggaccagcagctggtgctggtgcgcaactgctgggcgtccctgctcatgcttgagctggcccaggaccgcttgcagttcgagactgtggaagtctcggagcccagcatgctgcagaagatcctcaccaccaggcggcgggagaccgggggcaacgagccactgcccgtgcccacgctgcagcaccatttggcaccgccggcggaggccaggaaggtgccctccgcctcccaggtccaagccatcaagtgctttctttccaaatgctggagtctgaacatcagtaccaaggagtacgcctacctcaaggggaccgtgctctttaacccggacgtgccgggcctgcagtgcgtgaagtacattcagggactccagtggggaactcagcaaatactcagtgaacacaccaggatgacgcaccaagggccccatgacagattcatcgaacttaatagtacccttttcctgctgagattcatcaatgccaatgtcattgctgaactgttcttcaggcccatcatcggcacagtcagcatggatgatatgatgctggaaatgctctgtacaaagatataaagtcatgtgggccacacaagtgcagtagtgcagttcaccatgagggaagaataaagagctgtgggcaaaagagtgtaaaatattttaaaataaactttcttaatattttta

SEQ ID NO: 51793 - DNA, 1533 bp, Homo sapiens
tcttatttatgagatttgatattcgcccataataggagtgcctctcgcttattaccattattatttttttaaagaacactggttctgctgctctgtgatgattggcatggtgcttttaaaatacttttctgttgaattttttaggaaaagggaaggaaaatgattgcaatcatcattaacatcatttaaaccaagtggtcaactgctaattacttgaatacaagttaaagaactttgcaacgatattatcatcatggaagatcaaaggaccttcaaaagcagcctcctcttattactttccttataaaaacttacatccacttaaactttcctgcatttatttctttcacttttacttcggtatcacactatactgcaaaaggtcatgtgttttctattacaaaagttattcttgaatcatggtacaattcgtgatgttttcatgtttactttttaaacttttaatgactataagaattttcaaaaacttcttactttaatatttttgaaaagagcctttttgaacactcattaggaatcattcttttatttttttcaaaatcttccccaatacagaaatcatggtgcaatgagctaagtggccagtgttagctttcaaattattcgggcctctagactaatattggcctgcaggcaaataggtaaaatgaaactgtgcgtcaaagtttgtggctgtgaagtttaccaccattggctgaacgatcagtgtaatgatggaaagttcaaagaagaatggtaaaaacatttgtctcatggcaacacttcttgtttatcatggcttgtttctcataggtaaagtgcccacctcttgaaatatcatgaacttcttcatatttgcatagaaagtgaactggagtgatgattcattaaaccgtattctactgtcatattaaattgtgtgcgtttgttggctcatggccagtgtatttgcaaacgtgtgcatagaaacatagtaaatattaagtaagatcacatgatgtttcattcttggacacgttgcttctgaaaacgtagactggtttggccttttacccttttaaccgggaagctttgggtcttgtttaattgggatgaaacagaaatggctatttttaaaaagctagcaaaggactctgtggtgagctgttttataacaaagagatttttctccctccagacgtgccgggcctgcagtgcgtgaagtacattcagggactccagtggggaactcagcaaatactcagtgaacacaccaggatgacgcaccaagggccccatgacagattcatcgaacttaatagtacccttttcctgctgagattcatcaatgccaatgtcattgctgaactgttcttcaggcccatcatcggcacagtcagcatggatgatatgatgctggaaatgctctgtacaaagatataaagtcatgtgggccacacaagtgcagtagtgcagttcaccatgagggaagaataaagagctgtgggcaaaagagtgtaaaatattttaaaataaactttcttaatattttta

SEQ ID NO: 51794 - DNA, 1797 bp, Homo sapiens
  misc_feature (1668)..(1668): n is a, c, g, or t
  misc_feature (1703)..(1703): n is a, c, g, or t
  misc_feature (1705)..(1705): n is a, c, g, or t
tcttatttatgagatttgatattcgcccataataggagtgcctctcgcttattaccattattatttttttaaagaacactggttctgctgctctgtgatgattggcatggtgcttttaaaatacttttctgttgaattttttaggaaaagggaaggaaaatgattgcaatcatcattaacatcatttaaaccaagtggtcaactgctaattacttgaatacaagttaaagaactttgcaacgatattatcatcatggaagatcaaaggaccttcaaaagcagcctcctcttattactttccttataaaaacttacatccacttaaactttcctgcatttatttctttcacttttacttcggtatcacactatactgcaaaaggtcatgtgttttctattacaaaagttattcttgaatcatggtacaattcgtgatgttttcatgtttactttttaaacttttaatgactataagaattttcaaaaacttcttactttaatatttttgaaaagagcctttttgaacactcattaggaatcattcttttatttttttcaaaatcttccccaatacagaaatcatggtgcaatgagctaagtggccagtgttagctttcaaattattcgggcctctagactaatattggcctgcaggcaaataggtaaaatgaaactgtgcgtcaaagtttgtggctgtgaagtttaccaccattggctgaacgatcagtgtaatgatggaaagttcaaagaagaatggtaaaaacatttgtctcatggcaacacttcttgtttatcatggcttgtttctcataggtaaagtgcccacctcttgaaatatcatgaacttcttcatatttgcatagaaagtgaactggagtgatgattcattaaaccgtattctactgtcatattaaattgtgtgcgtttgttggctcatggccagtgtatttgcaaacgtgtgcatagaaacatagtaaatattaagtaagatcacatgatgtttcattcttggacacgttgcttctgaaaacgtagactggtttggccttttacccttttaaccgggaagctttgggtcttgtttaattgggatgaaacagaaatggctatttttaaaaagctagcaaaggactctgtggtgagctgttttataacaaagagatttttctccctccagacgtgccgggcctgcagtgcgtgaagtacattcagggactccagtggggaactcagcaaatactcagtgaacacaccaggatgacgcaccaagggccccatgacagattcatcgaacttaatagtacccttttcctgctgagattcatcaatgccaatgtcattgctgaactgttcttcaggcccatcatcggcacagtcagcatggatgatatgatgctggaaatgctctgtacaaagatataaagtcatgtgggccacacaagtgcagtagtgcagttcaccatgagggaagaataaagagctgtgggcaaaagagtgtaaaatattttaaaataaactttcttaatatttttacatgcagagtatttttgtattcaattaaagaaataattttattcccagcacagtcacaaatttctctgttccatagttaaagaagacatttgccaacaggtagcatagctctgtacatcttttaaaaaaaaaatngcagggtactagtataataagctattttcacaagngnagcaatttcatggaacctgctcaaatcaaatttgtacatattgttataataaattttaaggtcttaactattaacttgattgaaaaaagctt

SEQ ID NO: 51795 - DNA, 548 bp, Homo sapiens
atgtgtacctcagtagtttcttctcttggtggcaacttggaatgggtgggatactccccgccccaattccctcccctgcccctgccccgggaggtatctttggccatcaccgaggacacaggaaggcactctgggagatgcctgtctcatgatgggcttccttattaactgtgcctgtgtctccttcgcgaggctcataccttctttggttttcatgagaaaccaaaaatattgcattcactgttttttttctcaatcggagtgtgatcaactgcttacgggctctcaggctgactccctgagcatgggcatggcagcacctggcagcatccctgtggtacgagcccagcctgtggtgctggggatgaaggagaaactgagaactctgtgttgtctttctcagacaagccttcatgtattgtattttctttaaagcctgttctttagggtccaggtcaaaatatgtaccaatttcctggcaataggtccctctttaaaacagtgaattttttttggtattttattgtgaaaaatttcaaacgtacaaa

SEQ ID NO: 51796 - DNA, 494 bp, Homo sapiens
atgtgtacctcagtagtttcttctcttggtggcaacttggaatgggtgggatactccccgccccaattccctcccctgcccctgccccgggaggtatctttggccatcaccgaggacacaggaaggcactctgggagatgcctgtctcatgatgggcttccttattaactgtgcctgtgtctccttcgcgaggctcataccttctttggttttcatgagaaaccagggctctcaggctgactccctgagcatgggcatggcagcacctggcagcatccctgtggtacgagcccagcctgtggtgctggggatgaaggagaaactgagaactctgtgttgtctttctcagacaagccttcatgtattgtattttctttaaagcctgttctttagggtccaggtcaaaatatgtaccaatttcctggcaataggtccctctttaaaacagtgaattttttttggtattttattgtgaaaaatttcaaacgtacaaa

SEQ ID NO: 51797 - DNA, 393 bp, Homo sapiens
ctggattccccctgccaaggcgaatggagctatttagagacctgctcaggaaaaaacagtcctgcagccaggaggagagggtccccaagggcagacagacagggctggacggcagctggaggggccattgaaggtcacaggaaggtcatgggggtgctgaaggacaggaagatgagaggacaaaataggtgagtggggctaggaaggtggtgaggcttaaactggccttaaagccgtgggccgaatctggctggttgtctgctttcgcatagcctgtgagctaagaatggttttaacatttttaaatagttgaaaaaaaattaaaatttggtaacgtgaaaattgtatgaaattcaggtttcaatgtgtgtaaataaagttttattggaacac

SEQ ID NO: 51798 - DNA, 112 bp, Homo sapiens
gatcactggctgctggggtgagatggaagcagggaagatggataagagactcccacaataatccaggcaagagatgaaggagtcttggtccaggatggtaacagtggagggg

SEQ ID NO: 51799 - DNA, 1038 bp, Homo sapiens
ctttcttcctctgcctttgtgtttggtaagatccttcctccccacatccctccttctgttccctcttaccctgccaatcctgatagtcccttcagggccggtttccttggagcttgtccctccagggcctgtgcacttgcacctcttctctggcattacttgttgcttgtcatttcacctccctgctaggttttaatctagaaggcatgggccacagtgtctttcttctctgtgcatccccagctccctacacaaagctggtgtacagcaggggccagccatctccaaattgaattctgtcagcttgggccattatgtatcaagatggggcttggagaggtcacagagctttccaaaaaggctggtggaaaattacactgaaaagggggcatttccatcttctgggtccttccctggtttttttgccaccaccaaagagattgttctgacaggttctgcccaattttggaaggtggttcagttattcggtgactgagtcaaatgagatcatctctcttagctgccttgtcagacacacaggaagaagaggagaccaccggagtcctgcccagggacagcctttctcacaccatagcagggagctggtgatcacggaggctgcctggagcctgtcagcaggctagagactgtgtggctcagcctccaggccccttggaagccttcgggctcagcttttttcagtccccaggaccaggcctcagaacacagagctgatatcccaaatgctgttgtcagagatcaaatttggggaatgcataaactggttttgacccacactggcaggtctttatcttcaaaatgctgggatattaggcagatggtcttaaaaagcttcttaaacactttagaaatgaaagaaagaaaatgttcagttgctctgggatggttaacagaaaagtactctgctcatcctataaaccaagtcttatgaaatccaaactgaagatgagtagggattccattacaaagtctgcagactgatttcctctgcgtctctaggccctgggcacatggagt

SEQ ID NO: 51800 - DNA, 1574 bp, Homo sapiens
gcttctctccatcttgtgattcctttttcctcctgaaccctccagtgggggtgcgagtttgtctttatcaccccccatcccaccgccttcttttcttctcgctctcctacccctccccagcttggtgggcgcctctttcctttctcgccccctttcatttttatttattcatatttatttggcgcccgctctctctctgtccctttgcctgcctccctccctccggatccccgctctctccccggagtggcgcgtcgggggctccgccgctggccaggcgtgatgttgcacgtggagatgttgacgctggtgtttctggtgctctggatgtgtgtgttcagccaggacccgggctccaaggccgtcgccgaccgctacgctgtctactggaacagcagcaaccccagattccagaggggtgactaccatattgatgtctgtatcaatgactacctggatgttttctgccctcactatgaggactccgtcccagaagataagactgagcgctatgtcctctacatggtgaactttgatggctacagtgcctgcgaccacacttccaaagggttcaagagatgggaatgtaaccggcctcactctccaaatggaccgctgaagttctctgaaaaattccagctcttcactcccttttctctaggatttgaattcaggccaggccgagaatatttctacatctcctctgcaatcccagataatggaagaaggtcctgtctaaagctcaaagtctttgtgagaccaacaaatagctgtatgaaaactataggtgttcatgatcgtgttttcgatgttaacgacaaagtagaaaattcattagaaccagcagatgacaccgtacatgagtcagccgagccatcccgcggcgagaacgcggcacaaacaccaaggatacccagccgccttttggcaatcctactgttcctcctggcgatgcttttgacattatagcacagtctcctcccatcacttgtcacagaaaacatcagggtcttggaacaccagagatccacctaactgctcatcctaagaagggacttgttattgggttttggcagatgtcagatttttgttttctttctttcagcctgaattctaagcaacaacttcaggttgggggcctaaacttgttcctgcctccctcaccccaccccgccccacccccagccctggcccttggcttctctcacccctcccaaattaaatggactccagatgaaaatgccaaattgtcatagtgacaccagtggttcgtcagctcctgtgcattctcctctaagaactcacctccgttagcgcactgtgtcagcgggctatggacaaggaagaatagtggcagatgcagccagcgctggctagggctgggagggttttgctctcctatgcaatatttatgccttctcattcagaactgtaagatgatcgcgcagggcatcatgtcaccatgtcaggtccggaggggaggtattaagaatagatacgatattacaccatttcctataggagtatgtaaatgaacaggcttctaaaaggttgagacactggttttttttttt

SEQ ID NO: 51801 - DNA, 1223 bp, Homo sapiens
gagaagggagtagacaactgttcctgagggaaatctgggaagggttcatggagctgattccagaggggtgactaccatattgatgtctgtatcaatgactacctggatgttttctgccctcactatgaggactccgtcccagaagataagactgagcgctatgtcctctacatggtgaactttgatggctacagtgcctgcgaccacacttccaaagggttcaagagatgggaatgtaaccggcctcactctccaaatggaccgctgaagttctctgaaaaattccagctcttcactcccttttctctaggatttgaattcaggccaggccgagaatatttctacatctcctctgcaatcccagataatggaagaaggtcctgtctaaagctcaaagtctttgtgagaccaacaaatagctgtatgaaaactataggtgttcatgatcgtgttttcgatgttaacgacaaagtagaaaattcattagaaccagcagatgacaccgtacatgagtcagccgagccatcccgcggcgagaacgcggcacaaacaccaaggatacccagccgccttttggcaatcctactgttcctcctggcgatgcttttgacattatagcacagtctcctcccatcacttgtcacagaaaacatcagggtcttggaacaccagagatccacctaactgctcatcctaagaagggacttgttattgggttttggcagatgtcagatttttgttttctttctttcagcctgaattctaagcaacaacttcaggttgggggcctaaacttgttcctgcctccctcaccccaccccgccccacccccagccctggcccttggcttctctcacccctcccaaattaaatggactccagatgaaaatgccaaattgtcatagtgacaccagtggttcgtcagctcctgtgcattctcctctaagaactcacctccgttagcgcactgtgtcagcgggctatggacaaggaagaatagtggcagatgcagccagcgctggctagggctgggagggttttgctctcctatgcaatatttatgccttctcattcagaactgtaagatgatcgcgcagggcatcatgtcaccatgtcaggtccggaggggaggtattaagaatagatacgatattacaccatttcctataggagtatgtaaatgaacaggcttctaaaaggttgagacactggttttttttttt

SEQ ID NO: 51802 - DNA, 1255 bp, Homo sapiens
gcttctctccatcttgtgattcctttttcctcctgaaccctccagtgggggtgcgagtttgtctttatcaccccccatcccaccgccttcttttcttctcgctctcctacccctccccagcttggtgggcgcctctttcctttctcgccccctttcatttttatttattcatatttatttggcgcccgctctctctctgtccctttgcctgcctccctccctccggatccccgctctctccccggagtggcgcgtcgggggctccgccgctggccaggcgtgatgttgcacgtggagatgttgacgctggtgtttctggtgctctggatgtgtgtgttcagccaggacccgggctccaaggccgtcgccgaccgctacgctgtctactggaacagcagcaaccccagattccagaggggtgactaccatattgatgtctgtatcaatgactacctggatgttttctgccctcactatgaggactccgtcccagaagataagactgagcgctatgtcctctacatggtgaactttgatggctacagtgcctgcgaccacacttccaaagggttcaagagatgggaatgtaaccggcctcactctccaaatggaccgctgaagttctctgaaaaattccagctcttcactcccttttctctaggatttgaattcaggccaggccgagaatatttctacatctcctctgcaatcccagataatggaagaaggtcctgtctaaagctcaaagtctttgtgagaccaacaaatagctgtatgaaaactataggtgttcatgatcgtgttttcgatgttaacgacaaagtagaaaattcattagaaccagcagatgacaccgtacatgagtcagccgagccatcccgcggcgagaacgcggcacaaacaccaaggatacccagccgccttttggcaatcctactgttcctcctggcgatgcttttgacattatagcacagtctcctcccatcacttgtcacagaaaacatcagggtcttggaacaccagagatccacctaactgctcatcctaagaagggacttgttattgggttttggcagatgtcagatttttgttttctttctttcagcctgaattctaagcaacaacttcaggttgggggcctaaacttgttcctgcctccctcaccccaccccgccccacccccagcaaacctgtagttttctctgttttcacacctgctctgtattagcattccacacccaacctgcctcctaga

SEQ ID NO: 51803 - DNA, 951 bp, Homo sapiens
  misc_feature (896)..(896): n is a, c, g, or t
ccgcaggcggcgataggatccggactacagctcccagcgcgccccagttcccgcccccgcctccggagcccgacgctgcagcggctcttctcgaaaggttctttccgcctgtgcagctcgccggctcaatactccgggggtctgggtggggggctcaaacgcagggctctgggacgcaggcactgctccaggtgatagtgcgggaacatggccttgcagctgggcaggctgagctcgggcccctgctggctcgtggcgcggggcggctgcggagggccccgcgcctggtcccagtgcggcggcggagggctccgagcctggtcccagcgcagcgcagccggacgcgtctgccggccccctggcccggctggcacggagcagagccgcgggctggggcacggctcgacgtcgagaggcggcccctgggtggggacagggctggccgcggcgctggcggggttggtggggctggccaccgccgccttcgggcatgtgcagcgggcggagatgttgcctaagacctcggggacgcgggccacttcgctggggaggccggaggaggaggaggatgagctggcccaccgctgcagcagcttcatggccccgcctgtgaccgacctgggcgagctgcgaaggaggccgggcgacatgaagaccaagatggagctgctgattctggagacccaggcccaggtgtgccaggctctggcacagaggaagctgcaaaacaaatgagaagcagaggaaaagttctgaagactaaagatgatactttgaagtagaagaagctgatgccattcagcttggttcaaccttttatgtttaaagttggtaactggtattgacaactcatggacctgtgagcacatgaaacagttattctcaagtggcacaanagtggtggtttgtggtgatgtactcccccacatactgatcagagaggtgtcattt

SEQ ID NO: 51804 - DNA, 2811 bp, Homo sapiens
ccgcaggcggcgataggatccggactacagctcccagcgcgccccagttcccgcccccgcctccggagcccgacgctgcagcggctcttctcgaaaggttctttccgcctgtgcagctcgccggctcaatactccgggggtctgggtggggggctcaaacgcagggctctgggacgcaggcactgctccaggtgatagtgcgggaacatggccttgcagctgggcaggctgagctcgggcccctgctggctcgtggcgcggggcggctgcggagggccccgcgcctggtcccagtgcggcggcggagggctccgagcctggtcccagcgcagcgcagccggacgcgtctgccggccccctggcccggctggcacggagcagagccgcgggctggggcacggctcgacgtcgagaggcggcccctgggtggggacagggctggccgcggcgctggcggggttggtggggctggccaccgccgccttcgggcatgtgcagcgggcggagatgttgcctaagacctcggggacgcgggccacttcgctggggaggccggaggaggaggaggatgagctggcccaccgctgcagcagcttcatggccccgcctgtgaccgacctgggcgagctgcgaaggaggccgggcgacatgaagaccaagatggagctgctgattctggagacccaggcccaggtgtgccaggctctggcacaggtagacgggggcgccaacttttctgtggaccggtgggagaggaaggaaggaggtggcggcatcagctgtgtacttcaagatgggtgtgttttcgaaaaggctggggtgagcatttctgttgttcatggaaatctttcagaggaagctgcaaaacaaatgagaagcagaggaaaagttctgaagactaaagatggtaaattgccattttgtgctatgggcgtgagctctgttatccaccccaagaatcctcatgctcctactatccatttcaactacagatactttgaagtagaagaagctgatggcaacaagcagtggtggtttggtggtggatgtgacctcactccaacatacttgaatcaagaagacgctgtccattttcacagaactctgaaggaggcttgtgaccagcatggtccagatctctaccccaaatttaaaaaatggtgtgatgattacttctttatagcccatcgtggagagcggcggggcattggtggtatcttttttgatgatcttgactctccgtccaaggaggaggtgtttcgctttgtacagagctgtgccagggctgtagttccttcttacattccccttgtgaaaaagcactgtgatgactcattcaccccccaggagaagctgtggcagcagctcagaagaggacggtatgtagaatttaatctgctgtatgatcggggcacaaagtttggcctcttcactccaggatccagaattgaaagtatcttgatgtctttacctctaactgcccgatgggagtacatgcattcaccctcagagaattccaaagaagctgaaattctggaagttctacgccatccaagggactgggtgcgttgatgcaggcagaatggctgtgcaggggtttggagggcacacgatgtgtgctccccatgccactggtcggcactttgccactgtgtggcagttacccgtgccttagtcttctccactctgcaccctacctcgtgggcagatgataacatgttttggatgctgtcagtgatgaatggtgagatggcagattgtcagagtcaattgattaaacctcatttatacttctagtgtcattttatatgactagtttacaaaataggacattgagtttccaagtattgagataagggaatataaatagtattatatgtatcaggaaatctctcatcttgtttttgtttcatgtattttttaaagttttcatttgtgccacaaaaatctgtcgtggaatatattttattttcattaattcagtgaagttgagacttcatagtaattttagaatgcaacttgaaggtaaaaattttactttgtcaatactgaagtctctgctgtaatccttatatatctttctccagagaacataatattgtcaaatagatacacatttttctaataggtatttagaagcacttgaaatattcttaatctctgcatgtgttacaattcagttatttctgtagtttgtaaactctaaagtgacattactattattttagagatgtctaagttgtaattttgatttttgtggaaccattgtttgttaatgttgggattctctgcacttttgaatgtgaaagcttatatccctgaattctgatacttaagagttttctatttcagacatctctgtgtggaagttgagactaagaataatcctagggatgtcatgaatttaggcaatgtttctcatttggaaaatgaaatgagaaataatttccttctttaaagcaagtatatatagtatgagaaacttggaggcatttcatacacacgtttcttaggaaaatggacacattgaaaatgtcctcttttttatattagagattctgcagctctttgctcttaagagcaaatcacaacaggattcttaatgtatgatttctttgttcatatattatgaatgtattattttatttgcttcgtaataaagtttataaggaagagcatctcatacatatcattatcgtggaacacgttgaatgtttgtgattctgtgtggcctttttggggctggaaaatgtatgaattcttcaactgtcttacaagagatctgctaataaattttattattaaataaga

SEQ ID NO: 51805 - DNA, 2757 bp, Homo sapiens
ccgcaggcggcgataggatccggactacagctcccagcgcgccccagttcccgcccccgcctccggagcccgacgctgcagcggctcttctcgaaaggttctttccgcctgtgcagctcgccggctcaatactccgggggtctgggtggggggctcaaacgcagggctctgggacgcaggcactgctccaggtgatagtgcgggaacatggccttgcagctgggcaggctgagctcgggcccctgctggctcgtggcgcggggcggctgcggagggccccgcgcctggtcccagtgcggcggcggagggctccgagcctggtcccagcgcagcgcagccggacgcgtctgccggccccctggcccggctggcacggagcagagccgcgggctggggcacggctcgacgtcgagaggcggcccctgggtggggacagggctggccgcggcgctggcggggttggtggggctggccaccgccgccttcgggcatgtgcagcgggcggagatgttgcctaagacctcggggacgcgggccacttcgctggggaggccggaggaggaggaggatgagctggcccaccgctgcagcagcttcatggccccgcctgtgaccgacctgggcgagctgcgaaggaggccgggcgacatgaagaccaagatggagctgctgattctggagacccaggcccaggtgtgccaggctctggcacaggtagacgggggcgccaacttttctgtggaccggtgggagaggaaggaaggaggtggcggcatcagctgtgtacttcaagatgggtgtgttttcgaaaaggctggggtgagcatttctgttgttcatggaaatctttcagaggaagctgcaaaacaaatgagaagcagaggctctgttatccaccccaagaatcctcatgctcctactatccatttcaactacagatactttgaagtagaagaagctgatggcaacaagcagtggtggtttggtggtggatgtgacctcactccaacatacttgaatcaagaagacgctgtccattttcacagaactctgaaggaggcttgtgaccagcatggtccagatctctaccccaaatttaaaaaatggtgtgatgattacttctttatagcccatcgtggagagcggcggggcattggtggtatcttttttgatgatcttgactctccgtccaaggaggaggtgtttcgctttgtacagagctgtgccagggctgtagttccttcttacattccccttgtgaaaaagcactgtgatgactcattcaccccccaggagaagctgtggcagcagctcagaagaggacggtatgtagaatttaatctgctgtatgatcggggcacaaagtttggcctcttcactccaggatccagaattgaaagtatcttgatgtctttacctctaactgcccgatgggagtacatgcattcaccctcagagaattccaaagaagctgaaattctggaagttctacgccatccaagggactgggtgcgttgatgcaggcagaatggctgtgcaggggtttggagggcacacgatgtgtgctccccatgccactggtcggcactttgccactgtgtggcagttacccgtgccttagtcttctccactctgcaccctacctcgtgggcagatgataacatgttttggatgctgtcagtgatgaatggtgagatggcagattgtcagagtcaattgattaaacctcatttatacttctagtgtcattttatatgactagtttacaaaataggacattgagtttccaagtattgagataagggaatataaatagtattatatgtatcaggaaatctctcatcttgtttttgtttcatgtattttttaaagttttcatttgtgccacaaaaatctgtcgtggaatatattttattttcattaattcagtgaagttgagacttcatagtaattttagaatgcaacttgaaggtaaaaattttactttgtcaatactgaagtctctgctgtaatccttatatatctttctccagagaacataatattgtcaaatagatacacatttttctaataggtatttagaagcacttgaaatattcttaatctctgcatgtgttacaattcagttatttctgtagtttgtaaactctaaagtgacattactattattttagagatgtctaagttgtaattttgatttttgtggaaccattgtttgttaatgttgggattctctgcacttttgaatgtgaaagcttatatccctgaattctgatacttaagagttttctatttcagacatctctgtgtggaagttgagactaagaataatcctagggatgtcatgaatttaggcaatgtttctcatttggaaaatgaaatgagaaataatttccttctttaaagcaagtatatatagtatgagaaacttggaggcatttcatacacacgtttcttaggaaaatggacacattgaaaatgtcctcttttttatattagagattctgcagctctttgctcttaagagcaaatcacaacaggattcttaatgtatgatttctttgttcatatattatgaatgtattattttatttgcttcgtaataaagtttataaggaagagcatctcatacatatcattatcgtggaacacgttgaatgtttgtgattctgtgtggcctttttggggctggaaaatgtatgaattcttcaactgtcttacaagagatctgctaataaattttattattaaataaga

SEQ ID NO: 51806 - DNA, 2825 bp, Homo sapiens
ccgcaggcggcgataggatccggactacagctcccagcgcgccccagttcccgcccccgcctccggagcccgacgctgcagcggctcttctcgaaaggttctttccgcctgtgcagctcgccggctcaatactccgggggtctgggtggggggctcaaacgcagggctctgggacgcaggcactgctccaggtgatagtgcgggaacatggccttgcagctgggcaggctgagctcgggcccctgctggctcgtggcgcggggcggctgcggagggccccgcgcctggtcccagtgcggcggcggagggctccgagcctggtcccagcgcagcgcagccggacgcgtctgccggccccctggcccggctggcacggagcagagccgcgggctggggcacggctcgacgtcgagaggcggcccctgggtggggacagggctggccgcggcgctggcggggttggtggggctggccaccgccgccttcgggcatgtgcagcgggcggagatgttgcctaagacctcggggacgcgggccacttcgctggggaggccggaggaggaggaggatgagctggcccaccgctgcagcagcttcatggccccgcctgtgaccgacctgggcgagctgcgaaggaggccgggcgacatgaagaccaagatggagctgctgattctggagacccaggcccaggtgtgccaggctctggcacaggtagacgggggcgccaacttttctgtggaccggtgggagaggaaggaaggaggtggcggcatcagctgtgtacttcaagatgggtgtgttttcgaaaagtgctgggattacaggcatgagccacctcgcctggccgcttttacctctttttttctgcctaggccttactggtcttcagagctaaaatcagttaaaattttttttattgtcatccattttatgctgaaaaaattaagctgctaaattaagtgtcctaatatagccagtaatgctgaatctcaaaagtccacattagaatcccatgtcttgatttggtaggcaacaagcagtggtggtttggtggtggatgtgacctcactccaacatacttgaatcaagaagacgctgtccattttcacagaactctgaaggaggcttgtgaccagcatggtccagatctctaccccaaatttaaaaaatggtgtgatgattacttctttatagcccatcgtggagagcggcggggcattggtggtatcttttttgatgatcttgactctccgtccaaggaggaggtgtttcgctttgtacagagctgtgccagggctgtagttccttcttacattccccttgtgaaaaagcactgtgatgactcattcaccccccaggagaagctgtggcagcagctcagaagaggacggtatgtagaatttaatctgctgtatgatcggggcacaaagtttggcctcttcactccaggatccagaattgaaagtatcttgatgtctttacctctaactgcccgatgggagtacatgcattcaccctcagagaattccaaagaagctgaaattctggaagttctacgccatccaagggactgggtgcgttgatgcaggcagaatggctgtgcaggggtttggagggcacacgatgtgtgctccccatgccactggtcggcactttgccactgtgtggcagttacccgtgccttagtcttctccactctgcaccctacctcgtgggcagatgataacatgttttggatgctgtcagtgatgaatggtgagatggcagattgtcagagtcaattgattaaacctcatttatacttctagtgtcattttatatgactagtttacaaaataggacattgagtttccaagtattgagataagggaatataaatagtattatatgtatcaggaaatctctcatcttgtttttgtttcatgtattttttaaagttttcatttgtgccacaaaaatctgtcgtggaatatattttattttcattaattcagtgaagttgagacttcatagtaattttagaatgcaacttgaaggtaaaaattttactttgtcaatactgaagtctctgctgtaatccttatatatctttctccagagaacataatattgtcaaatagatacacatttttctaataggtatttagaagcacttgaaatattcttaatctctgcatgtgttacaattcagttatttctgtagtttgtaaactctaaagtgacattactattattttagagatgtctaagttgtaattttgatttttgtggaaccattgtttgttaatgttgggattctctgcacttttgaatgtgaaagcttatatccctgaattctgatacttaagagttttctatttcagacatctctgtgtggaagttgagactaagaataatcctagggatgtcatgaatttaggcaatgtttctcatttggaaaatgaaatgagaaataatttccttctttaaagcaagtatatatagtatgagaaacttggaggcatttcatacacacgtttcttaggaaaatggacacattgaaaatgtcctcttttttatattagagattctgcagctctttgctcttaagagcaaatcacaacaggattcttaatgtatgatttctttgttcatatattatgaatgtattattttatttgcttcgtaataaagtttataaggaagagcatctcatacatatcattatcgtggaacacgttgaatgtttgtgattctgtgtggcctttttggggctggaaaatgtatgaattcttcaactgtcttacaagagatctgctaataaattttattattaaataaga

SEQ ID NO: 51807 - DNA, 1854 bp, Homo sapiens
aggataagcattttctaccttggtgatatctgcaaaaaatctatctgtctaaagtcctcatttcattttcatagttggacagcaagtaaggacaccatcctgacattagttgaggatagtgctgtaacctgaaaggctcacattgattttcatgtctgtttttttccatttgatccctggtttggcgccgctgtgttttccaggtgtgatgattacttctttatagcccatcgtggagagcggcggggcattggtggtatcttttttgatgatcttgactctccgtccaaggaggaggtgtttcgctttgtacagagctgtgccagggctgtagttccttcttacattccccttgtgaaaaagcactgtgatgactcattcaccccccaggagaagctgtggcagcagctcagaagaggacggtatgtagaatttaatctgctgtatgatcggggcacaaagtttggcctcttcactccaggatccagaattgaaagtatcttgatgtctttacctctaactgcccgatgggagtacatgcattcaccctcagagaattccaaagaagctgaaattctggaagttctacgccatccaagggactgggtgcgttgatgcaggcagaatggctgtgcaggggtttggagggcacacgatgtgtgctccccatgccactggtcggcactttgccactgtgtggcagttacccgtgccttagtcttctccactctgcaccctacctcgtgggcagatgataacatgttttggatgctgtcagtgatgaatggtgagatggcagattgtcagagtcaattgattaaacctcatttatacttctagtgtcattttatatgactagtttacaaaataggacattgagtttccaagtattgagataagggaatataaatagtattatatgtatcaggaaatctctcatcttgtttttgtttcatgtattttttaaagttttcatttgtgccacaaaaatctgtcgtggaatatattttattttcattaattcagtgaagttgagacttcatagtaattttagaatgcaacttgaaggtaaaaattttactttgtcaatactgaagtctctgctgtaatccttatatatctttctccagagaacataatattgtcaaatagatacacatttttctaataggtatttagaagcacttgaaatattcttaatctctgcatgtgttacaattcagttatttctgtagtttgtaaactctaaagtgacattactattattttagagatgtctaagttgtaattttgatttttgtggaaccattgtttgttaatgttgggattctctgcacttttgaatgtgaaagcttatatccctgaattctgatacttaagagttttctatttcagacatctctgtgtggaagttgagactaagaataatcctagggatgtcatgaatttaggcaatgtttctcatttggaaaatgaaatgagaaataatttccttctttaaagcaagtatatatagtatgagaaacttggaggcatttcatacacacgtttcttaggaaaatggacacattgaaaatgtcctcttttttatattagagattctgcagctctttgctcttaagagcaaatcacaacaggattcttaatgtatgatttctttgttcatatattatgaatgtattattttatttgcttcgtaataaagtttataaggaagagcatctcatacatatcattatcgtggaacacgttgaatgtttgtgattctgtgtggcctttttggggctggaaaatgtatgaattcttcaactgtcttacaagagatctgctaataaattttattattaaataaga

SEQ ID NO: 51808 - DNA, 2770 bp, Homo sapiens
ccgcaggcggcgataggatccggactacagctcccagcgcgccccagttcccgcccccgcctccggagcccgacgctgcagcggctcttctcgaaaggttctttccgcctgtgcagctcgccggctcaatactccgggggtctgggtggggggctcaaacgcagggctctgggacgcaggcactgctccaggtgatagtgcgggaacatggccttgcagctgggcaggctgagctcgggcccctgctggctcgtggcgcggggcggctgcggagggccccgcgcctggtcccagtgcggcggcggagggctccgagcctggtcccagcgcagcgcagccggacgcgtctgccggccccctggcccggctggcacggagcagagccgcgggctggggcacggctcgacgtcgagaggcggcccctgggtggggacagggctggccgcggcgctggcggggttggtggggctggccaccgccgccttcgggcatgtgcagcgggcggagatgttgcctaagacctcggggacgcgggccacttcgctggggaggccggaggaggaggaggatgagctggcccaccgctgcagcagcttcatggccccgcctgtgaccgacctgggcgagctgcgaaggaggccgggcgacatgaagaccaagatggagctgctgattctggagacccaggcccaggtgtgccaggctctggcacaggtagacgggggcgccaacttttctgtggaccggtgggagaggaaggaaggaggtggcggcatcagctgtgtacttcaagatgggtgtgttttcgaaaagtgctgggattacaggcatgagccacctcgcctggccgcttttacctctttttttctgcctaggccttactggtcttcagagctaaaatcagttaaaattttttttattgtcatccattttatgctgaaaaaattaagctgctaaattaagtgtcctaatatagccagtaatgctgaatctcaaaagtccacattagaatcccatgtcttgatttggtaggcaacaagcagtggtggtttggtggtggatgtgacctcactccaacatacttgaatcaagaagacgctgtccattttcacagaactctgaaggaggcttgtgaccagcatggtccagatctctaccccaaatttaaaaaatggtgtgatgattacttctttatagcccatcgtggagagcggcggggcattggtggtatcttttttgatgatcttgactctccgtccaaggaggaggtgtttcgctttgtacagagctgtgccagggctgtagttccttcttacattccccttgtgaaaaagcactgtatgtagaatttaatctgctgtatgatcggggcacaaagtttggcctcttcactccaggatccagaattgaaagtatcttgatgtctttacctctaactgcccgatgggagtacatgcattcaccctcagagaattccaaagaagctgaaattctggaagttctacgccatccaagggactgggtgcgttgatgcaggcagaatggctgtgcaggggtttggagggcacacgatgtgtgctccccatgccactggtcggcactttgccactgtgtggcagttacccgtgccttagtcttctccactctgcaccctacctcgtgggcagatgataacatgttttggatgctgtcagtgatgaatggtgagatggcagattgtcagagtcaattgattaaacctcatttatacttctagtgtcattttatatgactagtttacaaaataggacattgagtttccaagtattgagataagggaatataaatagtattatatgtatcaggaaatctctcatcttgtttttgtttcatgtattttttaaagttttcatttgtgccacaaaaatctgtcgtggaatatattttattttcattaattcagtgaagttgagacttcatagtaattttagaatgcaacttgaaggtaaaaattttactttgtcaatactgaagtctctgctgtaatccttatatatctttctccagagaacataatattgtcaaatagatacacatttttctaataggtatttagaagcacttgaaatattcttaatctctgcatgtgttacaattcagttatttctgtagtttgtaaactctaaagtgacattactattattttagagatgtctaagttgtaattttgatttttgtggaaccattgtttgttaatgttgggattctctgcacttttgaatgtgaaagcttatatccctgaattctgatacttaagagttttctatttcagacatctctgtgtggaagttgagactaagaataatcctagggatgtcatgaatttaggcaatgtttctcatttggaaaatgaaatgagaaataatttccttctttaaagcaagtatatatagtatgagaaacttggaggcatttcatacacacgtttcttaggaaaatggacacattgaaaatgtcctcttttttatattagagattctgcagctctttgctcttaagagcaaatcacaacaggattcttaatgtatgatttctttgttcatatattatgaatgtattattttatttgcttcgtaataaagtttataaggaagagcatctcatacatatcattatcgtggaacacgttgaatgtttgtgattctgtgtggcctttttggggctggaaaatgtatgaattcttcaactgtcttacaagagatctgctaataaattttattattaaataaga

SEQ ID NO: 51809 - DNA, 124 bp, Homo sapiens
tattcttaggattttatttttcatttattttaagtaaagaggtatgtgtgtcattttttatgacgttttttgcttttgttttggacatgcatagatgggagtacatgcattcaccctcagagaa

SEQ ID NO: 51810 - DNA, 3176 bp, Homo sapiens
ccgcaggcggcgataggatccggactacagctcccagcgcgccccagttcccgcccccgcctccggagcccgacgctgcagcggctcttctcgaaaggttctttccgcctgtgcagctcgccggctcaatactccgggggtctgggtggggggctcaaacgcagggctctgggacgcaggcactgctccaggtgatagtgcgggaacatggccttgcagctgggcaggctgagctcgggcccctgctggctcgtggcgcggggcggctgcggagggccccgcgcctggtcccagtgcggcggcggagggctccgagcctggtcccagcgcagcgcagccggacgcgtctgccggccccctggcccggctggcacggagcagagccgcgggctggggcacggctcgacgtcgagaggcggcccctgggtggggacagggctggccgcggcgctggcggggttggtggggctggccaccgccgccttcgggcatgtgcagcgggcggagatgttgcctaagacctcggggacgcgggccacttcgctggggaggccggaggaggaggaggatgagctggcccaccgctgcagcagcttcatggccccgcctgtgaccgacctgggcgagctgcgaaggaggccgggcgacatgaagaccaagatggagctgctgattctggagacccaggcccaggtgtgccaggctctggcacaggtagacgggggcgccaacttttctgtggaccggtgggagaggaaggaaggaggtggcggcatcagctgtgtacttcaagatgggtgtgttttcgaaaaggctggggtgagcatttctgttgttcatggaaatctttcagaggaagctgcaaaacaaatgagaagcagaggaaaagttctgaagactaaagatggtaaattgccattttgtgctatgggcgtgagctctgttatccaccccaagaatcctcatgctcctactatccatttcaactacagatactttgaagtagaagaagctgatggcaacaagcagtggtggtttggtggtggatgtgacctcactccaacatacttgaatcaagaagacgctgtccattttcacagaactctgaaggaggcttgtgaccagcatggtccagatctctaccccaaatttaaaaaatggtgtgatgattacttctttatagcccatcgtggagagcggcggggcattggtggtatcttttttgatgatcttgactctccgtccaaggaggaggtgtttcgctttgtacagagctgtgccagggctgtagttccttcttacattccccttgtgaaaaagcactgtgatgactcattcaccccccaggagaagctgtggcagcagctcagaagaggacggtatgtagaatttaatctgctgtatgatcggggcacaaagtttggcctcttcactccaggatccagaattgaaagtatcttgatgtctttacctctaactgcccgatgggagtacatgcattcaccctcagagaattccaaagaagctgaaattctggaagttctacgccatccaagggactgggtgcgttgatgcaggcagaatggctgtgcaggggtttggagggcacacgatgtgtgctccccatgccactggtcggcactttgccactgtgtggcagttacccgtgccttagtcttctccactctgcaccctacctcgtgggcagatgataacatgttttggatgctgtcagtgatgaatggtgagatggcagattgtcagagtcaattgattaaacctcatttatacttctagtgtcattttatatgactagtttacaaaataggacattgagtttccaagtattgagataagggaatataaatagtattatatgtatcaggaaatctctcatcttgtttttgtttcatgtattttttaaagttttcatttgtgccacaaaaatctgtcgtggaatatattttattttcattaattcagtgaagttgagacttcatagtaattttagaatgcaacttgaaggtaaaaattttactttgtcaatactgaagtctctgctgtaatccttatatatctttctccagagaacataatattgtcaaatagatacacatttttctaataggtatttagaagcacttgaaatattcttaatctctgcatgtgttacaattcagttatttctgtagtttgtaaactctaaagtgacattactattattttagagatgtctaagttgtaattttgatttttgtggaaccattgtttgttaatgttgggattctctgcacttttgaatgtgaaagcttatatccctgaattctgatacttaagagttttctatttcagacatctctgtgtggaagttgagactaagaataatcctagggatgtcatgaatttaggcaatgtttctcatttggaaaatgaaatgagaaataatttccttctttaaagcaagtatatatagtatgagaaacttggaggcatttcatacacacgtttcttaggaaaatggacacattgaaaatgtcctcttttttatattagagattctgcagctctttgctcttaagagcaaatcacaacaggattcttaatgtatgatttctttgttcatatattatgaatgtattattttatttgcttcgtaataaagtttataaggaagagcatctcatacatatcattatcgtggaacacgttgaatgtttgtgattctgtgtggcctttttggggctggaaaatgtatgaattcttcaactgtcttacaagagatctgctaataaattttattattaaataagaaaaaaaaaaaaaaaaaaaaacaaaataaaaaattaaaaaaaagaaaaaaaaaaaaaaaaaaggggggggggggaaaaaaaattccccgggggggccccgttttagctcccccgttttttggtaaagaggggcgcgcccaaaaagggagcgcataaaatacaaaaaacgaacgggggacgcgtcaacaaaccgcgcgcggcggaaacactggtctcgcggaaacttggggaagaacccatatctgggggcggagccaatgtgggcacatccccaaagatataaagcccagggaaaaaactgacgcgtctgcggaccaccgaattctcgggagattgcacgggtataaaagagcgagtaaattatgt

SEQ ID NO: 51811 - DNA, 2756 bp, Homo sapiens
ccgcaggcggcgataggatccggactacagctcccagcgcgccccagttcccgcccccgcctccggagcccgacgctgcagcggctcttctcgaaaggttctttccgcctgtgcagctcgccggctcaatactccgggggtctgggtggggggctcaaacgcagggctctgggacgcaggcactgctccaggtgatagtgcgggaacatggccttgcagctgggcaggctgagctcgggcccctgctggctcgtggcgcggggcggctgcggagggccccgcgcctggtcccagtgcggcggcggagggctccgagcctggtcccagcgcagcgcagccggacgcgtctgccggccccctggcccggctggcacggagcagagccgcgggctggggcacggctcgacgtcgagaggcggcccctgggtggggacagggctggccgcggcgctggcggggttggtggggctggccaccgccgccttcgggcatgtgcagcgggcggagatgttgcctaagacctcggggacgcgggccacttcgctggggaggccggaggaggaggaggatgagctggcccaccgctgcagcagcttcatggccccgcctgtgaccgacctgggcgagctgcgaaggaggccgggcgacatgaagaccaagatggagctgctgattctggagacccaggcccaggtgtgccaggctctggcacaggtagacgggggcgccaacttttctgtggaccggtgggagaggaaggaaggaggtggcggcatcagctgtgtacttcaagatgggtgtgttttcgaaaaggctggggtgagcatttctgttgttcatggaaatctttcagaggaagctgcaaaacaaatgagaagcagaggaaaagttctgaagactaaagatggtaaattgccattttgtgctatgggcgtgagctctgttatccaccccaagaatcctcatgctcctactatccatttcaactacagatactttgaagtagaagaagctgatggcaacaagcagtggtggtttggtggtggatgtgacctcactccaacatacttgaatcaagaagacgctgtccattttcacagaactctgaaggaggcttgtgaccagcatggtccagatctctaccccaaatttaaaaaatggtgtgatgattacttctttatagcccatcgtggagagcggcggggcattggtggtatcttttttgatgatcttgactctccgtccaaggaggaggtgtttcgctttgtacagagctgtgccagggctgtagttccttcttacattccccttgtgaaaaagcactgtatgtagaatttaatctgctgtatgatcggggcacaaagtttggcctcttcactccaggatccagaattgaaagtatcttgatgtctttacctctaactgcccgatgggagtacatgcattcaccctcagagaattccaaagaagctgaaattctggaagttctacgccatccaagggactgggtgcgttgatgcaggcagaatggctgtgcaggggtttggagggcacacgatgtgtgctccccatgccactggtcggcactttgccactgtgtggcagttacccgtgccttagtcttctccactctgcaccctacctcgtgggcagatgataacatgttttggatgctgtcagtgatgaatggtgagatggcagattgtcagagtcaattgattaaacctcatttatacttctagtgtcattttatatgactagtttacaaaataggacattgagtttccaagtattgagataagggaatataaatagtattatatgtatcaggaaatctctcatcttgtttttgtttcatgtattttttaaagttttcatttgtgccacaaaaatctgtcgtggaatatattttattttcattaattcagtgaagttgagacttcatagtaattttagaatgcaacttgaaggtaaaaattttactttgtcaatactgaagtctctgctgtaatccttatatatctttctccagagaacataatattgtcaaatagatacacatttttctaataggtatttagaagcacttgaaatattcttaatctctgcatgtgttacaattcagttatttctgtagtttgtaaactctaaagtgacattactattattttagagatgtctaagttgtaattttgatttttgtggaaccattgtttgttaatgttgggattctctgcacttttgaatgtgaaagcttatatccctgaattctgatacttaagagttttctatttcagacatctctgtgtggaagttgagactaagaataatcctagggatgtcatgaatttaggcaatgtttctcatttggaaaatgaaatgagaaataatttccttctttaaagcaagtatatatagtatgagaaacttggaggcatttcatacacacgtttcttaggaaaatggacacattgaaaatgtcctcttttttatattagagattctgcagctctttgctcttaagagcaaatcacaacaggattcttaatgtatgatttctttgttcatatattatgaatgtattattttatttgcttcgtaataaagtttataaggaagagcatctcatacatatcattatcgtggaacacgttgaatgtttgtgattctgtgtggcctttttggggctggaaaatgtatgaattcttcaactgtcttacaagagatctgctaataaattttattattaaataaga

SEQ ID NO: 51812 - DNA, 2482 bp, Homo sapiens
ccgcaggcggcgataggatccggactacagctcccagcgcgccccagttcccgcccccgcctccggagcccgacgctgcagcggctcttctcgaaaggttctttccgcctgtgcagctcgccggctcaatactccgggggtctgggtggggggctcaaacgcagggctctgggacgcaggcactgctccaggtgatagtgcgggaacatggccttgcagctgggcaggctgagctcgggcccctctggcccaccgctgcagcagcttcatggccccgcctgtgaccgacctgggcgagctgcgaaggaggccgggcgacatgaagaccaagatggagctgctgattctggagacccaggcccaggtgtgccaggctctggcacaggtagacgggggcgccaacttttctgtggaccggtgggagaggaaggaaggaggtggcggcatcagctgtgtacttcaagatgggtgtgttttcgaaaaggctggggtgagcatttctgttgttcatggaaatctttcagaggaagctgcaaaacaaatgagaagcagaggaaaagttctgaagactaaagatggtaaattgccattttgtgctatgggcgtgagctctgttatccaccccaagaatcctcatgctcctactatccatttcaactacagatactttgaagtagaagaagctgatggcaacaagcagtggtggtttggtggtggatgtgacctcactccaacatacttgaatcaagaagacgctgtccattttcacagaactctgaaggaggcttgtgaccagcatggtccagatctctaccccaaatttaaaaaatggtgtgatgattacttctttatagcccatcgtggagagcggcggggcattggtggtatcttttttgatgatcttgactctccgtccaaggaggaggtgtttcgctttgtacagagctgtgccagggctgtagttccttcttacattccccttgtgaaaaagcactgtgatgactcattcaccccccaggagaagctgtggcagcagctcagaagaggacggtatgtagaatttaatctgctgtatgatcggggcacaaagtttggcctcttcactccaggatccagaattgaaagtatcttgatgtctttacctctaactgcccgatgggagtacatgcattcaccctcagagaattccaaagaagctgaaattctggaagttctacgccatccaagggactgggtgcgttgatgcaggcagaatggctgtgcaggggtttggagggcacacgatgtgtgctccccatgccactggtcggcactttgccactgtgtggcagttacccgtgccttagtcttctccactctgcaccctacctcgtgggcagatgataacatgttttggatgctgtcagtgatgaatggtgagatggcagattgtcagagtcaattgattaaacctcatttatacttctagtgtcattttatatgactagtttacaaaataggacattgagtttccaagtattgagataagggaatataaatagtattatatgtatcaggaaatctctcatcttgtttttgtttcatgtattttttaaagttttcatttgtgccacaaaaatctgtcgtggaatatattttattttcattaattcagtgaagttgagacttcatagtaattttagaatgcaacttgaaggtaaaaattttactttgtcaatactgaagtctctgctgtaatccttatatatctttctccagagaacataatattgtcaaatagatacacatttttctaataggtatttagaagcacttgaaatattcttaatctctgcatgtgttacaattcagttatttctgtagtttgtaaactctaaagtgacattactattattttagagatgtctaagttgtaattttgatttttgtggaaccattgtttgttaatgttgggattctctgcacttttgaatgtgaaagcttatatccctgaattctgatacttaagagttttctatttcagacatctctgtgtggaagttgagactaagaataatcctagggatgtcatgaatttaggcaatgtttctcatttggaaaatgaaatgagaaataatttccttctttaaagcaagtatatatagtatgagaaacttggaggcatttcatacacacgtttcttaggaaaatggacacattgaaaatgtcctcttttttatattagagattctgcagctctttgctcttaagagcaaatcacaacaggattcttaatgtatgatttctttgttcatatattatgaatgtattattttatttgcttcgtaataaagtttataaggaagagcatctcatacatatcattatcgtggaacacgttgaatgtttgtgattctgtgtggcctttttggggctggaaaatgtatgaattcttcaactgtcttacaagagatctgctaataaattttattattaaataaga

SEQ ID NO: 51813 - DNA, 2339 bp, Homo sapiens
agataattgaaaagtgagccagatgtggtggcgcattcctatagtctccgtctctcaggaggctgaggcaggagattgcttgagcccaggagttggaggctgcagtgagttatgatcataccactgcactctaacctgggtgacagagtgagaccctgtctctaaaaaacaaaaaattagaaaacaacaaaaaccacttcggttactcactgtcctcatgctttgatgtcagttgttctcctaaattttaaaattttgttatgaagattggatgtacactgatttggccctttaaatgacattataccaagaagttggtataagggagtaggagatgagaaaactttttgaaaaatcatttggtgcatgctaaggtagcttgtaggacatgtggttttaaaaaattcatggattttgaagaaggatagggtggaagtaaaatttagctgatagcatagggatcatttgtgatttatatagaaaataattatatttttgagtgagaagcatcagacttaaatttttttcttctattttggttattaccaaaaggaacagagaaactctcagaattctttgaatcatagaatgttagtgctggaaaggactaggaagtgacttgtacaaccccttcattttacaaaggatcagagagaattggttagtagagtcccaaatctgcttttagaagtaatatggtgatcatcagtttagattcactgtaggaagggcagccctgttaaagtttgtcaggagaaaaagggaaggtatcactttttgtatgttcacccagttgcttctgtagttttcatacccctgttttctcaattttcttagaactgtctttaatggcccagctctaccagggcttgttgtctaaggacattaacttgtgctcccctcagggatgggtttactactagctgtcagaaagctattgggtatcctaatgtgttaatagctgaaactcagctgtaatttctcctaaatacttcagcattttgcattctgtacattgtggtgctttttccaccttgtattgttgtaactgtaagctcctagggggcagcaatttggtcttaggcgtgtaccctgtttagtgcctggcaatgccatgtttatatcaaggtcttaatattacttttgagttatttctcccactcttcatggaagtgatgctccagccttgctaaaacactgagggtcctcccgataagccaggcattgtgattccttggcttcaagtgccttctgtcttccccgaaggtccactgagatctacaatcccccctttcctctgatctcttgccatgtaagtaattttttaaaagatcagtacaagagctatattttttcctaagaaaaaatttcaacaggaatggggagtagccccgttttggggctgatctgtccagaatttggagtgaggaacaaatccattctcatctactttccacattttccctcttgtttgaggtcctgttccaaccttcatttctgaaactgttctagagcactttgtctttctcgtagttcataacttaccccttcagtctagaattagaattacattatctgttttactactttactagactgtaagctcctagaagataaggactagggagttcatctctgtattccaccagaaggtacagtgactcataactagagtctttagatgaaacttactgagttgaataacttaatatatttctgttttcattcccaagggaggccatgtctggagatagaccttgaatttaataaattttaggcactataccatttcagtggagaaaattgttgggaaatttggggggatggatatataagggggaggaagtcactggccagtttgaggtgcttccattggtctgggtaactagccatttcttcctgattgtgcctagtatatcccagacagtttgtttctatgcagaagaattttatatgaaattttcatttctttgcaaaaacttgttccttctttcagttcatgacatcatccatgctaaagtctgagtcatctgcttccatttttgttattccccacatccagtcttcagctaagtcctgtcagttctacctcaagtctttcccgtctttcttcctcacctatgtaatttcagtagtctctcagcttcacttaacctcttactccagcctactttatacacaatgttagattcatcttactgaaacatagttctgaccatgtattccatgtatgtgttctctctcccctattagactgtaagctccttatgggcaggatctgtgtctgagtcatctttgtatcttgcctagcacctatcaataaatacttcttgaatgaa

SEQ ID NO: 51814 - DNA, 2799 bp, Homo sapiens
agataattgaaaagtgagccagatgtggtggcgcattcctatagtctccgtctctcaggaggctgaggcaggagattgcttgagcccaggagttggaggctgcagtgagttatgatcataccactgcactctaacctgggtgacagagtgagaccctgtctctaaaaaacaaaaaattagaaaacaacaaaaaccacttcggttactcactgtcctcatgctttgatgtcagttgttctcctaaattttaaaattttgttatgaagattggatgtacactgatttggccctttaaatgacattataccaagaagttggtataagggagtaggagatgagaaaactttttgaaaaatcatttggtgcatgctaaggtagcttgtaggacatgtggttttaaaaaattcatggattttgaagaaggatagggtggaagtaaaatttagctgatagcatagggatcatttgtgatttatatagaaaataattatatttttgagtgagaagcatcagacttaaatttttttcttctattttggttattaccaaaaggaacagagaaactctcagaattctttgaatcatagaatgttagtgctggaaaggactaggaagtgacttgtacaaccccttcattttacaaaggatcagagagaattggttagtagagtcccaaatctgcttttagaagtaatatggtgatcatcagtttagattcactgtaggaagggcagccctgttaaagtttgtcaggagaaaaagggaaggtatcactttttgtatgttcacccagttgcttctgtagttttcatacccctgttttctcaattttcttagaactgtctttaatggcccagctctaccagggcttgttgtctaaggacattaacttgtgctcccctcagggatgggtttactactagctgtcagaaagctattgggtatcctaatgtgttaatagctgaaactcagctgtaatttctcctaaatacttcagcattttgcattctgtacattgtggtgctttttccaccttgtattgttgtaactgtaagctcctagggggcagcaatttggtcttaggcgtgtaccctgtttagtgcctggcaatgccatgtttatatcaaggtcttaatattacttttgagttatttctcccactcttcatggaagtgatgctccagccttgctaaaacactgagggtcctcccgataagccaggcattgtgattccttggcttcaagtgccttctgtcttccccgaaggtccactgagatctacaatcccccctttcctctgatctcttgccatgtaagtaattttttaaaagatcagtacaagagctatattttttcctaagaaaaaatttcaacaggaatggggagtagccccgttttggggctgatctgtccagaatttggagtgaggaacaaatccattctcatctactttccacattttccctcttgtttgaggtcctgttccaaccttcatttctgaaactgttctagagcactttgtctttctcgtagttcataacttaccccttcagtctagaattagaattacattatctgttttactactttactagactgtaagctcctagaagataaggactagggagttcatctctgtattccaccagaaggtacagtgactcataactagagtctttagatgaaacttactgagttgaataacttaatatatttctgttttcattcccaagggaggccatgtctggagatagaccttgaatttaataaattttaggcactataccatttcagtggagaaaattgttgggaaatttggggggatggatatataagggggaggaagtcactggccagtttgaggtgcttccattggtctgggtaactagccatttcttcctgattgtgcctagtatatcccagacagtttgtttctatgcagaagaattttatatgaaattttcatttctttgcaaaaacttgttccttctttcagttcatgacatcatccatgctaaagtctgagtcatctgcttccatttttgttattccccacatccagtcttcagctaagtcctgtcagttctacctcaagtctttcccgtctttcttcctcacctatgtaatttcagtagtctctcagcttcacttaacctcttactccagcctactttatacacaatgttagattcatcttactgaaacatagttctgaccatgtattccatgtatgtgttctctctcccctattagactgtaagctccttatgggcaggatctgtgtctgagtcatctttgtatcttgcctagcacctatcaataaatacttcttgaatgaaaaaatgaattctcatttctcgacataaagccttgtctaaagtgagatgttttccaggtcatacataggtttctccctggggtaattggaagttcttgcatataaagttggttaaatagtaataattatgagttaaccacagaaaatttcagaaaactttaatttttttccattggaatcagcatggatatgtgtatatggatggttcaataaatatacttttatatacatgtttcacagaaattttacattccatcttcaaactgcagaaatagattttttttttttacaagccaaaaaataactgccataacttttgtgacttcatgcaaaaaaaggggggaagagtaaggggcaaaagggaattagttgttcaaggttgagtgtccagtaagaagtaaaaatgttacattaaggaagcgattgcttaacacgctgcttaaggtggtagccagacaaat

SEQ ID NO: 51815 - DNA, 1958 bp, Homo sapiens
agataattgaaaagtgagccagatgtggtggcgcattcctatagtctccgtctctcaggaggctgaggcaggagattgcttgagcccaggagttggaggctgcagtgagttatgatcataccactgcactctaacctgggtgacagagtgagaccctgtctctaaaaaacaaaaaattagaaaacaacaaaaaccacttcggttactcactgtcctcatgctttgatgtcagttgttctcctaaattttaaaattttgttatgaagattggatgtacactgatttggccctttaaatgacattataccaagaagttggtataagggagtaggagatgagaaaactttttgaaaaatcatttggtgcatgctaaggtagcttgtaggacatgtggttttaaaaaattcatggattttgaagaaggatagggtggaagtaaaatttagctgatagcatagggatcatttgtgatttatatagaaaataattatatttttgagtgagaagcatcagacttaaatttttttcttctattttggttattaccaaaaggaacagagaaactctcagaattctttgaatcatagaatgttagtgctggaaaggactaggaagtgacttgtacaaccccttcattttacaaaggatcagagagaattggttagtagagtcccaaatctgcttttagaagtaatatggtgatcatcagtttagattcactgtaggaagggcagccctgttaaagtttgtcaggagaaaaagggaaggtatcactttttgtatgttcacccagttgcttctgtagttttcatacccctgttttctcaattttcttagaactgtctttaatggcccagctctaccagggcttgttgtctaaggacattaacttgtgctcccctcagggatgggtttactactagctgtcagaaagctattgggtatcctaatgtgttaatagctgaaactcagctgtaatttctcctaaatacttcagcattttgcattctgtacattgtggtgctttttccaccttgtattgttgtaactgtaagctcctagggggcagcaatttggtcttaggcgtgtaccctgtttagtgcctggcaatgccatgtttatatcaaggtcttaatattacttttgagttatttctcccactcttcatggaagtgatgctccagccttgctaaaacactgagggtcctcccgataagccaggcattgtgattccttggcttcaagtgccttctgtcttccccgaaggtccactgagatctacaatcccccctttcctctgatctcttgccatgtaagtaattttttaaaagatcagtacaagagctatattttttcctaagaaaaaatttcaacaggaatggggagtagccccgttttggggctgatctgtccagaatttggagtgaggaacaaatccattctcatctactttccacattttccctcttgtttgaggtcctgttccaaccttcatttctgaaactgttctagagcactttgtctttctcgtagttcataacttaccccttcagtctagaattagaattacattatctgttttactactttactagactgtaagctcctagaagataaggactagggagttcatctctgtattccaccagaaggtacagtgactcataactagagtctttagatgaaacttactgagttgaataacttaatatatttctgttttcattcccaagggaggccatgtctggagatagaccttgaatttaataaattttaggcactataccatttcagtggagaaaattgttgggaaatttggggggatggatatataaggggccgcgacttcctcccactctttctcgtttcataagccacatcgcctaattctcgttttctcccctatacggcccccataacttccacgccgcgtacgctcctcaaaactcgcaaacctc

SEQ ID NO: 51816 - DNA, 2298 bp, Homo sapiens
agataattgaaaagtgagccagatgtggtggcgcattcctatagtctccgtctctcaggaggctgaggcaggagattgcttgagcccaggagttggaggctgcagtgagttatgatcataccactgcactctaacctgggtgacagagtgagaccctgtctctaaaaaacaaaaaattagaaaacaacaaaaaccacttcggttactcactgtcctcatgctttgatgtcagttgttctcctaaattttaaaattttgttatgaagattggatgtacactgatttggccctttaaatgacattataccaagaagttggtataagggagtaggagatgagaaaactttttgaaaaatcatttggtgcatgctaaggtagcttgtaggacatgtggttttaaaaaattcatggattttgaagaaggatagggtggaagtaaaatttagctgatagcatagggatcatttgtgatttatatagaaaataattatatttttgagtgagaagcatcagacttaaatttttttcttctattttggttattaccaaaaggaacagagaaactctcagaattctttgaatcatagaatgttagtgctggaaaggactaggaagtgacttgtacaaccccttcattttacaaaggatcagagagaattggttagtagagtcccaaatctgcttttagaagtaatatggtgatcatcagtttagattcactgtaggaagggcagccctgttaaagtttgtcaggagaaaaagggaaggtatcactttttgtatgttcacccagttgcttctgtagttttcatacccctgttttctcaattttcttagaactgtctttaatggcccagctctaccagggcttgttgtctaaggacattaacttgtgctcccctcagggatgggtttactactagctgtcagaaagctattgggtatcctaatgtgttaatagctgaaactcagctgtaatttctcctaaatacttcagcattttgcattctgtacattgtggtgctttttccaccttgtattgttgtaactgtaagctcctagggggcagcaatttggtcttaggcgtgtaccctgtttagtgcctggcaatgccatgtttatatcaaggtcttaatattacttttgagttatttctcccactcttcatggaagtgatgctccagccttgctaaaacactgagggtcctcccgataagccaggcattgtgattccttggcttcaagtgccttctgtcttccccgaaggtccactgagatctacaatcccccctttcctctgatctcttgccatgtaagtaattttttaaaagatcagtacaagagctatattttttcctaagaaaaaatttcaacaggaatggggagtagccccgttttggggctgatctgtccagaatttggagtgaggaacaaatccattctcatctactttccacattttccctcttgtttgaggtcctgttccaaccttcatttctgaaactgttctagagcactttgtctttctcgtagttcataacttaccccttcagtctagaattagaattacattatctgttttactactttactagactgtaagctcctagaagataaggactagggagttcatctctgtattccaccagaaggtacagtgactcataactagagtctttagatgaaacttactgagttgaataacttaatatatttctgttttcattcccaagggaggccatgtctggagatagaccttgaatttaataaattttaggcactataccatttcagtggagaggaagtcactggccagtttgaggtgcttccattggtctgggtaactagccatttcttcctgattgtgcctagtatatcccagacagtttgtttctatgcagaagaattttatatgaaattttcatttctttgcaaaaacttgttccttctttcagttcatgacatcatccatgctaaagtctgagtcatctgcttccatttttgttattccccacatccagtcttcagctaagtcctgtcagttctacctcaagtctttcccgtctttcttcctcacctatgtaatttcagtagtctctcagcttcacttaacctcttactccagcctactttatacacaatgttagattcatcttactgaaacatagttctgaccatgtattccatgtatgtgttctctctcccctattagactgtaagctccttatgggcaggatctgtgtctgagtcatctttgtatcttgcctagcacctatcaataaatacttcttgaatgaa

SEQ ID NO: 51817 - DNA, 1233 bp, Homo sapiens
  misc_feature (460)..(461): n is a, c, g, or t
  misc_feature (468)..(468): n is a, c, g, or t
  misc_feature (472)..(472): n is a, c, g, or t
  misc_feature (482)..(482): n is a, c, g, or t
  misc_feature (491)..(491): n is a, c, g, or t
  misc_feature (494)..(495): n is a, c, g, or t
  misc_feature (499)..(499): n is a, c, g, or t
  misc_feature (501)..(501): n is a, c, g, or t
  misc_feature (507)..(507): n is a, c, g, or t
caaagctcccgactgtccgcagccccggccgctcacagatggagggtcccagggcctaggacgcagcccccagcgggaagctccagctggccgtgaagaggccgagtcgagagccgggaggcgcgcgggggtgggcgctgcagccgcgggttgtttatctggagtacggaggggaggggggagcctggaaaccgccccgtgtcccatttcctcctcttgttttcgctccggattctccatgttggacccaaactgaggagcccggagctgccgctgggggatcggggccgggggcacccgggggagccgctgcccgggccgcccgccctttgtacaggccgcctcccttcccggtccggggaggaaacgagaggggggatgtgaacagctgtggaagtcggagtctcgggagccggagcgggccgggaggcgggccgtacagagggcgggcggccgggcnngcggccngacntggcggccangcgagcccngannccgncngcactnaggtacagggaacaccagtcacagacatacaaaccatgccgaccgagaacacagcccctagatagagctacaccagagcacaaagaacagaggtacgacccaaacgaaacgactacactacaggaacgcctacggtgagacgtcaacatccttctacccgaccatatccagtagcctggtaaatacgcagcacaaagacatagcacgggccagacagaagatccactacacaagttgaactgcagcaagacgtactcaaaggagagacggcaaagacgaccaataagcataagagatcgacgagttcgtggcatccaagcaggatatacacaggatacagacggagcataaccaggagatcacaaggaaaccactgccaatggataccacaggacggcttgaacaaaaggggaaggaatacaagagacagagaagacatgaagagggagcaggagagccgtagatggcaaggcacataggtgcattacgatccctccaaaggcgcaggcacaccacatgacagaatagacatcaacggcggtaacagagatattgacggggcacgaaaaaaaacgaggacaaagaagcaaagaaaggaatgaacgagacagagagataagaggagaacgaaagaggagaacaacatcgaagagagtgacgaagcgaggcaagatggggagatagaacggaacgatcacacccgaacgcgccacagccaggcctccg

SEQ ID NO: 51818 - DNA, 4737 bp, Homo sapiens
  misc_feature (1547)..(1547): n is a, c, g, or t
  misc_feature (2726)..(2726): n is a, c, g, or t
  misc_feature (2893)..(2893): n is a, c, g, or t
ggcggcgtcgggctccctcccggctgcctctgaccagtttcgctgagcaaacaagcccgaccctgaggcccggccagagcccctccctgcccggtgcgctcccccggggccggcgctgcacacacagagccgcgtttgtttagcccgggagcggtgtccctggttacataattcgccggatggcatcagacccggcgtggttctgaatcgcgcagcgaaaaagtgcgagttctctgtgggcagcggctggcggcccccgccttccagagcgtcaggtggaggcgcgagggggcccgcaggccctcgcgggggcctggtctccaagtcctctcctaagaagcctcgtggacgtaacatcttcaaggcccttttctgctgttttcgcgcccagcatgttggccagtcaagttcctccactgagctcgctgcgtataaggaggaagcaaacaccattgctaagtcggatctgctccagtgtctccagtaccagttctaccagatcccagggacctgcctgctcccagaggtgacagaggaagatcaaggaaggatctgtgtggtcattgacctcgatgaaacccttgtgcatagctcctttaagccaatcaacaatgctgacttcatagtgcctatagagattgaggggaccactcaccaggtgtatgtgctcaagaggccttatgtggatgagttcctgagacgcatgggggaactctttgaatgtgttctcttcactgccagcctggccaagtatgccgaccctgtgacagacctgctggaccggtgtggggtgttccgggcccgcctattccgtgagtcttgcgtgttccaccagggctgctacgtcaaggacctcagccgcctggggagggacctgagaaagaccctcatcctggacaactcgcctgcttcttacatattccaccccgagaatgcagtgcctgtgcagtcctggtttgatgacatggcagacactgagttgctgaacctgatcccaatctttgaggagctgagcggagcagaggacgtctacaccagccttgggcagctgcgggccccttagcctgccctgcttccaagcgacggccatcccagtaggggactttcccacactgtgcctttacgatcagcgtgacagagtagaagctggagtgcctcaccacacggcccggaaacagcgggaagtaactggaaagagctttaggacagcttagatgccgagtgggcgaatgccagaccaatgatacccagagctacctgccgccaacttgttgagatgtgtgtttgactgtgagagagtgtgtgtttgtgtgtgtgttttgccatgaactgtggccccagtgtatagtgtttcagtgggggagaagctgaaagaccaagactcttcccaagttagcttgtctcctctcctgtcaccctaagagccactgagttgtgtagggatgaagactattgaagactccattgccaaaccatggcctttcctcagtgttgtaaggcctatgccaaggataaaggaagggtatgcctttgggtactccaggcanacacctttctgaaatccttctccagccagctgctgcagacaaaagatcacatttctgggaagatgagaacttgtttccagaccagcatccagtggccatcaggtcttgtggcccaaaggctatgcttgcctccggctgagtgcctgggataggccttttctatgtctccccaaggctggggtgctgagcctgccttcctcaccacctagccatagtctcaaacctgtggggaaggaggttttctccctgcccgggaagaggacagataactgatttccgttcttttgactgtgttttaaaattctctttctaaacacagagtgttgggcctggtttgtttctgacaaagttacagtcctgggcctgtaatgaatgtcggcggcgctggggttgcagggaaaagacaaatcctcaaagcgtggacgtgtgtccccatggcttgtggatcagctaagctcgggatcatttccataagtctgcttttcagggattctctgctggtgctggtgcaaggacttctgttccaaaggctgggaaaaactaagctgtcccagcccctcccatttcttgggcagggctcttttcctgttgtgtcttcccccagggcctgtcctgtaccgagctctgtctgttccagcctacatccttcctgggtgttgcttttcctcttaagggcctcagaactcttgctcttcctggggtgagggggaatgagtgttcttgacatgtgacagcctaatgcgcatgctttctgcctctggtaacaggagtgagtgagcccctcagacctgcactctgggtgtctcctgcttacaaaggttcttaatagtgaatgctttaaaattaaagtcatcacgaaatggaagttttcccagggtggaaaataagaggaagtgctgctgtaattgggagcacaaggggcctcccaaaaaggagccccacctcagcatcactgccttaatcgtggcctccctggggtgggtggggttctctcctccctccctccctcctcctggggtgggagggcgctcctgttcccatctctgtgttccctggaggcaggtatcacaaagcatttgtgaattgctttaggtgcagggacaccacccactcaggactcttccccatcatcccttccattgccacaccctagatccagcctcaggaactaacaagttntgagaaaagcaggtggtagagcagcagcttcgtgctctcagcggtggctggctggcatttttctctagcgttgtggtgccaccttcccttcttgtcccaaggttataaggccttgtctttctctttggaatcataaagtggaacagagtccccagaactcatgtggncatttccgacagcatcactccccggtgcctatggggtcccggtgtacctaaagggagaaggaccccatgtgctagccagaaatatactgtctcttgaaggaaagcaggagctcagactcttagagccagctgtggcttcggacccaaggcctgacctaggctgctatcctaatattggaggaggggcctctcttccaagccccaccctaagggttagcccttggacaaatcttgtgccgtctaggcccagccaggcttttctgactaaataagcaataagaggctctaagctgactgagttgcaaggaccctttccgccctcccttggatctccatgtttctccagatggcggaagagcatgtgccaccccctttcctaacagacttgtccaagtgcttggcgtgggacccatgaccaaagcccaggatggcttggtgggagtgtccctgctgcatctgcatgaagcccctgctttttaggcctcactcccatcagaaccctgcctgcccacctgcaactcccccccaacaatgccattcccacttgccccagagaagctactcggccaaacctagccagggtctgttcttgtggaccagagccagcctagtcattatttgctgtcgggtttccagtttcaccgtgtgttagggtgagggatgattgtaaaatttgctcctcaaaggaatcaggccagactcaattttgggagggcaagacagggaggaggccgcttcatcccagactctcttctagggcttcccaccatcagcccctcccacttgagactggtctttgggaggcaataggccaccatgcctggtcagcaccaattcaagccatgccaggaatctgcctacctgccaggttcagttcttttaaggtgcctcttcagggacacagtgtgtctctctgattgggcttctaaatcaaaagcctgatgttcgtgtccctctcatagggggagctttggacacaggaccagtttggaaaagggtcaggtaagggtttccactctgcacattgtagagggaacactctgtaggcccatgggtcccttactagagaggttgagtgaatttgccttcagttaacatgggaccttctgtttagcttcctcttgcttcccaaagattttaagcattttgtaaatgtataaactcacctctggtaacagtggcccagacgctgctttgtgctaaaagcatgggaaatgtaaaggcagtctttctctgggaaatggatgctattctattctgctgcccctacctgttcctgaggcctcatttagaaagaaaatcccctcagaaggctgtctggcacccagtgtcctagccaggccaagtatatgagaaaggtaagtccattttccccttcaggtcctcagtggattacttaaccactgctgtccctcggtccctttttcctaaacgggtttagttctgtcttttttctccttttttctaaatgctggtaaatatttacattcagccagggaagaggaggccagaggtcgggccagctgccccattcttttaacgttgtagggcctgcccatggagcggaccctcctctttgggcctcgtgagcttttttgcttatcatgttccatttcgtgccgctttcccccttcaagatgccatttggagggtaggggatctgcttcccactgtgactgggctatgggattctgactaccttgcttacagattcatggtttgataaatttgttgtattccaaaacttgaaatgcaggacgccattaagtgtctgtttatatttttggaatatttgtattacttacaattaattaataaaagtgggtttaaaaaacctttccagg

SEQ ID NO: 51819 - DNA, 4997 bp, Homo sapiens
  misc_feature (1807)..(1807): n is a, c, g, or t
  misc_feature (2986)..(2986): n is a, c, g, or t
  misc_feature (3153)..(3153): n is a, c, g, or t
caaagctcccgactgtccgcagccccggccgctcacagatggagggtcccagggcctaggacgcagcccccagcgggaagctccagctggccgtgaagaggccgagtcgagagccgggaggcgcgcgggggtgggcgctgcagccgcgggttgtttatctggagtacggaggggaggggggagcctggaaaccgccccgtgtcccatttcctcctcttgttttcgctccggattctccatgttggacccaaactgaggagcccggagctgccgctgggggatcggggccgggggcacccgggggagccgctgcccgggccgcccgccctttgtacaggccgcctcccttcccggtccggggaggaaacgagaggggggatgtgaacagctgtggaagtcggagtctcgggagccggagcgggcccccgcccaggccccccagcccagcccagcccgcgcgcccgcccgtcctcccgcccagccagcccgggcccgcgggattgttagatggaacacggctccatcatcacccaggcgcggagggaagacgccctggtgctcaccaagcaaggcctggtctccaagtcctctcctaagaagcctcgtggacgtaacatcttcaaggcccttttctgctgttttcgcgcccagcatgttggccagtcaagttcctccactgagctcgctgcgtataaggaggaagcaaacaccattgctaagtcggatctgctccagtgtctccagtaccagttctaccagatcccagggacctgcctgctcccagaggtgacagaggaagatcaaggaaggatctgtgtggtcattgacctcgatgaaacccttgtgcatagctcctttaagccaatcaacaatgctgacttcatagtgcctatagagattgaggggaccactcaccaggtgtatgtgctcaagaggccttatgtggatgagttcctgagacgcatgggggaactctttgaatgtgttctcttcactgccagcctggccaagtatgccgaccctgtgacagacctgctggaccggtgtggggtgttccgggcccgcctattccgtgagtcttgcgtgttccaccagggctgctacgtcaaggacctcagccgcctggggagggacctgagaaagaccctcatcctggacaactcgcctgcttcttacatattccaccccgagaatgcagtgcctgtgcagtcctggtttgatgacatggcagacactgagttgctgaacctgatcccaatctttgaggagctgagcggagcagaggacgtctacaccagccttgggcagctgcgggccccttagcctgccctgcttccaagcgacggccatcccagtaggggactttcccacactgtgcctttacgatcagcgtgacagagtagaagctggagtgcctcaccacacggcccggaaacagcgggaagtaactggaaagagctttaggacagcttagatgccgagtgggcgaatgccagaccaatgatacccagagctacctgccgccaacttgttgagatgtgtgtttgactgtgagagagtgtgtgtttgtgtgtgtgttttgccatgaactgtggccccagtgtatagtgtttcagtgggggagaagctgaaagaccaagactcttcccaagttagcttgtctcctctcctgtcaccctaagagccactgagttgtgtagggatgaagactattgaagactccattgccaaaccatggcctttcctcagtgttgtaaggcctatgccaaggataaaggaagggtatgcctttgggtactccaggcanacacctttctgaaatccttctccagccagctgctgcagacaaaagatcacatttctgggaagatgagaacttgtttccagaccagcatccagtggccatcaggtcttgtggcccaaaggctatgcttgcctccggctgagtgcctgggataggccttttctatgtctccccaaggctggggtgctgagcctgccttcctcaccacctagccatagtctcaaacctgtggggaaggaggttttctccctgcccgggaagaggacagataactgatttccgttcttttgactgtgttttaaaattctctttctaaacacagagtgttgggcctggtttgtttctgacaaagttacagtcctgggcctgtaatgaatgtcggcggcgctggggttgcagggaaaagacaaatcctcaaagcgtggacgtgtgtccccatggcttgtggatcagctaagctcgggatcatttccataagtctgcttttcagggattctctgctggtgctggtgcaaggacttctgttccaaaggctgggaaaaactaagctgtcccagcccctcccatttcttgggcagggctcttttcctgttgtgtcttcccccagggcctgtcctgtaccgagctctgtctgttccagcctacatccttcctgggtgttgcttttcctcttaagggcctcagaactcttgctcttcctggggtgagggggaatgagtgttcttgacatgtgacagcctaatgcgcatgctttctgcctctggtaacaggagtgagtgagcccctcagacctgcactctgggtgtctcctgcttacaaaggttcttaatagtgaatgctttaaaattaaagtcatcacgaaatggaagttttcccagggtggaaaataagaggaagtgctgctgtaattgggagcacaaggggcctcccaaaaaggagccccacctcagcatcactgccttaatcgtggcctccctggggtgggtggggttctctcctccctccctccctcctcctggggtgggagggcgctcctgttcccatctctgtgttccctggaggcaggtatcacaaagcatttgtgaattgctttaggtgcagggacaccacccactcaggactcttccccatcatcccttccattgccacaccctagatccagcctcaggaactaacaagttntgagaaaagcaggtggtagagcagcagcttcgtgctctcagcggtggctggctggcatttttctctagcgttgtggtgccaccttcccttcttgtcccaaggttataaggccttgtctttctctttggaatcataaagtggaacagagtccccagaactcatgtggncatttccgacagcatcactccccggtgcctatggggtcccggtgtacctaaagggagaaggaccccatgtgctagccagaaatatactgtctcttgaaggaaagcaggagctcagactcttagagccagctgtggcttcggacccaaggcctgacctaggctgctatcctaatattggaggaggggcctctcttccaagccccaccctaagggttagcccttggacaaatcttgtgccgtctaggcccagccaggcttttctgactaaataagcaataagaggctctaagctgactgagttgcaaggaccctttccgccctcccttggatctccatgtttctccagatggcggaagagcatgtgccaccccctttcctaacagacttgtccaagtgcttggcgtgggacccatgaccaaagcccaggatggcttggtgggagtgtccctgctgcatctgcatgaagcccctgctttttaggcctcactcccatcagaaccctgcctgcccacctgcaactcccccccaacaatgccattcccacttgccccagagaagctactcggccaaacctagccagggtctgttcttgtggaccagagccagcctagtcattatttgctgtcgggtttccagtttcaccgtgtgttagggtgagggatgattgtaaaatttgctcctcaaaggaatcaggccagactcaattttgggagggcaagacagggaggaggccgcttcatcccagactctcttctagggcttcccaccatcagcccctcccacttgagactggtctttgggaggcaataggccaccatgcctggtcagcaccaattcaagccatgccaggaatctgcctacctgccaggttcagttcttttaaggtgcctcttcagggacacagtgtgtctctctgattgggcttctaaatcaaaagcctgatgttcgtgtccctctcatagggggagctttggacacaggaccagtttggaaaagggtcaggtaagggtttccactctgcacattgtagagggaacactctgtaggcccatgggtcccttactagagaggttgagtgaatttgccttcagttaacatgggaccttctgtttagcttcctcttgcttcccaaagattttaagcattttgtaaatgtataaactcacctctggtaacagtggcccagacgctgctttgtgctaaaagcatgggaaatgtaaaggcagtctttctctgggaaatggatgctattctattctgctgcccctacctgttcctgaggcctcatttagaaagaaaatcccctcagaaggctgtctggcacccagtgtcctagccaggccaagtatatgagaaaggtaagtccattttccccttcaggtcctcagtggattacttaaccactgctgtccctcggtccctttttcctaaacgggtttagttctgtcttttttctccttttttctaaatgctggtaaatatttacattcagccagggaagaggaggccagaggtcgggccagctgccccattcttttaacgttgtagggcctgcccatggagcggaccctcctctttgggcctcgtgagcttttttgcttatcatgttccatttcgtgccgctttcccccttcaagatgccatttggagggtaggggatctgcttcccactgtgactgggctatgggattctgactaccttgcttacagattcatggtttgataaatttgttgtattccaaaacttgaaatgcaggacgccattaagtgtctgtttatatttttggaatatttgtattacttacaattaattaataaaagtgggtttaaaaaacctttccagg

SEQ ID NO: 51820 - DNA, 423 bp, Homo sapiens
acaagtgcattcaacaaatacttatttaattgtattggtggttagagggttgcgattgattaaggcacattaatggatccgtgtcctccctgtatccaagattctgccatttgtctctgcagttcctcccactgaagaatcggagtatatttctccagtccctaatgttgggtttagtcatgtgtctagctttggccactggaatattaatctgtatgaccaaaaacttggaaagtgtgaattcatttctgctcactcactcctgctatcaccatgagaacaagcccaggccagactgctgcttccagcagaagagacagcaagagcaacgtcgagcttcccagacatgctcatgctagattgaccaatcctcagctgacccatagatccatgaaaataaacgattgttgtattaagccactg

SEQ ID NO: 51821 - DNA, 412 bp, Homo sapiens
aaacaaaatcagtcttttgtcaaaaggaaatgaagttgccatgccactgttcactcctgtaagagactcctctgggctgttccattctcttgctgcaattcagccggttgaaaaactaaggtgactgcacaatgattaacttcaggcccttctgctctactttgagcctgtctctggttcaacgttacactctccgctcagcacccgcagactcaagagatttccaatcccccaatttagcgtggttctaccttaggcagaactcccatccagttcggatataagcgggtcgaagtggcagggaccacctcgctgggaggagaggctggagctgcggtcttaaaagatcttggggccgggcgcgatggctcacgcctgtaatcccaacacgttgggaggccgaagcgggtag

SEQ ID NO: 51822 - DNA, 365 bp, Homo sapiens
gtcaatgatcacctacctttttagctgtatattctattttaacgttataagaattttgacttaaaagtccattaaagtagaagtttatttttaatccaatggctttatcaaataaaaatgttagtggtctcttcaactaatacgattcaaaattctaccttatgatctggtgatttaatgtgacctgtcaaaagatacttactacctctgtggactatacatacccaatgtatgttaatatgtggaaatccttgttttgttttgtttttttttcttttggagacagaatttcactcttcttacccaagctggagtgcaatggcacgatctcggctcactgcaaccttcgcctcccgggttcaagc

SEQ ID NO: 51823 - DNA, 433 bp, Homo sapiens
tgaaccttcaattggagagcctgcaccttaagtctctcctccaagtggcttagtttaattgaagtgatctgtgtgccaccacccccttgtggttggatggagccatgtcattagttctggccaatgagctgtgagtggtagtggcttgcgttaattctacgtgagagcatttcagtgctggagaaacctgcgaggacctctttttccctctgtgcagtgaccagcagtgcttcctatggaactgttcattagtgtaggtcctggaatgaggatgcatggcgcagggcccttaatctgtccaatctgactgtgatgtgggagagacttctagacatgttgctttctctagggtatgttcttatatttcccattaccccccaccccctgcaaaaggactgggcctgttttgggaaggtgactgatacccgcactg

SEQ ID NO: 51824 - DNA, 1961 bp, Homo sapiens
gaaaatctggagccagacagtgagagaggcagaggggaaatgaaaaaccccgtgggaggctgcagcaaagcgaggcagtgtggcttctctgacagggaagtcagcagagggagaggtttgtctgtctgtacagcaagggaagtcagacgagagtgcaagagggtgtggagaggggtactgatatctgaattattagggcaggtgtcctgccaaggaatccctcctttaacagagcttcaatgctgctcctgttcctcctcttcgagggtctctgctgtcctggggaaaatacagcagctccccaggctctacaatcctatcatctagcagcagaggagcagctgtccttccgcatgctccaaacttcctcctttgccaaccacagctgggcacacagtgagggctcaggatggctgggtgacctgcagactcatggctgggacactgtcttgggcaccatccgctttctgaagccctggtcccatggaaacttcagcaagcaggagctgaaaaacttacagtcactgttccagttatacttccatagttttatccggatagtgcaagcttctgctggtcaatttcagcttgaataccccttcgagatccagatattagctggctgtagaatgaatgccccacaaatcttcttaaatatggcatatcaagggtcagatttcctgagtttccaaggaatttcctgggagccatctccaggagcagggatccgggcccagaacatctgtaaagtgctcaatcgctacctagatattaaggaaatactgcaaagccttcttggtcacacctgccctcgatttctagcggggctcatggaagcaggggagtcagaactgaaacggaaagtgaagccagaggcctggctgtcctgtggccccagtcctggccctggccgtctgcagcttgtgtgccatgtctcaggattctacccaaagcccgtgtgggtgatgtggatgcggggtgagcaggagcagcggggcactcagcgaggggacgtcctgcctaatgctgacgagacatggtggatattccatctttctcatcctgatctgtttgactgtgatagttaccctggtcatattggttgtagttgactcacggttaaaaaaacagagttcaaataagaacattctttctccccacacacccagccctgtctttctcatgggagccaacactcaggacaccaagaattcaagacatcagttctgcttggcacaagtatcgtggatcaaaaacagagtattgaagaagtggaagacacgcctaaaccaactctggtgacatttgctttaccttatacataaaatccttgtctgcatcttcttaaacaccgtccatgtcccataagggaagcatgcttttatttaaacagtttatactagcaaagatactgacccctttagggaatactttttccccatcttccagagattttttttttcctgctttggctacatatccatcattgtttatttttgaaactataatccagatacttctttttcatggattcccgagatcacccaattgatagctcttctgtactccccaaattgaactgatcttcacaagcacattcatctcttcctactctgaacagtagttatttaggtttttgctctttttttttttttaatctcagttgcttgaaagtaggatttaggtatttgtgtctgtattcatgaccaaaaatcttatctgaattcagggccagcttcataagcatgtgacctgtgcagacacatggaatcgtatgctctgcaagaacccatgctagatttaatgctctgctgttgtcatcttggaatccttagtcattttcaaacaagagatattgtattttcatttttcactgaccccacaaattatatagctgattcagtgtgaatgtaatatttctcaataaatgctgactgaaataaatttgttgttagatcaag

SEQ ID NO: 51825 - DNA, 2065 bp, Homo sapiens
gaaaatctggagccagacagtgagagaggcagaggggaaatgaaaaaccccgtgggaggctgcagcaaagcgaggcagtgtggcttctctgacagggaagtcagcagagggagaggtttgtctgtctgtacagcaagggaagtcagacgagagtgcaagagggtgtggagaggggtactgatatctgaattattagggcaggtgtcctgccaaggaatccctcctttaacagagcttcaatgctgctcctgttcctcctcttcgagggtctctgctgtcctggggaaaatacagcagctccccaggctctacaatcctatcatctagcagcagaggagcagctgtccttccgcatgctccaaacttcctcctttgccaaccacagctgggcacacagtgagggctcaggatggctgggtgacctgcagactcatggctgggacactgtcttgggcaccatccgctttctgaagccctggtcccatggaaacttcagcaagcaggagctgaaaaacttacagtcactgttccagttatacttccatagttttatccggatagtgcaagcttctgctggtcaatttcagcttgaataccccttcgagatccagatattagctggctgtagaatgaatgccccacaaatcttcttaaatatggcatatcaagggtcagatttcctgagtttccaaggaatttcctgggagccatctccaggagcagggatccgggcccagaacatctgtaaagtgctcaatcgctacctagatattaaggaaatactgcaaagccttcttggtcacacctgccctcgatttctagcggggctcatggaagcaggggagtcagaactgaaacggaaagtgaagccagaggcctggctgtcctgtggccccagtcctggccctggccgtctgcagcttgtgtgccatgtctcaggattctacccaaagcccgtgtgggtgatgtggatgcggggtgagcaggagcagcggggcactcagcgaggggacgtcctgcctaatgctgacgagacatggtatctccgagcaaccctggatgtggcggctggggaggcagctggcctgtcctgtcgggtgaaacacagcagtctagggggccatgatctaatcatccattggggtggatattccatctttctcatcctgatctgtttgactgtgatagttaccctggtcatattggttgtagttgactcacggttaaaaaaacagagttcaaataagaacattctttctccccacacacccagccctgtctttctcatgggagccaacactcaggacaccaagaattcaagacatcagttctgcttggcacaagtatcgtggatcaaaaacagagtattgaagaagtggaagacacgcctaaaccaactctggtgacatttgctttaccttatacataaaatccttgtctgcatcttcttaaacaccgtccatgtcccataagggaagcatgcttttatttaaacagtttatactagcaaagatactgacccctttagggaatactttttccccatcttccagagattttttttttcctgctttggctacatatccatcattgtttatttttgaaactataatccagatacttctttttcatggattcccgagatcacccaattgatagctcttctgtactccccaaattgaactgatcttcacaagcacattcatctcttcctactctgaacagtagttatttaggtttttgctctttttttttttttaatctcagttgcttgaaagtaggatttaggtatttgtgtctgtattcatgaccaaaaatcttatctgaattcagggccagcttcataagcatgtgacctgtgcagacacatggaatcgtatgctctgcaagaacccatgctagatttaatgctctgctgttgtcatcttggaatccttagtcattttcaaacaagagatattgtattttcatttttcactgaccccacaaattatatagctgattcagtgtgaatgtaatatttctcaataaatgctgactgaaataaatttgttgttagatcaag

SEQ ID NO: 51826 - DNA, 2029 bp, Homo sapiens
gaaaatctggagccagacagtgagagaggcagaggggaaatgaaaaaccccgtgggaggctgcagcaaagcgaggcagtgtggcttctctgacagggaagtcagcagagggagaggtttgtctgtctgtacagcaagggaagtcagacgagagtgcaagagggtgtggagaggggtactgatatctgaattattagggcaggtgtcctgccaaggaatccctcctttaacagagcttcaatgctgctcctgttcctcctcttcgagggtctctgctgtcctggggaaaatacagcagctccccaggctctacaatcctatcatctagcagcagaggagcagctgtccttccgcatgctccaaacttcctcctttgccaaccacagctgggcacacagtgagggctcaggatggctgggtgacctgcagactcatggctgggacactgtcttgggcaccatccgctttctgaagccctggtcccatggaaacttcagcaagcaggagctgaaaaacttacagtcactgttccagttatacttccatagttttatccggatagtgcaagcttctgctggtcaatttcagcttgaataccccttcgagatccagatattagctggctgtagaatgaatgccccacaaatcttcttaaatatggcatatcaagggtcagatttcctgagtttccaaggaatttcctgggagccatctccaggagcagggatccgggcccagaacatctgtaaagtgctcaatcgctacctagatattaaggaaatactgcaaagccttcttggtcacacctgccctcgatttctagcggggctcatggaagcaggggagtcagaactgaaacggaaagtgaagccagaggcctggctgtcctgtggccccagtcctggccctggccgtctgcagcttgtgtgccatgtctcaggattctacccaaagcccgtgtgggtgatgtggatgcggggtgagcaggagcagcggggcactcagcgaggggacgtcctgcctaatgctgacgagacatggtatctccgagcaaccctggatgtggcggctggggaggcagctggcctgtcctgtcgggtgaaacacagcagtctagggggccatgatctaatcatccattggggtggatattccatctttctcatcctgatctgtttgactgtgatagttaccctggtcatattggttgtagttgactcacggttaaaaaaacagagccctgtctttctcatgggagccaacactcaggacaccaagaattcaagacatcagttctgcttggcacaagtatcgtggatcaaaaacagagtattgaagaagtggaagacacgcctaaaccaactctggtgacatttgctttaccttatacataaaatccttgtctgcatcttcttaaacaccgtccatgtcccataagggaagcatgcttttatttaaacagtttatactagcaaagatactgacccctttagggaatactttttccccatcttccagagattttttttttcctgctttggctacatatccatcattgtttatttttgaaactataatccagatacttctttttcatggattcccgagatcacccaattgatagctcttctgtactccccaaattgaactgatcttcacaagcacattcatctcttcctactctgaacagtagttatttaggtttttgctctttttttttttttaatctcagttgcttgaaagtaggatttaggtatttgtgtctgtattcatgaccaaaaatcttatctgaattcagggccagcttcataagcatgtgacctgtgcagacacatggaatcgtatgctctgcaagaacccatgctagatttaatgctctgctgttgtcatcttggaatccttagtcattttcaaacaagagatattgtattttcatttttcactgaccccacaaattatatagctgattcagtgtgaatgtaatatttctcaataaatgctgactgaaataaatttgttgttagatcaag

SEQ ID NO: 51827 - DNA, 1864 bp, Homo sapiens
gaaaatctggagccagacagtgagagaggcagaggggaaatgaaaaaccccgtgggaggctgcagcaaagcgaggcagtgtggcttctctgacagggaagtcagcagagggagaggtttgtctgtctgtacagcaagggaagtcagacgagagtgcaagagggtgtggagaggggtactgatatctgaattattagggcaggtgtcctgccaaggaatccctcctttaacagagcttcaatgctgctcctgttcctcctcttcgagggtctctgctgtcctggggaaaatacagcagctccccaggctctacaatcctatcatctagcagcagaggagcagctgtccttccgcatgctccaaacttcctcctttgccaaccacagctgggcacacagtgagggctcaggatggctgggtgacctgcagactcatggctgggacactgtcttgggcaccatccgctttctgaagccctggtcccatggaaacttcagcaagcaggagctgaaaaacttacagtcactgttccagttatacttccatagttttatccggatagtgcaagcttctgctggtcaatttcagcttgaataccccttcgagatccagatattagctggctgtagaatgaatgccccacaaatcttcttaaatatggcatatcaagggtcagatttcctgagtttccaaggaatttcctgggagccatctccaggagcagggatccgggcccagaacatctgtaaagtgctcaatcgctacctagatattaaggaaatactgcaaagccttcttggtcacacctgccctcgatttctagcggggctcatggaagcaggggagtcagaactgaaacggaaagtgaagccagaggcctggctgtcctgtggccccagtcctggccctggccgtctgcagcttgtgtgccatgtctcaggattctacccaaagcccgtgtgggtgatgtggatgcggggtggatattccatctttctcatcctgatctgtttgactgtgatagttaccctggtcatattggttgtagttgactcacggttaaaaaaacagagccctgtctttctcatgggagccaacactcaggacaccaagaattcaagacatcagttctgcttggcacaagtatcgtggatcaaaaacagagtattgaagaagtggaagacacgcctaaaccaactctggtgacatttgctttaccttatacataaaatccttgtctgcatcttcttaaacaccgtccatgtcccataagggaagcatgcttttatttaaacagtttatactagcaaagatactgacccctttagggaatactttttccccatcttccagagattttttttttcctgctttggctacatatccatcattgtttatttttgaaactataatccagatacttctttttcatggattcccgagatcacccaattgatagctcttctgtactccccaaattgaactgatcttcacaagcacattcatctcttcctactctgaacagtagttatttaggtttttgctctttttttttttttaatctcagttgcttgaaagtaggatttaggtatttgtgtctgtattcatgaccaaaaatcttatctgaattcagggccagcttcataagcatgtgacctgtgcagacacatggaatcgtatgctctgcaagaacccatgctagatttaatgctctgctgttgtcatcttggaatccttagtcattttcaaacaagagatattgtattttcatttttcactgaccccacaaattatatagctgattcagtgtgaatgtaatatttctcaataaatgctgactgaaataaatttgttgttagatcaag

SEQ ID NO: 51828 - DNA, 1795 bp, Homo sapiens
gaaaatctggagccagacagtgagagaggcagaggggaaatgaaaaaccccgtgggaggctgcagcaaagcgaggcagtgtggcttctctgacagggaagtcagcagagggagaggtttgtctgtctgtacagcaagggaagtcagacgagagtgcaagagggtgtggagaggggtactgatatctgaattattagggcaggtgtcctgccaaggaatccctcctttaacagagcttcaatgctgctcctgttcctcctcttcgagggtctctgctgtcctggggaaaatacagcagctccccaggctctacaatcctatcatctagcagcagaggagcagctgtccttccgcatgctccaaacttcctcctttgccaaccacagctgggcacacagtgagggctcaggatggctgggtgacctgcagactcatggctgggacactgtcttgggcaccatccgctttctgaagccctggtcccatggaaacttcagcaagcaggagctgaaaaacttacagtcactgttccagttatacttccatagttttatccggatagtgcaagcttctgctggtcaatttcagcttgaattgaagccagaggcctggctgtcctgtggccccagtcctggccctggccgtctgcagcttgtgtgccatgtctcaggattctacccaaagcccgtgtgggtgatgtggatgcggggtgagcaggagcagcggggcactcagcgaggggacgtcctgcctaatgctgacgagacatggtatctccgagcaaccctggatgtggcggctggggaggcagctggcctgtcctgtcgggtgaaacacagcagtctagggggccatgatctaatcatccattggggtggatattccatctttctcatcctgatctgtttgactgtgatagttaccctggtcatattggttgtagttgactcacggttaaaaaaacagagttcaaataagaacattctttctccccacacacccagccctgtctttctcatgggagccaacactcaggacaccaagaattcaagacatcagttctgcttggcacaagtatcgtggatcaaaaacagagtattgaagaagtggaagacacgcctaaaccaactctggtgacatttgctttaccttatacataaaatccttgtctgcatcttcttaaacaccgtccatgtcccataagggaagcatgcttttatttaaacagtttatactagcaaagatactgacccctttagggaatactttttccccatcttccagagattttttttttcctgctttggctacatatccatcattgtttatttttgaaactataatccagatacttctttttcatggattcccgagatcacccaattgatagctcttctgtactccccaaattgaactgatcttcacaagcacattcatctcttcctactctgaacagtagttatttaggtttttgctctttttttttttttaatctcagttgcttgaaagtaggatttaggtatttgtgtctgtattcatgaccaaaaatcttatctgaattcagggccagcttcataagcatgtgacctgtgcagacacatggaatcgtatgctctgcaagaacccatgctagatttaatgctctgctgttgtcatcttggaatccttagtcattttcaaacaagagatattgtattttcatttttcactgaccccacaaattatatagctgattcagtgtgaatgtaatatttctcaataaatgctgactgaaataaatttgttgttagatcaag

SEQ ID NO: 51829 - DNA, 1759 bp, Homo sapiens
gaaaatctggagccagacagtgagagaggcagaggggaaatgaaaaaccccgtgggaggctgcagcaaagcgaggcagtgtggcttctctgacagggaagtcagcagagggagaggtttgtctgtctgtacagcaagggaagtcagacgagagtgcaagagggtgtggagaggggtactgatatctgaattattagggcaggtgtcctgccaaggaatccctcctttaacagagcttcaatgctgctcctgttcctcctcttcgagggtctctgctgtcctggggaaaatacagcagctccccaggctctacaatcctatcatctagcagcagaggagcagctgtccttccgcatgctccaaacttcctcctttgccaaccacagctgggcacacagtgagggctcaggatggctgggtgacctgcagactcatggctgggacactgtcttgggcaccatccgctttctgaagccctggtcccatggaaacttcagcaagcaggagctgaaaaacttacagtcactgttccagttatacttccatagttttatccggatagtgcaagcttctgctggtcaatttcagcttgaattgaagccagaggcctggctgtcctgtggccccagtcctggccctggccgtctgcagcttgtgtgccatgtctcaggattctacccaaagcccgtgtgggtgatgtggatgcggggtgagcaggagcagcggggcactcagcgaggggacgtcctgcctaatgctgacgagacatggtatctccgagcaaccctggatgtggcggctggggaggcagctggcctgtcctgtcgggtgaaacacagcagtctagggggccatgatctaatcatccattggggtggatattccatctttctcatcctgatctgtttgactgtgatagttaccctggtcatattggttgtagttgactcacggttaaaaaaacagagccctgtctttctcatgggagccaacactcaggacaccaagaattcaagacatcagttctgcttggcacaagtatcgtggatcaaaaacagagtattgaagaagtggaagacacgcctaaaccaactctggtgacatttgctttaccttatacataaaatccttgtctgcatcttcttaaacaccgtccatgtcccataagggaagcatgcttttatttaaacagtttatactagcaaagatactgacccctttagggaatactttttccccatcttccagagattttttttttcctgctttggctacatatccatcattgtttatttttgaaactataatccagatacttctttttcatggattcccgagatcacccaattgatagctcttctgtactccccaaattgaactgatcttcacaagcacattcatctcttcctactctgaacagtagttatttaggtttttgctctttttttttttttaatctcagttgcttgaaagtaggatttaggtatttgtgtctgtattcatgaccaaaaatcttatctgaattcagggccagcttcataagcatgtgacctgtgcagacacatggaatcgtatgctctgcaagaacccatgctagatttaatgctctgctgttgtcatcttggaatccttagtcattttcaaacaagagatattgtattttcatttttcactgaccccacaaattatatagctgattcagtgtgaatgtaatatttctcaataaatgctgactgaaataaatttgttgttagatcaag

SEQ ID NO: 51830 - DNA, 1594 bp, Homo sapiens
gaaaatctggagccagacagtgagagaggcagaggggaaatgaaaaaccccgtgggaggctgcagcaaagcgaggcagtgtggcttctctgacagggaagtcagcagagggagaggtttgtctgtctgtacagcaagggaagtcagacgagagtgcaagagggtgtggagaggggtactgatatctgaattattagggcaggtgtcctgccaaggaatccctcctttaacagagcttcaatgctgctcctgttcctcctcttcgagggtctctgctgtcctggggaaaatacagcagctccccaggctctacaatcctatcatctagcagcagaggagcagctgtccttccgcatgctccaaacttcctcctttgccaaccacagctgggcacacagtgagggctcaggatggctgggtgacctgcagactcatggctgggacactgtcttgggcaccatccgctttctgaagccctggtcccatggaaacttcagcaagcaggagctgaaaaacttacagtcactgttccagttatacttccatagttttatccggatagtgcaagcttctgctggtcaatttcagcttgaattgaagccagaggcctggctgtcctgtggccccagtcctggccctggccgtctgcagcttgtgtgccatgtctcaggattctacccaaagcccgtgtgggtgatgtggatgcggggtggatattccatctttctcatcctgatctgtttgactgtgatagttaccctggtcatattggttgtagttgactcacggttaaaaaaacagagccctgtctttctcatgggagccaacactcaggacaccaagaattcaagacatcagttctgcttggcacaagtatcgtggatcaaaaacagagtattgaagaagtggaagacacgcctaaaccaactctggtgacatttgctttaccttatacataaaatccttgtctgcatcttcttaaacaccgtccatgtcccataagggaagcatgcttttatttaaacagtttatactagcaaagatactgacccctttagggaatactttttccccatcttccagagattttttttttcctgctttggctacatatccatcattgtttatttttgaaactataatccagatacttctttttcatggattcccgagatcacccaattgatagctcttctgtactccccaaattgaactgatcttcacaagcacattcatctcttcctactctgaacagtagttatttaggtttttgctctttttttttttttaatctcagttgcttgaaagtaggatttaggtatttgtgtctgtattcatgaccaaaaatcttatctgaattcagggccagcttcataagcatgtgacctgtgcagacacatggaatcgtatgctctgcaagaacccatgctagatttaatgctctgctgttgtcatcttggaatccttagtcattttcaaacaagagatattgtattttcatttttcactgaccccacaaattatatagctgattcagtgtgaatgtaatatttctcaataaatgctgactgaaataaatttgttgttagatcaag

SEQ ID NO: 51831 - DNA, 1394 bp, Homo sapiens
gaaaatctggagccagacagtgagagaggcagaggggaaatgaaaaaccccgtgggaggctgcagcaaagcgaggcagtgtggcttctctgacagggaagtcagcagagggagaggtttgtctgtctgtacagcaagggaagtcagacgagagtgcaagagggtgtggagaggggtactgatatctgaattattagggcaggtgtcctgccaaggaatccctcctttaacagagcttcaatgctgctcctgttcctcctcttcgagggtctctgctgtcctggggaaaatacagcagtgaagccagaggcctggctgtcctgtggccccagtcctggccctggccgtctgcagcttgtgtgccatgtctcaggattctacccaaagcccgtgtgggtgatgtggatgcggggtgagcaggagcagcggggcactcagcgaggggacgtcctgcctaatgctgacgagacatggtggatattccatctttctcatcctgatctgtttgactgtgatagttaccctggtcatattggttgtagttgactcacggttaaaaaaacagagttcaaataagaacattctttctccccacacacccagccctgtctttctcatgggagccaacactcaggacaccaagaattcaagacatcagttctgcttggcacaagtatcgtggatcaaaaacagagtattgaagaagtggaagacacgcctaaaccaactctggtgacatttgctttaccttatacataaaatccttgtctgcatcttcttaaacaccgtccatgtcccataagggaagcatgcttttatttaaacagtttatactagcaaagatactgacccctttagggaatactttttccccatcttccagagattttttttttcctgctttggctacatatccatcattgtttatttttgaaactataatccagatacttctttttcatggattcccgagatcacccaattgatagctcttctgtactccccaaattgaactgatcttcacaagcacattcatctcttcctactctgaacagtagttatttaggtttttgctctttttttttttttaatctcagttgcttgaaagtaggatttaggtatttgtgtctgtattcatgaccaaaaatcttatctgaattcagggccagcttcataagcatgtgacctgtgcagacacatggaatcgtatgctctgcaagaacccatgctagatttaatgctctgctgttgtcatcttggaatccttagtcattttcaaacaagagatattgtattttcatttttcactgaccccacaaattatatagctgattcagtgtgaatgtaatatttctcaataaatgctgactgaaataaatttgttgttagatcaag

SEQ ID NO: 51832 - DNA, 1498 bp, Homo sapiens
gaaaatctggagccagacagtgagagaggcagaggggaaatgaaaaaccccgtgggaggctgcagcaaagcgaggcagtgtggcttctctgacagggaagtcagcagagggagaggtttgtctgtctgtacagcaagggaagtcagacgagagtgcaagagggtgtggagaggggtactgatatctgaattattagggcaggtgtcctgccaaggaatccctcctttaacagagcttcaatgctgctcctgttcctcctcttcgagggtctctgctgtcctggggaaaatacagcagtgaagccagaggcctggctgtcctgtggccccagtcctggccctggccgtctgcagcttgtgtgccatgtctcaggattctacccaaagcccgtgtgggtgatgtggatgcggggtgagcaggagcagcggggcactcagcgaggggacgtcctgcctaatgctgacgagacatggtatctccgagcaaccctggatgtggcggctggggaggcagctggcctgtcctgtcgggtgaaacacagcagtctagggggccatgatctaatcatccattggggtggatattccatctttctcatcctgatctgtttgactgtgatagttaccctggtcatattggttgtagttgactcacggttaaaaaaacagagttcaaataagaacattctttctccccacacacccagccctgtctttctcatgggagccaacactcaggacaccaagaattcaagacatcagttctgcttggcacaagtatcgtggatcaaaaacagagtattgaagaagtggaagacacgcctaaaccaactctggtgacatttgctttaccttatacataaaatccttgtctgcatcttcttaaacaccgtccatgtcccataagggaagcatgcttttatttaaacagtttatactagcaaagatactgacccctttagggaatactttttccccatcttccagagattttttttttcctgctttggctacatatccatcattgtttatttttgaaactataatccagatacttctttttcatggattcccgagatcacccaattgatagctcttctgtactccccaaattgaactgatcttcacaagcacattcatctcttcctactctgaacagtagttatttaggtttttgctctttttttttttttaatctcagttgcttgaaagtaggatttaggtatttgtgtctgtattcatgaccaaaaatcttatctgaattcagggccagcttcataagcatgtgacctgtgcagacacatggaatcgtatgctctgcaagaacccatgctagatttaatgctctgctgttgtcatcttggaatccttagtcattttcaaacaagagatattgtattttcatttttcactgaccccacaaattatatagctgattcagtgtgaatgtaatatttctcaataaatgctgactgaaataaatttgttgttagatcaag

SEQ ID NO: 51833 - DNA, 1333 bp, Homo sapiens
gaaaatctggagccagacagtgagagaggcagaggggaaatgaaaaaccccgtgggaggctgcagcaaagcgaggcagtgtggcttctctgacagggaagtcagcagagggagaggtttgtctgtctgtacagcaagggaagtcagacgagagtgcaagagggtgtggagaggggtactgatatctgaattattagggcaggtgtcctgccaaggaatccctcctttaacagagcttcaatgctgctcctgttcctcctcttcgagggtctctgctgtcctggggaaaatacagcagtgaagccagaggcctggctgtcctgtggccccagtcctggccctggccgtctgcagcttgtgtgccatgtctcaggattctacccaaagcccgtgtgggtgatgtggatgcggggtggatattccatctttctcatcctgatctgtttgactgtgatagttaccctggtcatattggttgtagttgactcacggttaaaaaaacagagttcaaataagaacattctttctccccacacacccagccctgtctttctcatgggagccaacactcaggacaccaagaattcaagacatcagttctgcttggcacaagtatcgtggatcaaaaacagagtattgaagaagtggaagacacgcctaaaccaactctggtgacatttgctttaccttatacataaaatccttgtctgcatcttcttaaacaccgtccatgtcccataagggaagcatgcttttatttaaacagtttatactagcaaagatactgacccctttagggaatactttttccccatcttccagagattttttttttcctgctttggctacatatccatcattgtttatttttgaaactataatccagatacttctttttcatggattcccgagatcacccaattgatagctcttctgtactccccaaattgaactgatcttcacaagcacattcatctcttcctactctgaacagtagttatttaggtttttgctctttttttttttttaatctcagttgcttgaaagtaggatttaggtatttgtgtctgtattcatgaccaaaaatcttatctgaattcagggccagcttcataagcatgtgacctgtgcagacacatggaatcgtatgctctgcaagaacccatgctagatttaatgctctgctgttgtcatcttggaatccttagtcattttcaaacaagagatattgtattttcatttttcactgaccccacaaattatatagctgattcagtgtgaatgtaatatttctcaataaatgctgactgaaataaatttgttgttagatcaag

SEQ ID NO: 51834 - DNA, 2035 bp, Homo sapiens
gaaaatctggagccagacagtgagagaggcagaggggaaatgaaaaaccccgtgggaggctgcagcaaagcgaggcagtgtggcttctctgacagggaagtcagcagagggagaggtttgtctgtctgtacagcaagggaagtcagacgagagtgcaagagggtgtggagaggggtactgatatctgaattattagggcaggtgtcctgccaaggaatccctcctttaacagagcttcaatgctgctcctgttcctcctcttcgagggtctctgctgtcctggggaaaatacagcagcagcagaggagcagctgtccttccgcatgctccaaacttcctcctttgccaaccacagctgggcacacagtgagggctcaggatggctgggtgacctgcagactcatggctgggacactgtcttgggcaccatccgctttctgaagccctggtcccatggaaacttcagcaagcaggagctgaaaaacttacagtcactgttccagttatacttccatagttttatccggatagtgcaagcttctgctggtcaatttcagcttgaataccccttcgagatccagatattagctggctgtagaatgaatgccccacaaatcttcttaaatatggcatatcaagggtcagatttcctgagtttccaaggaatttcctgggagccatctccaggagcagggatccgggcccagaacatctgtaaagtgctcaatcgctacctagatattaaggaaatactgcaaagccttcttggtcacacctgccctcgatttctagcggggctcatggaagcaggggagtcagaactgaaacggaaagtgaagccagaggcctggctgtcctgtggccccagtcctggccctggccgtctgcagcttgtgtgccatgtctcaggattctacccaaagcccgtgtgggtgatgtggatgcggggtgagcaggagcagcggggcactcagcgaggggacgtcctgcctaatgctgacgagacatggtatctccgagcaaccctggatgtggcggctggggaggcagctggcctgtcctgtcgggtgaaacacagcagtctagggggccatgatctaatcatccattggggtggatattccatctttctcatcctgatctgtttgactgtgatagttaccctggtcatattggttgtagttgactcacggttaaaaaaacagagttcaaataagaacattctttctccccacacacccagccctgtctttctcatgggagccaacactcaggacaccaagaattcaagacatcagttctgcttggcacaagtatcgtggatcaaaaacagagtattgaagaagtggaagacacgcctaaaccaactctggtgacatttgctttaccttatacataaaatccttgtctgcatcttcttaaacaccgtccatgtcccataagggaagcatgcttttatttaaacagtttatactagcaaagatactgacccctttagggaatactttttccccatcttccagagattttttttttcctgctttggctacatatccatcattgtttatttttgaaactataatccagatacttctttttcatggattcccgagatcacccaattgatagctcttctgtactccccaaattgaactgatcttcacaagcacattcatctcttcctactctgaacagtagttatttaggtttttgctctttttttttttttaatctcagttgcttgaaagtaggatttaggtatttgtgtctgtattcatgaccaaaaatcttatctgaattcagggccagcttcataagcatgtgacctgtgcagacacatggaatcgtatgctctgcaagaacccatgctagatttaatgctctgctgttgtcatcttggaatccttagtcattttcaaacaagagatattgtattttcatttttcactgaccccacaaattatatagctgattcagtgtgaatgtaatatttctcaataaatgctgactgaaataaatttgttgttagatcaag

SEQ ID NO: 51835 - DNA, 1935 bp, Homo sapiens
gaaaatctggagccagacagtgagagaggcagaggggaaatgaaaaaccccgtgggaggctgcagcaaagcgaggcagtgtggcttctctgacagggaagtcagcagagggagaggtttgtctgtctgtacagcaagggaagtcagacgagagtgcaagagggtgtggagaggggtactgatatctgaattattagggcaggtgtcctgccaaggaatccctcctttaacagagcttcaatgctgctcctgttcctcctcttcgagggtctctgctgtcctggggaaaatacagcagctccccaggctctacaatcctatcatctagcagcagaggagcagctgtccttccgcatgctccaaacttcctcctttgccaaccacagctgggcacacagtgagggctcaggatggctgggtgacctgcagactcatggctgggacactgtcttgggcaccatccgctttctgaagccctggtcccatggaaacttcagcaagcaggagctgaaaaacttacagtcactgttccagttatacttccatagttttatccggatagtgcaagcttctgctggtcaatttcagcttgaataccccttcgagatccagatattagctggctgtagaatgaatgccccacaaatcttcttaaatatggcatatcaagggtcagatttcctgagtttccaaggaatttcctgggagccatctccaggagcagggatccgggcccagaacatctgtaaagtgctcaatcgctacctagatattaaggaaatactgcaaagccttcttggtcacacctgccctcgatttctagcggggctcatggaagcaggggagtcagaactgaaacggaaagtgaagccagaggcctggctgtcctgtggccccagtcctggccctggccgtctgcagcttgtgtgccatgtctcaggattctacccaaagcccgtgtgggtgatgtggatgcggggtgagcaggagcagcggggcactcagcgaggggacgtcctgcctaatgctgacgagacatggtatctccgagcaaccctggatgtggcggctggggaggcagctggcctgtcctgtcgggtgaaacacagcagtctagggggccatgatctaatcatccattgggccctgtctttctcatgggagccaacactcaggacaccaagaattcaagacatcagttctgcttggcacaagtatcgtggatcaaaaacagagtattgaagaagtggaagacacgcctaaaccaactctggtgacatttgctttaccttatacataaaatccttgtctgcatcttcttaaacaccgtccatgtcccataagggaagcatgcttttatttaaacagtttatactagcaaagatactgacccctttagggaatactttttccccatcttccagagattttttttttcctgctttggctacatatccatcattgtttatttttgaaactataatccagatacttctttttcatggattcccgagatcacccaattgatagctcttctgtactccccaaattgaactgatcttcacaagcacattcatctcttcctactctgaacagtagttatttaggtttttgctctttttttttttttaatctcagttgcttgaaagtaggatttaggtatttgtgtctgtattcatgaccaaaaatcttatctgaattcagggccagcttcataagcatgtgacctgtgcagacacatggaatcgtatgctctgcaagaacccatgctagatttaatgctctgctgttgtcatcttggaatccttagtcattttcaaacaagagatattgtattttcatttttcactgaccccacaaattatatagctgattcagtgtgaatgtaatatttctcaataaatgctgactgaaataaatttgttgttagatcaag

SEQ ID NO: 51836 - DNA, 1686 bp, Homo sapiens
gaaaatctggagccagacagtgagagaggcagaggggaaatgaaaaaccccgtgggaggctgcagcaaagcgaggcagtgtggcttctctgacagggaagtcagcagagggagaggtttgtctgtctgtacagcaagggaagtcagacgagagtgcaagagggtgtggagaggggtactgatatctgaattattagggcaggtgtcctgccaaggaatccctcctttaacagagcttcaatgctgctcctgttcctcctcttcgagggtctctgctgtcctggggaaaatacagcagctccccaggctctacaatcctatcatctagcagcagaggagcagctgtccttccgcatgctccaaacttcctcctttgccaaccacagctgggcacacagtgagggctcaggatggctgggtgacctgcagactcatggctgggacactgtcttgggcaccatccgctttctgaagccctggtcccatggaaacttcagcaagcaggagctgaaaaacttacagtcactgttccagttatacttccatagttttatccggatagtgcaagcttctgctggtcaatttcagcttgaataccccttcgagatccagatattagctggctgtagaatgaatgccccacaaatcttcttaaatatggcatatcaagggtcagatttcctgagtttccaaggaatttcctgggagccatctccaggagcagggatccgggcccagaacatctgtaaagtgctcaatcgctacctagatattaaggaaatactgcaaagccttcttggtcacacctgccctcgatttctagcggggctcatggaagcaggggagtcagaactgaaacggaaagtgaagccagaggcctggctgtcctgtggccccagtcctggccctggccgtctgcagcttgtgtgccatgtctcaggattctacccaaagcccgtgtgggtgatgtggatgcggggtgagcaggagcagcggggcactcagcgaggggacgtcctgcctaatgctgacgagacatggtatctccgagcaaccctggatgtggcggctggggaggcagctggcctgtcctgtcgggtgaaacacagcagtctagggggccatgatctaatcatccattggggtgagaaacagctgaggctctgctgggaaataatgaaaatagccctggggcttttgagtgtggggctgaggaaatgggtaggaatgctaggtacaagaagggtaaaactgggacaatcaaaataaagaaggatagagtatgacagtagttaaattttaagaaaatggaagtagagaattagacatactaacagaaaaaggaggaggaactagtgatttagtgggagagggttgggaggagatcacagacaaaggatcaggaggaattgaaatgagggctttggaaaacccagatgaaaattctaggaaggtcccacccttgtgaaatgggaaatctcagcttggtggaatagagtattttagggttggtattcttattctatccccaaccaggtggatattccatctttctcatcctgatctgtttgactgtgatagttaccctggtcatattggttgtagttgactcacggttaaaaaaacagaggtgagctttttcttgttctttgtttcttcagcctgtaatcaattcattcctttttcc

SEQ ID NO: 51837 - DNA, 1178 bp, Homo sapiens
gaaaatctggagccagacagtgagagaggcagaggggaaatgaaaaaccccgtgggaggctgcagcaaagcgaggcagtgtggcttctctgacagggaagtcagcagagggagaggtttgtctgtctgtacagcaagggaagtcagacgagagtgcaagagggtgtggagaggggtactgatatctgaattattagggcaggtgtcctgccaaggaatccctcctttaacagagcttcaatgctgctcctgttcctcctcttcgagggtctctgctgtcctggggaaaatacagcagctccccaggctctacaatcctatcatctagcagcagaggagcagctgtccttccgcatgctccaaacttcctcctttgccaaccacagctgggcacacagtgagggctcaggatggctgggtgacctgcagactcatggctgggacactgtcttgggcaccatccgctttctgaagccctggtcccatggaaacttcagcaagcaggagctgaaaaacttacagtcactgttccagttatacttccatagttttatccggatagtgcaagcttctgctggtcaatttcagcttgaatgtaagttcgttgctctaagctgataatttgcctgggaacaccaactattttccaaagtggaagatagtatatagactctgaccatcatttaaccttactaaccttgttccccactctctgactcccactccctcctctgcttcacccttcaccaccacccacactccaccatatacacaaaagggcctgcatgtacatatctcaacatgaatatagcttcatgtctggctctttggaatgattgtctcctctggatcttctgcccctcattcctgccctcagactcagcctttctcaaccctctttctgcccttctttatcctttgcctgagtgttgacatggactggcctgtacctaaccactttcacgtgaattatttatgaccaatctcctatcttcctgatagccttcccatctaccactttcccattagttatttcaaagtatctttattatcttcaaattttcttcccctttgccagtaaactctagtctccatatgatttcccagcaaatttttcttcccttgaatctctttactgtctaaattgtttgtttttcttccttgtcattctttccataa

SEQ ID NO: 51838 - DNA, 1462 bp, Homo sapiens
gaaaatctggagccagacagtgagagaggcagaggggaaatgaaaaaccccgtgggaggctgcagcaaagcgaggcagtgtggcttctctgacagggaagtcagcagagggagaggtttgtctgtctgtacagcaagggaagtcagacgagagtgcaagagggtgtggagaggggtactgatatctgaattattagggcaggtgtcctgccaaggaatccctcctttaacagagcttcaatgctgctcctgttcctcctcttcgagggtctctgctgtcctggggaaaatacagcagtgaagccagaggcctggctgtcctgtggccccagtcctggccctggccgtctgcagcttgtgtgccatgtctcaggattctacccaaagcccgtgtgggtgatgtggatgcggggtgagcaggagcagcggggcactcagcgaggggacgtcctgcctaatgctgacgagacatggtatctccgagcaaccctggatgtggcggctggggaggcagctggcctgtcctgtcgggtgaaacacagcagtctagggggccatgatctaatcatccattggggtggatattccatctttctcatcctgatctgtttgactgtgatagttaccctggtcatattggttgtagttgactcacggttaaaaaaacagagccctgtctttctcatgggagccaacactcaggacaccaagaattcaagacatcagttctgcttggcacaagtatcgtggatcaaaaacagagtattgaagaagtggaagacacgcctaaaccaactctggtgacatttgctttaccttatacataaaatccttgtctgcatcttcttaaacaccgtccatgtcccataagggaagcatgcttttatttaaacagtttatactagcaaagatactgacccctttagggaatactttttccccatcttccagagattttttttttcctgctttggctacatatccatcattgtttatttttgaaactataatccagatacttctttttcatggattcccgagatcacccaattgatagctcttctgtactccccaaattgaactgatcttcacaagcacattcatctcttcctactctgaacagtagttatttaggtttttgctctttttttttttttaatctcagttgcttgaaagtaggatttaggtatttgtgtctgtattcatgaccaaaaatcttatctgaattcagggccagcttcataagcatgtgacctgtgcagacacatggaatcgtatgctctgcaagaacccatgctagatttaatgctctgctgttgtcatcttggaatccttagtcattttcaaacaagagatattgtattttcatttttcactgaccccacaaattatatagctgattcagtgtgaatgtaatatttctcaataaatgctgactgaaataaatttgttgttagatcaag

SEQ ID NO: 51839 - DNA, 1297 bp, Homo sapiens
gaaaatctggagccagacagtgagagaggcagaggggaaatgaaaaaccccgtgggaggctgcagcaaagcgaggcagtgtggcttctctgacagggaagtcagcagagggagaggtttgtctgtctgtacagcaagggaagtcagacgagagtgcaagagggtgtggagaggggtactgatatctgaattattagggcaggtgtcctgccaaggaatccctcctttaacagagcttcaatgctgctcctgttcctcctcttcgagggtctctgctgtcctggggaaaatacagcagtgaagccagaggcctggctgtcctgtggccccagtcctggccctggccgtctgcagcttgtgtgccatgtctcaggattctacccaaagcccgtgtgggtgatgtggatgcggggtggatattccatctttctcatcctgatctgtttgactgtgatagttaccctggtcatattggttgtagttgactcacggttaaaaaaacagagccctgtctttctcatgggagccaacactcaggacaccaagaattcaagacatcagttctgcttggcacaagtatcgtggatcaaaaacagagtattgaagaagtggaagacacgcctaaaccaactctggtgacatttgctttaccttatacataaaatccttgtctgcatcttcttaaacaccgtccatgtcccataagggaagcatgcttttatttaaacagtttatactagcaaagatactgacccctttagggaatactttttccccatcttccagagattttttttttcctgctttggctacatatccatcattgtttatttttgaaactataatccagatacttctttttcatggattcccgagatcacccaattgatagctcttctgtactccccaaattgaactgatcttcacaagcacattcatctcttcctactctgaacagtagttatttaggtttttgctctttttttttttttaatctcagttgcttgaaagtaggatttaggtatttgtgtctgtattcatgaccaaaaatcttatctgaattcagggccagcttcataagcatgtgacctgtgcagacacatggaatcgtatgctctgcaagaacccatgctagatttaatgctctgctgttgtcatcttggaatccttagtcattttcaaacaagagatattgtattttcatttttcactgaccccacaaattatatagctgattcagtgtgaatgtaatatttctcaataaatgctgactgaaataaatttgttgttagatcaag

SEQ ID NO: 51840 - DNA, 2457 bp, Homo sapiens
gaaaatctggagccagacagtgagagaggcagaggggaaatgaaaaaccccgtgggaggctgcagcaaagcgaggcagtgtggcttctctgacagggaagtcagcagagggagaggtttgtctgtctgtacagcaagggaagtcagacgagagtgcaagagggtgtggagaggggtactgatatctgaattattagggcaggtgtcctgccaaggaatccctcctttaacagagcttcaatgctgctcctgttcctcctcttcgagggtctctgctgtcctggggaaaatacagcagctccccaggctctacaatcctatcatctagcagcagaggagcagctgtccttccgcatgctccaaacttcctcctttgccaaccacagctgggcacacagtgagggctcaggatggctgggtgacctgcagactcatggctgggacactgtcttgggcaccatccgctttctgaagccctggtcccatggaaacttcagcaagcaggagctgaaaaacttacagtcactgttccagttatacttccatagttttatccggatagtgcaagcttctgctggtcaatttcagcttgaataccccttcgagatccagatattagctggctgtagaatgaatgccccacaaatcttcttaaatatggcatatcaagggtcagatttcctgagtttccaaggaatttcctgggagccatctccaggagcagggatccgggcccagaacatctgtaaagtgctcaatcgctacctagatattaaggaaatactgcaaagccttcttggtcacacctgccctcgatttctagcggggctcatggaagcaggggagtcagaactgaaacggaaagtgaagccagaggcctggctgtcctgtggccccagtcctggccctggccgtctgcagcttgtgtgccatgtctcaggattctacccaaagcccgtgtgggtgatgtggatgcggggtgagcaggagcagcggggcactcagcgaggggacgtcctgcctaatgctgacgagacatggtatctccgagcaaccctggatgtggcggctggggaggcagctggcctgtcctgtcgggtgaaacacagcagtctagggggccatgatctaatcatccattggggtgagaaacagctgaggctctgctgggaaataatgaaaatagccctggggcttttgagtgtggggctgaggaaatgggtaggaatgctaggtacaagaagggtaaaactgggacaatcaaaataaagaaggatagagtatgacagtagttaaattttaagaaaatggaagtagagaattagacatactaacagaaaaaggaggaggaactagtgatttagtgggagagggttgggaggagatcacagacaaaggatcaggaggaattgaaatgagggctttggaaaacccagatgaaaattctaggaaggtcccacccttgtgaaatgggaaatctcagcttggtggaatagagtattttagggttggtattcttattctatccccaaccaggtggatattccatctttctcatcctgatctgtttgactgtgatagttaccctggtcatattggttgtagttgactcacggttaaaaaaacagagttcaaataagaacattctttctccccacacacccagccctgtctttctcatgggagccaacactcaggacaccaagaattcaagacatcagttctgcttggcacaagtatcgtggatcaaaaacagagtattgaagaagtggaagacacgcctaaaccaactctggtgacatttgctttaccttatacataaaatccttgtctgcatcttcttaaacaccgtccatgtcccataagggaagcatgcttttatttaaacagtttatactagcaaagatactgacccctttagggaatactttttccccatcttccagagattttttttttcctgctttggctacatatccatcattgtttatttttgaaactataatccagatacttctttttcatggattcccgagatcacccaattgatagctcttctgtactccccaaattgaactgatcttcacaagcacattcatctcttcctactctgaacagtagttatttaggtttttgctctttttttttttttaatctcagttgcttgaaagtaggatttaggtatttgtgtctgtattcatgaccaaaaatcttatctgaattcagggccagcttcataagcatgtgacctgtgcagacacatggaatcgtatgctctgcaagaacccatgctagatttaatgctctgctgttgtcatcttggaatccttagtcattttcaaacaagagatattgtattttcatttttcactgaccccacaaattatatagctgattcagtgtgaatgtaatatttctcaataaatgctgactgaaataaatttgttgttagatcaag

SEQ ID NO: 51841 - DNA, 1664 bp, Homo sapiens
gaaaatctggagccagacagtgagagaggcagaggggaaatgaaaaaccccgtgggaggctgcagcaaagcgaggcagtgtggcttctctgacagggaagtcagcagagggagaggtttgtctgtctgtacagcaagggaagtcagacgagagtgcaagagggtgtggagaggggtactgatatctgaattattagggcaggtgtcctgccaaggaatccctcctttaacagagcttcaatgctgctcctgttcctcctcttcgagggtctctgctgtcctggggaaaatacagcagaccccttcgagatccagatattagctggctgtagaatgaatgccccacaaatcttcttaaatatggcatatcaagggtcagatttcctgagtttccaaggaatttcctgggagccatctccaggagcagggatccgggcccagaacatctgtaaagtgctcaatcgctacctagatattaaggaaatactgcaaagccttcttggtcacacctgccctcgatttctagcggggctcatggaagcaggggagtcagaactgaaacggaaagtgaagccagaggcctggctgtcctgtggccccagtcctggccctggccgtctgcagcttgtgtgccatgtctcaggattctacccaaagcccgtgtgggtgatgtggatgcggggtgagcaggagcagcggggcactcagcgaggggacgtcctgcctaatgctgacgagacatggtggatattccatctttctcatcctgatctgtttgactgtgatagttaccctggtcatattggttgtagttgactcacggttaaaaaaacagagttcaaataagaacattctttctccccacacacccagccctgtctttctcatgggagccaacactcaggacaccaagaattcaagacatcagttctgcttggcacaagtatcgtggatcaaaaacagagtattgaagaagtggaagacacgcctaaaccaactctggtgacatttgctttaccttatacataaaatccttgtctgcatcttcttaaacaccgtccatgtcccataagggaagcatgcttttatttaaacagtttatactagcaaagatactgacccctttagggaatactttttccccatcttccagagattttttttttcctgctttggctacatatccatcattgtttatttttgaaactataatccagatacttctttttcatggattcccgagatcacccaattgatagctcttctgtactccccaaattgaactgatcttcacaagcacattcatctcttcctactctgaacagtagttatttaggtttttgctctttttttttttttaatctcagttgcttgaaagtaggatttaggtatttgtgtctgtattcatgaccaaaaatcttatctgaattcagggccagcttcataagcatgtgacctgtgcagacacatggaatcgtatgctctgcaagaacccatgctagatttaatgctctgctgttgtcatcttggaatccttagtcattttcaaacaagagatattgtattttcatttttcactgaccccacaaattatatagctgattcagtgtgaatgtaatatttctcaataaatgctgactgaaataaatttgttgttagatcaag

SEQ ID NO: 51842 - DNA, 1212 bp, Homo sapiens
  misc_feature (1131)..(1131): n is a, c, g, or t
tttccggcgctggctcctctccgtcagtgcggtttcgcctttatggtggtggagtctgcccaggctgtggaccgcaaataaccctgtacaaagaggaatggagattgcctctatccacctagattcataagctggcctgaggtgatcttggcatcaaggaagggatgcacatcatcacaccatcagcttcagagaatggcagccatttatttgtcccgtgggtttttttccagggaaccaatctgcccttttgaagaaaagacaaaggtagaaaggatggtggaggactacctggcaagtggttatcaggattcagtgacgtttgatgatgtggctgtggacttcaccccagaggagtgggctttactggacacaactgagaaatacctctacagagatgtgatgctggagaactacatgaacctggcctctgtggaatgggaaatacaacctagaaccaaacggtcatcacttcagcagggttttttgaagaatcaaatattcagtgggatacaaatgacaagaggctacagtggatggaaactctgtgactgtaagaattgtggagaggtcttcagggaacagttttgccttaagacacacatgagagttcagaatggagggaatacttctgagggtaattgttatggaaaagacaccctcagtgtgcacaaggaagcctctactggacaggaactttccaaatttaatccatgtggaaaagtctttactctaactccaggtcttgctgtacatcttgaagttctcaatgcaagacaaccctacaaatgtaaggaatgtggaaaaggctttaagtattttgcaagccttgataatcatatgggaatccacactgatgagaaactctgtgaatttcaggaatatgggagagctgtcacagcttcttcacacctaaagcagtgtgtagcagttcatacaggaaagaaatccaaaaagactaagaaatgtgggaaatccttcactaatttttctcaactttatgcacctgtgaaaactcataaaggagagaagtcctttgaatgtaaagaatgtggaagatcctttagaaattcctcatgccttaatgatcacattcaaattcacactggaataaaaccacacaagtgtacntactgtgggaaagccttcactagatcaactcaacttactgaacatgtaagaactcacactggaataaaaccctatgaatgt

SEQ ID NO: 51843 - DNA, 660 bp, Homo sapiens
ctttcatccaataggtagacagatttctttctagacagactcatcttcagagttttcttagagcaaatgaagccttactcaaggactgagtccccagatgaatttccccagggaatgaagtctcctatacataaaatgttaacttgaaaatcagtccagtagctcagtaattactacttaagcttgaccttcatggtgccaactgcatctttcttacattgctgggtgcggtgacggatgataaagcagatgaaagtgtccttttatcaaatcattcacttatcagcatttatcaggtatctgcagtgtgctgaggagtgtgctgcatagacaccaatgggacaggaagagctcctagcctggttgtgctgagatcaagcgtaagcagtgtgcagtggctcatgcctgtaattccagctactcaggagacagaggtgagaggaccacttcagcccaggagatcgaagctgtagtaatcagcagttgtgcctgggtgacacagttggaccctgtttttatatataaataaataaacagattagatagatgatagatagaggaaaattcatctttaggaagtactgttctaatcaaaataaaaataaaatttaaaatttaaaaatacaaatattaaaaaattaaaaatagatcagcaaaaaa

SEQ ID NO: 51844 - DNA, 1458 bp, Homo sapiens
  misc_feature (1377)..(1377): n is a, c, g, or t
tttccggcgctggctcctctccgtcagtgcggtttcgcctttatggtggtggagtctgcccaggctgtggtgagttccacctccttggcggtcccggggatagcagggggcggcaaaggaatgattgcgcgctgtcgcctaggagcctctcagatccgcttcacttcactcgcttctccagggactatcagtcctccctgtgcgtccagttcggagaggctgcgcgctctctcggctcactgcaacctctgcaacctctgcctccagggtcaagcagttctcctgcctcagccttccgagtacctgggattacaggaccgcaaataaccctgtacaaagaggaatggagattgcctctatccacctagattcataagctggcctgaggtgatcttggcatcaaggaagggatgcacatcatcacaccatcagcttcagagaatggcagccatttatttgtcccgtgggtttttttccagggaaccaatctgcccttttgaagaaaagacaaaggtagaaaggatggtggaggactacctggcaagtggttatcaggattcagtgacgtttgatgatgtggctgtggacttcaccccagaggagtgggctttactggacacaactgagaaatacctctacagagatgtgatgctggagaactacatgaacctggcctctgtggaatgggaaatacaacctagaaccaaacggtcatcacttcagcagggttttttgaagaatcaaatattcagtgggatacaaatgacaagaggctacagtggatggaaactctgtgactgtaagaattgtggagaggtcttcagggaacagttttgccttaagacacacatgagagttcagaatggagggaatacttctgagggtaattgttatggaaaagacaccctcagtgtgcacaaggaagcctctactggacaggaactttccaaatttaatccatgtggaaaagtctttactctaactccaggtcttgctgtacatcttgaagttctcaatgcaagacaaccctacaaatgtaaggaatgtggaaaaggctttaagtattttgcaagccttgataatcatatgggaatccacactgatgagaaactctgtgaatttcaggaatatgggagagctgtcacagcttcttcacacctaaagcagtgtgtagcagttcatacaggaaagaaatccaaaaagactaagaaatgtgggaaatccttcactaatttttctcaactttatgcacctgtgaaaactcataaaggagagaagtcctttgaatgtaaagaatgtggaagatcctttagaaattcctcatgccttaatgatcacattcaaattcacactggaataaaaccacacaagtgtacntactgtgggaaagccttcactagatcaactcaacttactgaacatgtaagaactcacactggaataaaaccctatgaatgt

SEQ ID NO: 51845 - DNA, 907 bp, Homo sapiens
  misc_feature (826)..(826): n is a, c, g, or t
ccactcctctggggagaggtatttctcagttgtgtccagtaaagcccactcctctggggtgaagtccacaactgagaaatacctctacagagatgtgatgctggagaactacatgaacctggcctctgtggaatgggaaatacaacctagaaccaaacggtcatcacttcagcagggttttttgaagaatcaaatattcagtgggatacaaatgacaagaggctacagtggatggaaactctgtgactgtaagaattgtggagaggtcttcagggaacagttttgccttaagacacacatgagagttcagaatggagggaatacttctgagggtaattgttatggaaaagacaccctcagtgtgcacaaggaagcctctactggacaggaactttccaaatttaatccatgtggaaaagtctttactctaactccaggtcttgctgtacatcttgaagttctcaatgcaagacaaccctacaaatgtaaggaatgtggaaaaggctttaagtattttgcaagccttgataatcatatgggaatccacactgatgagaaactctgtgaatttcaggaatatgggagagctgtcacagcttcttcacacctaaagcagtgtgtagcagttcatacaggaaagaaatccaaaaagactaagaaatgtgggaaatccttcactaatttttctcaactttatgcacctgtgaaaactcataaaggagagaagtcctttgaatgtaaagaatgtggaagatcctttagaaattcctcatgccttaatgatcacattcaaattcacactggaataaaaccacacaagtgtacntactgtgggaaagccttcactagatcaactcaacttactgaacatgtaagaactcacactggaataaaaccctatgaatgt

SEQ ID NO: 51846 - DNA, 1398 bp, Homo sapiens
  misc_feature (1317)..(1317): n is a, c, g, or t
tttccggcgctggctcctctccgtcagtgcggtttcgcctttatggtggtggagtctgcccaggctgtgggtcaagcagttctcctgcctcagccttccgagtacctgggattacaggaccgcaaataaccctgtacaaagaggaatggagattgcctctatccacctagattcataagctggcctgaggtgatcttggcatcaaggaagggatgcacatcatcacaccatcagcttcagagaatggcagccatttatttgtcccgtgggtttttttccagggaaccaatctgcccttttgaagaaaagacaaaggtagaaaggatggtggaggactacctggcaagtggttatcaggtatctgcagtgtgctgaggagtgtgctgcatagacaccaatgggacaggaagagctcctagcctggttgtgctgagatcaagcgtaagcagtgtgcagtggctcatgcctgtaattccagctactcaggagacagaggattcagtgacgtttgatgatgtggctgtggacttcaccccagaggagtgggctttactggacacaactgagaaatacctctacagagatgtgatgctggagaactacatgaacctggcctctgtggaatgggaaatacaacctagaaccaaacggtcatcacttcagcagggttttttgaagaatcaaatattcagtgggatacaaatgacaagaggctacagtggatggaaactctgtgactgtaagaattgtggagaggtcttcagggaacagttttgccttaagacacacatgagagttcagaatggagggaatacttctgagggtaattgttatggaaaagacaccctcagtgtgcacaaggaagcctctactggacaggaactttccaaatttaatccatgtggaaaagtctttactctaactccaggtcttgctgtacatcttgaagttctcaatgcaagacaaccctacaaatgtaaggaatgtggaaaaggctttaagtattttgcaagccttgataatcatatgggaatccacactgatgagaaactctgtgaatttcaggaatatgggagagctgtcacagcttcttcacacctaaagcagtgtgtagcagttcatacaggaaagaaatccaaaaagactaagaaatgtgggaaatccttcactaatttttctcaactttatgcacctgtgaaaactcataaaggagagaagtcctttgaatgtaaagaatgtggaagatcctttagaaattcctcatgccttaatgatcacattcaaattcacactggaataaaaccacacaagtgtacntactgtgggaaagccttcactagatcaactcaacttactgaacatgtaagaactcacactggaataaaaccctatgaatgt

SEQ ID NO: 51847 - DNA, 429 bp, Homo sapiens
atagatcagcaaaaaaagatttaaaaaaattttaaaaagtgctgtttaaggcatatgcctgtaggaggtcaaccttgagtgtttagacacaagagctcctgagacattaaaccctggagtagatcatgggagacctgacaaccacgtgtaagtgagtataaggttccccttcatcattctccagtgaatattggtggaagtgttcattggctcaaaccagcatgtgtatgatgacataggattcagtgacgtttgatgatgtggctgtggacttcaccccagaggagtgggctttactggacacaactgagaaatacctctacagagatgtgatgctggagaactacatgaacctggcctctgtgggtaagagtaacatcactatgcttggcatggtggcctgcacctgtagtcccagatacttgggag

SEQ ID NO: 51848 - DNA, 334 bp, Homo sapiens
  misc_feature (1)..(3): n is a, c, g, or t
  misc_feature (188)..(188): n is a, c, g, or t
  misc_feature (329)..(329): n is a, c, g, or t
nnnatccatgtagaggaggagaacagtgcataaaacatagtaagcactcaataactgttacttgatattactacttcatcagagtaaataaaaataagacaccaggaatgaaagatttaatccaaccttctttcaaaaccaaaggcaaactgttcattagccaaaccccaccattccttgtttaaatnattgcgatcacctcctacctagccttgtagccagcagtctctcccattcatctactgtcatcagtcagatttattttcctaaaaataatattaacatttctagttcaggatatgatgaactaacttcctgctgcaaaaaanaaaaa

SEQ ID NO: 51849 - DNA, 360 bp, Homo sapiens
gtcatcaatgtctctcatacagaaaactcaattgttgatttgcttgccaaacaaacaaagtataaaataattaacagtggtcttgcaattaaatagtaatttagcctcagctttaatgtttcaattaaaacttaataagcatgcacgagatgtatttgcagtgtatgctgagtagtgataaaaaacacttgttttgcccacttttgcaaactggtagatagaacatatttgtttacttgtaacatgataattcctcgaggtgtgaacactggggtatggaagaggtgaagagacaaacattataacaggtattctgcagaagtgtcaagagatgcagaatgttgcaacacaaacaaaaga

SEQ ID NO: 51850 - DNA, 2070 bp, Homo sapiens
  misc_feature (1113)..(1113): n is a, c, g, or t
  misc_feature (1222)..(1222): n is a, c, g, or t
  misc_feature (1615)..(1615): n is a, c, g, or t
ggtaagctaaccgaggagggactttagtgggaacacatgacatataatgcgagactttacagaagaagttcagaaaagtcactaaataaatagcaactactaacacaagcaggagtaacaccaaaccctggcagcatggatctgattttcagaattgctacattatattatttaaaatattcaatttttaacaaacatttatgaaagatgcaaggaaacaaagtatggcccaaacacgtggttgggggagaaataagcagaaattgtccctgagaaggaccagatgttagacttactagacaaagatttttttattttttataggtggggtcttgcgaagttacccagggtggtcttgaactcctggcctcagcctcaacctcagtctcagcctcccaaagtgctgggattataggcacgagcgaccatgcctggcctagagaaggatttaattcagctatttaaaatatgttcaaagagataagagaaacgattcagttctgtagactagagaactaaaggaaagtatgaaagcaatgtctcatcaaatagagaatatcaataaagagatagaaaccataaaaaggagtcaaatagaaattctagagttgaaaagtatggtaactgaaatggaaaaattattagaggttctcaatggcacattacagcaggctgaagacagaatggggaacttgaaggttaattgagattgttgactctgaggaacagaaataaaaatgaatgaaagtgaatggaatctcagagacctgtttgtggaacacatcatcaagcttactaacatacacataatgagcgtcccaggagaagaaaaacagaaaaaaggagaaagaatatttgaagaaatgatggccccaaacttcccaaacatgatgaaaaacaatctgcatattcaagaagctcaaggaactacaagtaggaaaaactgagggatccacatctaaacatactgtaatcaaactgacagaagccaaagacagaatatcttgaaagcagcaagagaaaagcaactcatcacatacaagggatcctcaataagattaatagctaatttctcttcaaaaacaatgcaggtgctggacatggttgctcacncctgtactcccagtaccttgggaggcttgaggctcaagaattgcttgaagccaggagttggataccagcactggcaatagagtaaaaccctgtctctacaaaaaatttnaaaataactgggcatgcccgtctgggatgtgaggagcgcctctgcccggccgcgaccctgtctgggaggtgaggagcatctctgcctggccgccccgtctgagaagtgaggagcccctacgcctggcagccgccccatctgagaagtgaggagcccctccgcccagcagccgccccgtctgagaagtgaggagcccctctgcccggcagccgccctgtctgggagggaggtgggggccagcccccgcctggccagccgccccctccgggaggtgggggggcgcctctgcccggctgccccttctgggaagtgaggagcccctctgcccggccgccaccccgtctgggaggtgtacccaacagctcattgagaacgggccatgatgacgatggnggttttgttgaatagaaaagggggaaatgtggggaaaagatacagaaatcagattgttgctgtgtctgtgtagaaagaagtagacatagaagactccattttgttctgtactaagaaaaattcttctgccttgggatgctgttgatctatgaccttacccccaacccagtgctctctgaaacatgtgctgtgtccactcagggttgaatggattaagggcggtgcaagatgtgctttgttaaacagatgcttgaaagcagcatgctcgttaagagtcatcaccactccctaatctcaagtacccagggacacaaacactgtggaaggccgcagggtcctctgcctaggaaaaccagagacctttgttcacttgtttatctgctgaccttccctccactattgtcctatgaccctgccaaatccccctctgcgagaaacacccaagaatgatcaat

SEQ ID NO: 51851 - DNA, 1576 bp, Homo sapiens
  misc_feature (619)..(619): n is a, c, g, or t
  misc_feature (728)..(728): n is a, c, g, or t
  misc_feature (1121)..(1121): n is a, c, g, or t
aattaccttaaagtccccattctgtcttcagcctgctgtaatgtgccattgagaacctctaataatttctccatttcagttaccatacttttcaactctagaatttctatttgactcctttttatggtaactgaaatggaaaaattattagaggttctcaatggcacattacagcaggctgaagacagaatggggaacttgaaggttaattgagattgttgactctgaggaacagaaataaaaatgaatgaaagtgaatggaatctcagagacctgtttgtggaacacatcatcaagcttactaacatacacataatgagcgtcccaggagaagaaaaacagaaaaaaggagaaagaatatttgaagaaatgatggccccaaacttcccaaacatgatgaaaaacaatctgcatattcaagaagctcaaggaactacaagtaggaaaaactgagggatccacatctaaacatactgtaatcaaactgacagaagccaaagacagaatatcttgaaagcagcaagagaaaagcaactcatcacatacaagggatcctcaataagattaatagctaatttctcttcaaaaacaatgcaggtgctggacatggttgctcacncctgtactcccagtaccttgggaggcttgaggctcaagaattgcttgaagccaggagttggataccagcactggcaatagagtaaaaccctgtctctacaaaaaatttnaaaataactgggcatgcccgtctgggatgtgaggagcgcctctgcccggccgcgaccctgtctgggaggtgaggagcatctctgcctggccgccccgtctgagaagtgaggagcccctacgcctggcagccgccccatctgagaagtgaggagcccctccgcccagcagccgccccgtctgagaagtgaggagcccctctgcccggcagccgccctgtctgggagggaggtgggggccagcccccgcctggccagccgccccctccgggaggtgggggggcgcctctgcccggctgccccttctgggaagtgaggagcccctctgcccggccgccaccccgtctgggaggtgtacccaacagctcattgagaacgggccatgatgacgatggnggttttgttgaatagaaaagggggaaatgtggggaaaagatacagaaatcagattgttgctgtgtctgtgtagaaagaagtagacatagaagactccattttgttctgtactaagaaaaattcttctgccttgggatgctgttgatctatgaccttacccccaacccagtgctctctgaaacatgtgctgtgtccactcagggttgaatggattaagggcggtgcaagatgtgctttgttaaacagatgcttgaaagcagcatgctcgttaagagtcatcaccactccctaatctcaagtacccagggacacaaacactgtggaaggccgcagggtcctctgcctaggaaaaccagagacctttgttcacttgtttatctgctgaccttccctccactattgtcctatgaccctgccaaatccccctctgcgagaaacacccaagaatgatcaat

SEQ ID NO: 51852 - DNA, 1576 bp, Homo sapiens
  misc_feature (619)..(619): n is a, c, g, or t
  misc_feature (728)..(728): n is a, c, g, or t
  misc_feature (1121)..(1121): n is a, c, g, or t
aattaccttaaagtccccattctgtcttcagcctgctgtaatgtgccattgagaacctctaataatttctccatttcagttaccataaaaaggagtcaaatagaaattctagagttgaaaagtatggtaactgaaatggaaaaattattagaggttctcaatggcacattacagcaggctgaagacagaatggggaacttgaaggttaattgagattgttgactctgaggaacagaaataaaaatgaatgaaagtgaatggaatctcagagacctgtttgtggaacacatcatcaagcttactaacatacacataatgagcgtcccaggagaagaaaaacagaaaaaaggagaaagaatatttgaagaaatgatggccccaaacttcccaaacatgatgaaaaacaatctgcatattcaagaagctcaaggaactacaagtaggaaaaactgagggatccacatctaaacatactgtaatcaaactgacagaagccaaagacagaatatcttgaaagcagcaagagaaaagcaactcatcacatacaagggatcctcaataagattaatagctaatttctcttcaaaaacaatgcaggtgctggacatggttgctcacncctgtactcccagtaccttgggaggcttgaggctcaagaattgcttgaagccaggagttggataccagcactggcaatagagtaaaaccctgtctctacaaaaaatttnaaaataactgggcatgcccgtctgggatgtgaggagcgcctctgcccggccgcgaccctgtctgggaggtgaggagcatctctgcctggccgccccgtctgagaagtgaggagcccctacgcctggcagccgccccatctgagaagtgaggagcccctccgcccagcagccgccccgtctgagaagtgaggagcccctctgcccggcagccgccctgtctgggagggaggtgggggccagcccccgcctggccagccgccccctccgggaggtgggggggcgcctctgcccggctgccccttctgggaagtgaggagcccctctgcccggccgccaccccgtctgggaggtgtacccaacagctcattgagaacgggccatgatgacgatggnggttttgttgaatagaaaagggggaaatgtggggaaaagatacagaaatcagattgttgctgtgtctgtgtagaaagaagtagacatagaagactccattttgttctgtactaagaaaaattcttctgccttgggatgctgttgatctatgaccttacccccaacccagtgctctctgaaacatgtgctgtgtccactcagggttgaatggattaagggcggtgcaagatgtgctttgttaaacagatgcttgaaagcagcatgctcgttaagagtcatcaccactccctaatctcaagtacccagggacacaaacactgtggaaggccgcagggtcctctgcctaggaaaaccagagacctttgttcacttgtttatctgctgaccttccctccactattgtcctatgaccctgccaaatccccctctgcgagaaacacccaagaatgatcaat

SEQ ID NO: 51853 - DNA, 385 bp, Homo sapiens
aggcagaatgctttgactgcctgtggcactcggaagagctgcccggcccacagccctgtgcttagttagacagcctgctgtaattaagggccatgcctgccaggtcctggcccaggcaccctgagtgcaggtcatcaccactcaacactgagccccagtcctgctcccttcccagacttcctaaagcttttcttcctaaggattgagcagcttgggaatggggcccaagtggtaccaagggcactagtgcacacccccacccttagtagcccttgaactcaggcagcctcaggggtagtctcaagcagctttctcccacagccctggaaaactctaagggcaatgcatgaaggttcagctccctgggctctttggcccccttctt

SEQ ID NO: 51854 - DNA, 601 bp, Homo sapiens
atgactatttaatctcatacttgattgatagcttgactggatatagaaacataggttggaaatcatctgtctttggaattttgaaggctttgctttattgtcttttatcttctaatgttatggtgagaagtcaagtgtcagtctaacccttgattttctgtatgtgacatgtttttttcttcatggaagttttcagcatctttctgtacactcagagattctggaatttcacaatcacttgctttgatttccatggtttttcattcattttgctgaggaccaagtggattatttcaaactagaaagtcacggtcttctgaaacatttacaaattattcatatattctccttttcctcctcacccctttttactgttctctctttctggaactctttctggttagatatggtagatttgtcttccaggtttctaatcttatctgtcctgttctctacctttttgccacttattctagtaagggagatttcctcaactttatctttaaacatctattgtatttttaactcctgctgttgtatttttaatttaaagtaatcttttgtactagttatttattgttgtgtaacaaatcaccccaaa

SEQ ID NO: 51855 - DNA, 267 bp, Homo sapiens
attagatgaagatagtttctgaaagcaaattctagaccaccttcattatgaagattctatttttcacaattctaaataaagtttatttagaatttattacaaaatctatctttgctaataggtcagtgtttcttttcccaagcaccaaatacctccagaaagcctgtgtttgacccctaaattcaacattctccagaagtttgcttcaaggaatattaattctcgatggtatttgaaaaaaagatttcttgggaaaataggcaaatg

SEQ ID NO: 51856 - DNA, 434 bp, Homo sapiens
tgatttaatttcgctcccaggaagtgaatgaggtacatgtctcctctctcctcaaatctctgtaaggaaggttttattgctctgtgacctcagttctctggtgagttatgagaaaagataggactttgaagttaatctggccttttttttttttttcactgtgagtatgagaatgatgcacctcccaactctgggaagtaacgagttcttcccagtgccttaccaccaccacaatccacggacttactaccggacttactacgtgtcttatgtacctgtctgcacagtcgacttctgattgacaaactcatttcaccataaaagaagtggggtaatgggggcttatgcctcttgagtgcactggtcttagcatatcccccatcacccaggaatagcgggcataataggacgatggaatggtctgctgaagacac

SEQ ID NO: 51857 - DNA, 3646 bp, Homo sapiens
  misc_feature (1655)..(1655): n is a, c, g, or t
  misc_feature (1680)..(1680): n is a, c, g, or t
  misc_feature (1774)..(1774): n is a, c, g, or t
  misc_feature (1781)..(1781): n is a, c, g, or t
gaacgtccgcgctgggagccaggggtgcccgacccccgtccgccgccgccgccgccgccgcgcatagcccccggagagccctctggggaccccgaccagaagggaccttgccctgggagaaggctgtggagacctgggccttctgcgatcaccctaggagttgatccagatatgtgcctcacgccctgatcactccccccaaattagtatccgcagagattcgaggacatgccgttgaccttgttacaggactggtgtcggggggaacacctgaacacccggaggtgcatgctcatcctggggatccccgaggactgtggcgaggatgagtttgaggagacactccaggaggcttgcaggcacctgggcagatacagggtgattggcaggatgtttaggagggaggagaacgcccaggcgattctactggagctggcacaagatatcgactatgctttgctcccaagggaaataccaggaaagggggggccctgggaagtgattgtaaaaccccgtaactcagatggggaatttctcaacagactgaaccgcttcttagaggaggagaggcggaccgtgtcagatatgaaccgagtcctcgggtcggacaccaattgttcggctccaagagtgactatatcaccagagttctggacctgggcccagactctgggggcagcagtgcagcctctgctagaacaaatgttgtaccgagaactaagagtgttttctgggaacaccatatccatcccaggtgcactggcctttgatgcctggcttgagcacaccactgagatgctacagatgtggcaggtgcccgagggggaaaagaggcggaggctgatggaatgcttacggggccctgctctccaggtggtcagtgggctccgggccagcaatgcttccataactgtggaggagtgcctggctgccttgcagcaggtgttcggacctgtggagagccataaaattgcccaggtgaagttgtgtaaagcctatcaggaggcaggagagaaagtatctagctttgtgttacgtttggaacccctgctccaaagagctgtagaaaacaatgtggtatcacgtagaaacgtgaatcagactcgcctgaaacgagtcttaagtggggccacccttcctgacaaactccgagataagcttaagctgatgaaacagcgaaggaagcctcctggtttcctggccctggtgaagctcctgcgtgaggaggaggaatgggaggccactttaggtccagatagggagagtctggaggggctggaagtagccccaaggccacctgccaggatcactggggttggggcagtacctctccctgcctctggcaacagttttgatgcgaggccttcccagggctaccggcgccggaggggcagaggccaacaccgaaggggtggtgtggcaagggctggctctcgaggctcaagaaaacggaaacgccacacattctgctatagctgtggggaagacggccacatcagggtacagtgcatcaacccctccaacctgctcttggtaaagcagaagaaacaggctgcagttgagtcgggaaacgggaactgggcttgggacaagagccatcccaagtccaaggccaagtaggctcgggagaacagggcaacatttcctaccacagnccaaggagacaaaagagatattggnaggaggggaaagagaagcccagacaaacagcagatgagttgagtggggcagagggacagggcagccagaccaaggccaagccttctcacccttnggccagntggaagggactttcagcaaccaagaccacctggcaacaggctcagtgggggtcaggtccaggtccccgaagaggtgctggagaggaaagcagggagccactgcatccagcacatggggtgcctgggcctcagatggggaccccaaagaagcagaagctgaagaaggtacggctgggggttctgtcctgctcatccaaccacccctaaatacccaccctgtggactttgagctgaacatgcccactggcccccaggccacatgggacctggaggagcctacctggggcctgcccctgccagcaggtgccagggctggtgaggaagagctggggggcagaggtaaagccctgcaggggaggccacagggtccatcccgtcttcaggatcatctacactgcactaggggagccccaggaaggcagcaccctggaggccctgtgccagtgaggacaggagaccctaaggccccgggagcccagtgccagccagaggttgtgcaggcaaggagaccaaagattgatgagaagacccccagcaggggtactgggtacccggcaggccagtgccctcacagttgacttggaccagggtggctgtgaagggaagtctttgttgcaaaggaggaggaggaaaagggaggacttggtagggttttgtttcttctgcttgtttctgtacagggccaccagactcctggagagatcaagcaaggagaacctggggctgccatggccaaagcaactcaacagatgccaatgccaattccaaggccagccacaaccctgccaccttggggaatccagcctggaggcatcccctaagcagccagccatggcctgggtggaggcacctgaagacgtctgtcccaaactcccccagccctgagctgggagatgacagggggaaagaggccctctcaagggtgccagatgcctgggtctcccaagaggggtcccccaactcaccgttcccgggacaggctgccccctgttccaggaagctcatcctcacctgtgtaggcccctgtagtgacccacgcgtccagcagacgcccacccaccgctagccgttgttcctgtgcaaagtagtgtgctatgcacccacccaggtggccgcctctgggcccaaggcacatgctgtgagcttcctgtgagcccaggctctgctcactgctgtcccgcgtcatgagcaccacctctgctttccctgtgtagatctaggccagtggctgcttgttcttgtggagctgtgtgtgttcttctctgagcagctcctccccggagtcccccagcacagtcccaggagatgacaggaaggaagcaccagggcaaggcggacgctcaccctgtgaccacgatggtgaccgtgactgtgggaggaagaactggacccaggacggagcggggctgccctgcctgaggctcccgaggagctttgtgctttggtgttccacccctgttgttactcatgactcagtttccttgacctggtagggtgttccctgctgtgttttccagtgtcctgtgactgtcctgtgcgggccatagggcagggccctgccccagcagatgggcttgggagggggctccctaaagccagtggacactgccagagtctaccttcctggcaagaggcagaccccggggccctcaggaaggagggagttggcagcgggggctgcagcaggagtaggagcagatgaggcgtcttgccaggaacctcaggaggagggggcccgggacctgtgtgggacctgtgtcctgtggtggccgtttgcagtttctctctgtgttgtgattcccttctcttcaacggtttcagtacgtgtttctcttcaataaacttcattcagtgttccagccggc

SEQ ID NO: 51858 - DNA, 3131 bp, Homo sapiens
  misc_feature (1655)..(1655): n is a, c, g, or t
  misc_feature (1680)..(1680): n is a, c, g, or t
  misc_feature (1774)..(1774): n is a, c, g, or t
  misc_feature (1781)..(1781): n is a, c, g, or t
gaacgtccgcgctgggagccaggggtgcccgacccccgtccgccgccgccgccgccgccgcgcatagcccccggagagccctctggggaccccgaccagaagggaccttgccctgggagaaggctgtggagacctgggccttctgcgatcaccctaggagttgatccagatatgtgcctcacgccctgatcactccccccaaattagtatccgcagagattcgaggacatgccgttgaccttgttacaggactggtgtcggggggaacacctgaacacccggaggtgcatgctcatcctggggatccccgaggactgtggcgaggatgagtttgaggagacactccaggaggcttgcaggcacctgggcagatacagggtgattggcaggatgtttaggagggaggagaacgcccaggcgattctactggagctggcacaagatatcgactatgctttgctcccaagggaaataccaggaaagggggggccctgggaagtgattgtaaaaccccgtaactcagatggggaatttctcaacagactgaaccgcttcttagaggaggagaggcggaccgtgtcagatatgaaccgagtcctcgggtcggacaccaattgttcggctccaagagtgactatatcaccagagttctggacctgggcccagactctgggggcagcagtgcagcctctgctagaacaaatgttgtaccgagaactaagagtgttttctgggaacaccatatccatcccaggtgcactggcctttgatgcctggcttgagcacaccactgagatgctacagatgtggcaggtgcccgagggggaaaagaggcggaggctgatggaatgcttacggggccctgctctccaggtggtcagtgggctccgggccagcaatgcttccataactgtggaggagtgcctggctgccttgcagcaggtgttcggacctgtggagagccataaaattgcccaggtgaagttgtgtaaagcctatcaggaggcaggagagaaagtatctagctttgtgttacgtttggaacccctgctccaaagagctgtagaaaacaatgtggtatcacgtagaaacgtgaatcagactcgcctgaaacgagtcttaagtggggccacccttcctgacaaactccgagataagcttaagctgatgaaacagcgaaggaagcctcctggtttcctggccctggtgaagctcctgcgtgaggaggaggaatgggaggccactttaggtccagatagggagagtctggaggggctggaagtagccccaaggccacctgccaggatcactggggttggggcagtacctctccctgcctctggcaacagttttgatgcgaggccttcccagggctaccggcgccggaggggcagaggccaacaccgaaggggtggtgtggcaagggctggctctcgaggctcaagaaaacggaaacgccacacattctgctatagctgtggggaagacggccacatcagggtacagtgcatcaacccctccaacctgctcttggtaaagcagaagaaacaggctgcagttgagtcgggaaacgggaactgggcttgggacaagagccatcccaagtccaaggccaagtaggctcgggagaacagggcaacatttcctaccacagnccaaggagacaaaagagatattggnaggaggggaaagagaagcccagacaaacagcagatgagttgagtggggcagagggacagggcagccagaccaaggccaagccttctcacccttnggccagntggaagggactttcagcaaccaagaccacctggcaacaggctcagtgggggtcaggtccaggtccccgaagaggtgctggagaggaaagcagggagccactgcatccagcacatggggtgcctgggcctcagatggggaccccaaagaagcagaagctgaagaagggccaccagactcctggagagatcaagcaaggagaacctggggctgccatggccaaagcaactcaacagatgccaatgccaattccaaggccagccacaaccctgccaccttggggaatccagcctggaggcatcccctaagcagccagccatggcctgggtggaggcacctgaagacgtctgtcccaaactcccccagccctgagctgggagatgacagggggaaagaggccctctcaagggtgccagatgcctgggtctcccaagaggggtcccccaactcaccgttcccgggacaggctgccccctgttccaggaagctcatcctcacctgtgtaggcccctgtagtgacccacgcgtccagcagacgcccacccaccgctagccgttgttcctgtgcaaagtagtgtgctatgcacccacccaggtggccgcctctgggcccaaggcacatgctgtgagcttcctgtgagcccaggctctgctcactgctgtcccgcgtcatgagcaccacctctgctttccctgtgtagatctaggccagtggctgcttgttcttgtggagctgtgtgtgttcttctctgagcagctcctccccggagtcccccagcacagtcccaggagatgacaggaaggaagcaccagggcaaggcggacgctcaccctgtgaccacgatggtgaccgtgactgtgggaggaagaactggacccaggacggagcggggctgccctgcctgaggctcccgaggagctttgtgctttggtgttccacccctgttgttactcatgactcagtttccttgacctggtagggtgttccctgctgtgttttccagtgtcctgtgactgtcctgtgcgggccatagggcagggccctgccccagcagatgggcttgggagggggctccctaaagccagtggacactgccagagtctaccttcctggcaagaggcagaccccggggccctcaggaaggagggagttggcagcgggggctgcagcaggagtaggagcagatgaggcgtcttgccaggaacctcaggaggagggggcccgggacctgtgtgggacctgtgtcctgtggtggccgtttgcagtttctctctgtgttgtgattcccttctcttcaacggtttcagtacgtgtttctcttcaataaacttcattcagtgttccagccggc

SEQ ID NO: 51859 - DNA, 830 bp, Homo sapiens
  misc_feature (371)..(371): n is a, c, g, or t
gagccacagtctgagcgaacgtccgcgctgggagccaggggtgcccgacccccgtccgccgccgccgccgccgccgcgcatagcccccggagagccctctggggaccccgaccagaagggaccttgccctgggagaaggtaacagacccacctggggagggagacgctgggccccgggagactccgccgcccctcgcctgtccgccctatcaaaactgaaccaccctgcagggcaggggtccagggtcctggggcagcgcggggagggggctgaggcccccaaaaaccccacggggggtgggggtggggggctgggcatgggccgggcctggctgcagaagcgccacacagggagaaggccgctgggggtnggggttggggtgggcgtggatgtgggcgtgcggagaggtgggcattaacctcgctctcgccctgctcgcattcacaggctgtggagacctgggccttctgcgatcaccctaggagttgatccagatatgtgcctcacgccctgatcactccccccaaattagtatccgcagagattcgaggacatgccgttgaccttgttacaggactggtgtcggggggaacacctgaacacccggaggtgcatgctcatcctggggatccccgaggactgtggcgaggatgagtttgaggagacactccaggaggcttgcaggcacctgggcagatacagggtgattggcaggatgtttaggagggaggagaacgcccaggcgattctactggagctggcacaagatatcgactatgctttgctcccaagggaaataccaggaaagggggggccctgggaagtgatt

SEQ ID NO: 51860 - DNA, 3525 bp, Homo sapiens
  misc_feature (1534)..(1534): n is a, c, g, or t
  misc_feature (1559)..(1559): n is a, c, g, or t
  misc_feature (1653)..(1653): n is a, c, g, or t
  misc_feature (1660)..(1660): n is a, c, g, or t
gaacgtccgcgctgggagccaggggtgcccgacccccgtccgccgccgccgccgccgccgcgcatagcccccggagagccctctggggaccccgaccagaagggaccttgccctgggagaaggctgtggagacctgggccttctgcgatcaccctaggagttgatccagatatgtgcctcacgccctgatcactccccccaaattagtatccgcagagattcgaggacatgccgttgaccttgttacaggactggtgtcggggggaacacctgaacacccggaggtgcatgctcatcctggggatccccgaggactgtggcgaggatgagtttgaggagacactccaggaggcttgcaggcacctgggcagatacagggtgattggcaggatgtttaggagggaggagaacgcccaggcgattctactggagctggcacaagatatcgactatgctttgctcccaagggaaataccaggaaagggggggccctgggaagtgattgtaaaaccccgtaactcagatggggaatttctcaacagactgaaccgcttcttagaggaggagaggcggaccgtgtcagatatgaaccgagtcctcgggtcggacaccaattgttcggctccaagagtgactatatcaccagagttctggacctgggcccagactctgggggcagcagtgcagcctctgctagaacaaatgttgtaccgagaactaagagtgttttctgggaacaccatatccatcccaggtgcactggcctttgatgcctggcttgagcacaccactgagatgctacagatgtggcaggtgcccgagggggaaaagaggcggaggctgatggaatgcttacggggccctgctctccaggtggtcagtgggctccgggccagcaatgcttccataactgtggaggagtgcctggctgccttgcagcaggtgttcggacctgtggagagccataaaattgcccaggtgaagttgtgtaaagcctatcaggaggcaggagagaaagtatctagctttgtgttacgtttggaacccctgctccaaagagctgtagaaaacaatgtggtatcacgtagaaacgtgaatcagactcgcctgaaacgagtcttaagtggggccacccttcctgacaaactccgagataagcttaagctgatgaaacagcgaaggaagcctcctggtttcctggccctggtgaagctcctgcgtgaggaggaggaatgggaggccactttaggtccagatagggagagtctggaggggctggaagtagccccaaggccacctgccaggatcactggggttggggcagtacctctccctgcctctggcaacagttttgatgcgaggccttcccagggctaccggcgccggaggggcagaggccaacaccgaaggggtggtgtggcaagggctggctctcgaggctcaagaaaacggaaacgccacacattctgctatagctgtggggaagacggccacatcagggtacagtgcatcaacccctccaacctgctcttgnccaaggagacaaaagagatattggnaggaggggaaagagaagcccagacaaacagcagatgagttgagtggggcagagggacagggcagccagaccaaggccaagccttctcacccttnggccagntggaagggactttcagcaaccaagaccacctggcaacaggctcagtgggggtcaggtccaggtccccgaagaggtgctggagaggaaagcagggagccactgcatccagcacatggggtgcctgggcctcagatggggaccccaaagaagcagaagctgaagaaggtacggctgggggttctgtcctgctcatccaaccacccctaaatacccaccctgtggactttgagctgaacatgcccactggcccccaggccacatgggacctggaggagcctacctggggcctgcccctgccagcaggtgccagggctggtgaggaagagctggggggcagaggtaaagccctgcaggggaggccacagggtccatcccgtcttcaggatcatctacactgcactaggggagccccaggaaggcagcaccctggaggccctgtgccagtgaggacaggagaccctaaggccccgggagcccagtgccagccagaggttgtgcaggcaaggagaccaaagattgatgagaagacccccagcaggggtactgggtacccggcaggccagtgccctcacagttgacttggaccagggtggctgtgaagggaagtctttgttgcaaaggaggaggaggaaaagggaggacttggtagggttttgtttcttctgcttgtttctgtacagggccaccagactcctggagagatcaagcaaggagaacctggggctgccatggccaaagcaactcaacagatgccaatgccaattccaaggccagccacaaccctgccaccttggggaatccagcctggaggcatcccctaagcagccagccatggcctgggtggaggcacctgaagacgtctgtcccaaactcccccagccctgagctgggagatgacagggggaaagaggccctctcaagggtgccagatgcctgggtctcccaagaggggtcccccaactcaccgttcccgggacaggctgccccctgttccaggaagctcatcctcacctgtgtaggcccctgtagtgacccacgcgtccagcagacgcccacccaccgctagccgttgttcctgtgcaaagtagtgtgctatgcacccacccaggtggccgcctctgggcccaaggcacatgctgtgagcttcctgtgagcccaggctctgctcactgctgtcccgcgtcatgagcaccacctctgctttccctgtgtagatctaggccagtggctgcttgttcttgtggagctgtgtgtgttcttctctgagcagctcctccccggagtcccccagcacagtcccaggagatgacaggaaggaagcaccagggcaaggcggacgctcaccctgtgaccacgatggtgaccgtgactgtgggaggaagaactggacccaggacggagcggggctgccctgcctgaggctcccgaggagctttgtgctttggtgttccacccctgttgttactcatgactcagtttccttgacctggtagggtgttccctgctgtgttttccagtgtcctgtgactgtcctgtgcgggccatagggcagggccctgccccagcagatgggcttgggagggggctccctaaagccagtggacactgccagagtctaccttcctggcaagaggcagaccccggggccctcaggaaggagggagttggcagcgggggctgcagcaggagtaggagcagatgaggcgtcttgccaggaacctcaggaggagggggcccgggacctgtgtgggacctgtgtcctgtggtggccgtttgcagtttctctctgtgttgtgattcccttctcttcaacggtttcagtacgtgtttctcttcaataaacttcattcagtgttccagccggc

SEQ ID NO: 51861 - DNA, 2932 bp, Homo sapiens
  misc_feature (1655)..(1655): n is a, c, g, or t
  misc_feature (1680)..(1680): n is a, c, g, or t
  misc_feature (1774)..(1774): n is a, c, g, or t
  misc_feature (1781)..(1781): n is a, c, g, or t
gaacgtccgcgctgggagccaggggtgcccgacccccgtccgccgccgccgccgccgccgcgcatagcccccggagagccctctggggaccccgaccagaagggaccttgccctgggagaaggctgtggagacctgggccttctgcgatcaccctaggagttgatccagatatgtgcctcacgccctgatcactccccccaaattagtatccgcagagattcgaggacatgccgttgaccttgttacaggactggtgtcggggggaacacctgaacacccggaggtgcatgctcatcctggggatccccgaggactgtggcgaggatgagtttgaggagacactccaggaggcttgcaggcacctgggcagatacagggtgattggcaggatgtttaggagggaggagaacgcccaggcgattctactggagctggcacaagatatcgactatgctttgctcccaagggaaataccaggaaagggggggccctgggaagtgattgtaaaaccccgtaactcagatggggaatttctcaacagactgaaccgcttcttagaggaggagaggcggaccgtgtcagatatgaaccgagtcctcgggtcggacaccaattgttcggctccaagagtgactatatcaccagagttctggacctgggcccagactctgggggcagcagtgcagcctctgctagaacaaatgttgtaccgagaactaagagtgttttctgggaacaccatatccatcccaggtgcactggcctttgatgcctggcttgagcacaccactgagatgctacagatgtggcaggtgcccgagggggaaaagaggcggaggctgatggaatgcttacggggccctgctctccaggtggtcagtgggctccgggccagcaatgcttccataactgtggaggagtgcctggctgccttgcagcaggtgttcggacctgtggagagccataaaattgcccaggtgaagttgtgtaaagcctatcaggaggcaggagagaaagtatctagctttgtgttacgtttggaacccctgctccaaagagctgtagaaaacaatgtggtatcacgtagaaacgtgaatcagactcgcctgaaacgagtcttaagtggggccacccttcctgacaaactccgagataagcttaagctgatgaaacagcgaaggaagcctcctggtttcctggccctggtgaagctcctgcgtgaggaggaggaatgggaggccactttaggtccagatagggagagtctggaggggctggaagtagccccaaggccacctgccaggatcactggggttggggcagtacctctccctgcctctggcaacagttttgatgcgaggccttcccagggctaccggcgccggaggggcagaggccaacaccgaaggggtggtgtggcaagggctggctctcgaggctcaagaaaacggaaacgccacacattctgctatagctgtggggaagacggccacatcagggtacagtgcatcaacccctccaacctgctcttggtaaagcagaagaaacaggctgcagttgagtcgggaaacgggaactgggcttgggacaagagccatcccaagtccaaggccaagtaggctcgggagaacagggcaacatttcctaccacagnccaaggagacaaaagagatattggnaggaggggaaagagaagcccagacaaacagcagatgagttgagtggggcagagggacagggcagccagaccaaggccaagccttctcacccttnggccagntggaagggactttcagcaaccaagaccacctggcaacaggctcagtgggggtcaggtccaggtccccgaagaggtgctggagaggaaagcagggagccactgcatccagcacatggggtgcctgggcctcagatggggaccccaaagaagcagaagctgaagaaggtacggctgggggttctgtcctgctcatccaaccacccctaaatacccaccctgtggactttgagctgaacatgcccactggcccccaggccacatgggacctggaggagcctacctggggcctgcccctgccagcaggtgccagggctggtgaggaagagctggggggcagaggtaaagccctgcaggggaggccacagggtccatcccgtcttcaggatcatctacactgcactaggggagccccaggaaggcagcaccctggaggccctgtgccagtgaggacaggagaccctaaggccccgggagcccagtgccagccagaggttgtgcaggcaaggagaccaaagattgatgagaagacccccagcaggggtactgggtacccggcaggccagtgccctcacagttgacttggaccagggtggctgtgaagggaagtctttgttgcaaaggaggaggaggaaaagggaggacttggtagggttttgtttcttctgcttgtttctgtacagggccaccagactcctggagagatcaagcaaggagaacctggggctgccatggccaaagcaactcaacagatgccaatgccaattccaaggccagccacaaccctgccaccttggggaatccagcctggaggcatcccctaagcagccagccatggcctgggtggaggcacctgaagacgtctgtcccaaactcccccagccctgagctgggagatgacagggggaaagaggccctctcaagggtgccagatgcctgggtctcccaagaggggtcccccaactcaccgttcccgggacaggctgccccctgttccaggaagctcatcctcacctgtgtaggccccgggccattcaacgcctccgggccattcaacgcctccgggccattcaacgcctccgggccattcaacgcctccgggccattcaacgcctccgggccattcaacgcctccgggccattcaacgcctccg

SEQ ID NO: 51862 - DNA, 225 bp, Homo sapiens
  misc_feature (1)..(1): n is a, c, g, or t
  misc_feature (195)..(195): n is a, c, g, or t
nggacccttgaatgcagaagttgcaagtttcacagaaccaagtattcctgatgctgatcaagatgtgctccctccagcaccatccaaaccctccacatccagtaacggcaggaactgatctcaggcctaatggtgcgggcatccacactggctcttgtgcttgctgacggcccggggaattcttggaatgggtgnggcagaggttcccttgctcacagcctccct

SEQ ID NO: 51863 - DNA, 377 bp, Homo sapiens
ctttgaaggtatacaattcagtgtttttagtatagtcacagattagactgtgaattctgtacccatcaccactatcaaatatcagaatattttcatcaccccaaaaaagcaaacccaaggaccgggcatggtggctcactttgtgaggccgaggcaggcggatcacttgaggtcaggagtttgtgaccatcctggccaacatggtgaaaccccgtctctactaaaaatacaaaaattagccgggcgtggtggcacacacctgtagtcccagctacttgggaggctgaggcaggagaattgcttgaactcaggagtcggaggttgcagtgagcagagatcgctccaatgtactccagcctaggcgacagagcgagact

SEQ ID NO: 51864 - DNA, 813 bp, Homo sapiens
tgtttcttcttctgtaaaatgaggcttatcatgttacctacatcatagggttgttgtgagaataaaatgaggtaggtagtgctggagcatagtaagtgttcaataaagccagtcattcttaggaacagagcagccttgtttggagactagacatttcccattgaagtcaggctaccaagaggcatatttattttccagcaggaaggcagctggggatgggccggttacatccatttgatgttgctagagcatcccagctactcaccacaacccctcctccaatattcacttcataagaacctgtgggaatccctgcaacatttaccaccttctccaaccctggtgacccattcttagacaagcttggctaaataattcccttcctgccatcctcacaaccagtgaggtcaccttgtttgagctgtgttcatttttggagttaatgtcattttgaatcacatttatgaggaaagaagggtgggggtagatgataccattggttggacttcagttgccatatttaaactttcatttccaaacctttcttttgattttacgtttttgtctatgcttattacgtagccttcacagggatccaattgctgggctgaaatttttgagctttgactgaaagaatttggcttttgggtggggcctttacctgtggttgggaaactcagccgtggcattgcagatgggccagtgtttaaggtcagatgtctgtaggtgactgtgctgccatttcatagaatcaaagagagggacatggcttcaagggttgtctggcccaatcccctgctagcaaaaaaaaaa

SEQ ID NO: 51865 - DNA, 456 bp, Homo sapiens
tttctcaaaatatgctgtgagaaacactaactttgcaggactcttaatgggtaagaaagatttgaagtcaagtatcttgaaaatattgggttaaacaatttttttgaaagttacaggtatatttggagggggggcaattatagaatgcctcagttttttcaaaaaatattccatgtattatgaacaacattttctaaacattttagggagcagcacttagagctagccttctttggcacacagtttaaggtggtagtcccttgtggaacagacagcttgaaaacttttcttgcttctctcttaggtttatgtgtaaacttctagttctcaactctattccctacaatactttgtttagtcactttcttaaaacttggcacttgtagaaaagattaatagtttactttgtgtgaaaactcgtggagacactaagtttgataagttgtgggttatttc

SEQ ID NO: 51866 - DNA, 253 bp, Homo sapiens
acaatggactgtcagagcagccagctcctccctgctgctcacaggaagagccatcaacaaagccaatccctggagataggctctgaaaccaggatagagactccttcaatgctctgctggttccaccatgtatcatcagagaatcaccctgagtggcataggtggcctgggatctgggcacagcaattccacacatcttcacctagaaaccctccttctggctgggcctgatggctcatgcctgtaatcccag

SEQ ID NO: 51867 - DNA, 467 bp, Homo sapiens
aaatcattatatttgtattatacagaaaacagccataagcaaagaagaattcgagcaaaaatcaaatttttcaaatcaagcaaaagatataaacaaagaatccacaagaaaagaaatgtaaatggccctcaattgtatggaaacatgctcatctttattaataatatgagaaatacaacttaaaatggccacttattaaattgaaaaaatctcagtacttggattgcacactgtgtagaaacagtcagtcttttatccgtctggtgagaatgcaaatccctaatagagtggaacttggcaactcaccggaaaattccatgcgcatttattctttgccaattgatcttacttctaagactctctccaaagaaatactggaaaaatataaaaggaatcatgcaaaagagaaatataaatggatttacttagtcccttgcatcatgaaaataagcagtggaaagaccagc

SEQ ID NO: 51868 - DNA, 427 bp, Homo sapiens
tgatcacaagtatcctatgagataggcgaagcagacacattgctagtttactgaaaattaagatccagacaagttaacccagagtcactctgtgtggaagtggcaaagttggaaaccaaacttaatttttttaaattaatatttatgagcatttaccctatgctaggtcctatactagttacacagtcatgtatggtatatgccatcacttctgatctttgtgtcatttgtgaccttgtgtgtatcagccaggcgcagttcactggtgaacacctaaacttgaaacgtgcggtctgggtgcgatggttcatgcctgtaatcccagcaccttgggaggccaaggcgggcggatcacgaggtcaggagatcgagaccatcctggctaacacggtgaaaccccgtctctactaaaaatacccaaaaaaaa

SEQ ID NO: 51869 - DNA, 205 bp, Homo sapiens
ctttgtctcgctaatgatttcaattagaaggttatagtttgagattttcaaatatgatatcccttgttctatttgctttgactctttttttggacagctttcctcagatttctggtttcttgattttctacttcttatttactaaaatttactaactaggaattttgtgttagtggacaaaatttcattatagggtaattagaaa

SEQ ID NO: 51870 - DNA, 473 bp, Homo sapiens
gccaccatgcccggccctagaatcctattttttaaaagcaactaggagtatatctaagatatagcatttctctgtctgagagcagggagagcttgcataggtgtcaatgtccttcaagggactcttgaaactaattcagggccctatacactgcaggcatttcttggagtggccaaggtattgtcatgtgttaagaattctgagaagttctcggataatgaaatttgtgcagctttctttaattcagcagttttcaaacatctaacaatagaatccttcttgtctgaggggcctcgccttaggaaaggctgccctaacaacctcaaagttcccttccaacacccacagtccaccattctagtcttggctctgccactaacttactgtatgactttggccgaatcacctttcctcttggggtctcagtttgttaagttattaacaccctgggtgacagagcaagaccctgtctc

SEQ ID NO: 51871 - DNA, 208 bp, Homo sapiens
aaaataaaaaaacaacaacaaaaaaagatgttttgctaaaatagatgacatcagataatttaataacatcaatataagaaaaaatatatattatttgcataatggaataaaaaggtatcagaaattattggcaataataagatgtgcgcatcctcaaaaatatatctacaaagtatgtcattttaatttcagaaatgttatattttta

SEQ ID NO: 51872 - DNA, 601 bp, Homo sapiens
cacagaaggacctcagagggcccaagtcctcagacccacacagaacaggggctgagggcactgagaagccagctgtcctccttacactgagatggaaagcagagatgcatccatccacacttcctgcagagcggcccaagccccaaccccacctcgagctcctggatgcactgctatcaagaacaatgaggggctgaggggatggccagcctatgttgctgactccatcatcctaaccctccttctgccttctggtctcctcgtgcctcctcccagatcacccttctcttcccagcgccctaaagcctgtggggtgatgtcccattctggctgctccaggtgggagatgtgcgcgtgtctccctgccagttacccaggcttcactcttcgaacctggaccacagtctctggtgatgtgtgtagtggccacatcatgcaaatatagtctcaccattcctaggagctaaatgggtgtgtctagaaggggcatcagttcatcgggggagaggtgtgcacctgtatgtggggcaggagggtgtgcaagttcctggaggtgggttactccaaggcatgggcagtgcagagggagcctcgcctgggc

SEQ ID NO: 51873 - DNA, 740 bp, Homo sapiens
gtggagtcttgctctgtcgcccaggctggagtgcagtgatgcaatttcggctcactgcaacctctgcctcccaggttcaagtgattcttctgcctcagcctcccgagtacctggaactacaggcacacgccataacgcctggctaatttttatatttttagtagagatggggttttgccatgttggccaggatggtctcgaactcctgacctcaagtgatccacccacctcggcctctcaaaatgctgggattacaagcgcgagccaccctgcccggccgaaaagatctcaaacattcatctcttacaagatttagatgactatcatcaatatgccttaacatcagtagtttaggagactctagcccactttgtctagttgcaaactgtaattctccctgtggtcccactgaatatcattccacagcattcttggatatatatgatgtattgacaattcaggtctagatagaaatggcccctattgcttcatgaagaatatcctttccccaaatgtcttctgaggagctcaagattaaagctagtatcctgtacagacacttgcaggactgctagtatgatatatattgaccctatgggagacaaaatgtgggcaaccacccctattctgggatccttaaaagatgagaaccatatcagaaagttccttcacagctacccccaactaggtcagggaatttgatgcctgggcttatctagtaataaatattcaactttatg

SEQ ID NO: 51874 - DNA, 186 bp, Homo sapiens
ctaacatccatatttaaagccgcaaagccaagaaacagaagcccaaatggggagtcctcgtcaccagacagtgggtacctgtctcctaaaaatcagccgtcagccctgctgagtgcctcagccagccagagccctatggaagaccaaggggagatggaaagagaggtcaagtcccctggggccagg

SEQ ID NO: 51875 - DNA, 334 bp, Homo sapiens
gcaagagaacctgatataatatctataaattttgattccctggggtataacaagtaaataatttttaaatggtgcttagcaagattggttcatggaaaatgaagcaattatggcttgaatttatatgtacaatatttattgtcttaattttaatttaaaacgaatgacatgtctctttttttaaaaaaagtcttcttttaaagatcttgtagttgatgtgatgagctatgcactgctaaatatttatccacacataaatatttgaaaaggaatatgaatagtcatggatgtagtttcatctcagtgctccatggaggaagtgtttcacctctct

SEQ ID NO: 51876 - DNA, 2871 bp, Homo sapiens
atgccccgcgtctcggcgcctttggtgctgcttcctgcgtggctcgtgatggtcgcctgcagcccgcactccttgaggatcgctgctatcttggacgaccccatggagtgcagcagaggggagcggctctccatcaccctggccaagaaccgcatcaaccgcgctcctgagaggctgggcaaggccaaggtcgaagtggacatctttgagcttctcagagacagcgagtacgagactgcagaaaccatgtgtcagatcctccccaagggggtggtcgctgtcctcggaccatcgtccagcccagcctccagctccatcatcagcaacatctgtggagagaaggaggtccctcacttcaaagtggccccagaggagttcgtcaagttccagttccagagattcacaaccctgaacctccaccccagcaacactgacatcagcgtggctgtagctgggatcctgaacttcttcaactgcaccaccgcctgcctcatctgtgccaaagcagaatgccttttaaacctagagaagctgctccggcaattccttatctccaaggacacgctgtccgtccgcatgctggatgacacccgggaccccaccccgctcctcaaggagatccgggacgacaagaccgccaccatcatcatccacgccaacgcctccatgtcccacaccatcctcctgaaggcagccgaacttgggatggtgtcagcctattacacatacatcttcactaatctggagttctcactccagagaacggacagccttgtggatgatcgtgtcaacatcctgggattttccattttcaaccaatcccatgctttcttccaagagtttgcccagagcctcaaccagtcctggcaggagaactgtgaccatgtgcccttcactgggcctgcgctctcctcggccctgctgtttgatgctgtctatgctgtggtgactgcggtgcaggaactgaaccggagccaagagatcggcgtgaagcccttgtcctgcggctcggcccagatctggcagcacggcaccagcctcatgaactacctgcgcatggtagaattggaaggtcttaccggccacattgaattcaacagcaaaggccagaggtccaactacgctttgaaaatcttacagttcacaaggaatggttttcggcagatcggccagtggcacgtggcagagggcctcagcatggacagccacctctatgcctccaacatctcggacactctcttcaacaccaccctggtcgtcaccaccatcctggaaaacccatatttaatgctgaaggggaaccaccaggagatggaaggcaatgaccgctacgagggcttctgtgtggacatgctcaaggagctggcagagatcctccgattcaactacaagatccgcctggttggggatggcgtgtacggcgttcccgaggccaacggcacctggacgggaatggtcggggagctgatcgctaggaaagcagatctggctgtggcaggcctcaccattacagctgaacgggagaaggtgattgatttctctaagccattcatgactctgggaattagcattctttaccgcattcatatgggacgcaaacccggctatttctccttcctggacccattttctccgggcgtctggctcttcatgcttctagcctatctggccgtcagctgtgtcctcttcctggtggctcggttgacgccctacgagtggtacagcccacacccatgtgcccagggccggtgcaacctcctggtgaaccagtactccctgggcaacagcctctggtttccggtcggggggttcatgcagcagggctccaccatcgcccctcgcgccttatccacccgctgtgtcagtggcgtctggtgggcattcacgctgatcatcatctcatcctacacggccaacctggcagccttcctgaccgtgcagcgcatggatgtgcccattgagtcagtggatgacctggctgaccagaccgccattgaatatggcacaattcacggaggctccagcatgaccttcttccaaaattcccgctaccagacctaccaacgcatgtggaattacatgtattccaagcagcccagcgtgttcgtgaagagcacagaggagggaatcgccagggtgttgaattccaactacgccttcctcctggaatccaccatgaacgagtactatcggcagcgaaactgcaacctcactcagattgggggcctgctggacaccaagggctatgggattggcatgccagtcggctcggttttccgggacgagtttgatctggccattctccagctgcaggagaacaaccgcctggagatcctgaagcgcaaatggtgggaaggagggaagtgccccaaggaggaagatcacagagctaaaggcctgggaatggagaatattggtggaatctttgtggttcttatttgtggcttaatcgtggccatttttatggctatgttggagtttttatggactctcagacactcagaagcaactgaggtgtccgtctgccaggagatggtgaccgagctgcgcagcattatcctgtgtcaggacagtatccacccccgccggcggcgcgccgcagtcccgccgccccggccccccatccccgaggagcgccgaccgcggggcacggcgacgctcagcaacgggaagctgtgcggggcaggggagcccgaccagctcgcgcagagactggcgcaggaggccgccctggtggcccgcggctgcacgcacatccgcgtctgccccgagtgccgccgcttccagggcctgcgggcacggccgtcgcccgcccgcagcgaggagagcctggagtgggagaaaaccaccaacagcagcgagcccgagtag

SEQ ID NO: 51877 - DNA, 1303 bp, Homo sapiens
aaggccaggcgtggtagcatgtgcctgtaatcccagtgctttgggacaccgaggcaggaggatcactcgagcccaggagtgcgaggctgcagtgacgctagacttcaggaagaccccccatttctgctcccctcctgggcttggagaagagtacagctgctcttgactggtgggaccttttgctggctaggggtgatgggagaagcaagagagggatccacacacctgcgcttagctttctatgacctgggcggatggaggccaaagctgctatcttggacgaccccatggagtgcagcagaggggagcggctctccatcaccctggccaagaaccgcatcaaccgcgctcctgagaggctgggcaaggccaaggtcgaagtggacatctttgagcttctcagagacagcgagtacgagactgcagaaaccatgtgtcagatcctccccaagggggtggtcgctgtcctcggaccatcgtccagcccagcctccagctccatcatcagcaacatctgtggagagaaggaggtccctcacttcaaagtggccccagaggagttcgtcaagttccagttccagagattcacaaccctgaacctccaccccagcaacactgacatcagcgtggctgtagctgggatcctgaacttcttcaactgcaccaccgcctgcctcatctgtgccaaagcagaatgccttttaaacctagagaagctgctccggcaattccttatctccaaggacacgctgtccgtccgcatgctggatgacacccgggaccccaccccgctcctcaaggagatccgggacgacaagaccgccaccatcatcatccacgccaacgcctccatgtcccacaccatcctcctgaaggcagccgaacttgggatggtgtcagcctattacacatacatcttcactaatctggagttcacaggccagcggggaagcatttgaggctcaaataatgatgaccgtggagagattttactaggggcggctgaggctgctggacagctctcagcagaagttggccaagttcaccaagctgcattcgactgcctgtttctctgagccatcttagccacacaagcctgcagttatactgcattgacttctaattccttcccacctgctgcaccctggtacttgctgtgactccttttctgggttcttcatgctgaacagatgcgatgtgaggcaaacctcagctctctcatgttctcagtgaagtgctcagttttgcctggcgcacagttggtggtcagtaaattgtagtagaggagtagaggccggcagta

SEQ ID NO: 51878 - DNA, 455 bp, Homo sapiens
tccgcaggcattgaggtggataatctgagccctggggtggaggcttcagtgagccgtggtctcaccactgcactccagtctgagtaacagagtaagactctgtctccaaaaaataaaaataataaataataattattaactagtaacagttggttacctactaaaggggtaaacaggaaaacaggaatagcaaatgaaagaaacagctgtggcttccaggtgatgggtgaacaagggtggaaataagcatctggggggctgcctgctggctgaactccagggatctgggcagagtgtgtgggagtcttgggaatattcaggattcccccaaccttagtgctggggaaacaggccagaggcaggcaggcctagcagctctggaggggctgccgttggagccgagcaactccctggaggctgccctgagaccctcgtcctggaagtgatctctcacc

SEQ ID NO: 51879 - DNA, 374 bp, Homo sapiens
ccaaatagaaacagctctgctctgcacctcccaccaagaaggatgaaaactgcgagtgaattctgcatcttcaattgaggtaccaaggttctctcattgggactgactaggtggttggcgtgacccacagagagcaataaaaagcagggtggagtgagggcccacccgagagctacacagcgcaaagggagctccctcctccagctaagggaggtggtgagggattgtgctagcctccctgaagatcatgcttttcccacggatccttgcaacctgaggatcaggaggtccccacgtgagcccacgccaccagggccttggatcccaagaacactgctgtgcagactcacagaggctgcgcaagtgggcagaaa

SEQ ID NO: 51880 - DNA, 329 bp, Homo sapiens
tagaaaaagctccaaaaattagattccggccctcaaaccccacaacaggacttaattaacctcaccttcaaggtgtacaataatagaacagaggcagccaagtagcaacgtatttctgagttgcaattccttgcctccactgtgagagaaacctcagccacatctccagcacacaagaacttcataacgcctgaaccgcagcagccaggggttcctccaggactgcccgccccaggatcttgcttcaagtgctggaaatctgccactgggccaaggaatgcctgcagcccgggattcctcctaagccatgttctatctgtacgggaccc

SEQ ID NO: 51881 - DNA, 372 bp, Homo sapiens
ggcccctgtgcacagtgaagggacatgccagaaaccagcagatacttgactgagacagaccaggacaggagcttgtggcaggaaggataaggaaaaatgcaaatctaccatcctgccctcagggtgctaacccttcgggggagaatactttctcccaccaggaagaaaccagaaagtaaaaatgtaggatgaaatgaattagtggattgtgtagaattctggaagcgtggtgggaatccaccataagggaaagagaaagtcttctgggaagcggcgttgagttgaggcccagtgtcaggaaagctctggtatagtggggccatctggtccctcttacagggccccctcccactttgttttggtaagatggga

SEQ ID NO: 51882 - DNA, 620 bp, Homo sapiens
tggtacatcctgtccctcatatcttcatgactgcaacatttactgtacttgattgcaaagtcttacagatgtatgactgattaaccgtactatgtttatgcaatcatccccttattttttagttatcttaattcttccctgtatgtactgctacttctgtgagtgtccttggaacaatttggctggtcatgtgcccagatgacatcaagtggacaagtggatcaagggcagttttctaaaaatgtgtgtgtatgtagagggggtgagtcaggagcctgttagcatgagctctgtgttgggcactgagatcctgagtgccagttctctgctgtccttgaaaactgctcctgacacaggggcattttctttctttggcctaaacctgtcttttttggcataaaccctgtgcaaagctcggtccataatagtttataaataaaccctggttattaattgtttatacccatatttttttgttttggttctgattttgtctaaagaaaggggatcttggctccctttaatgtccatatccaatcatcttccattggcagtacctaattttgaagaaggcaacactgactgagggaattaggaacagttttagttgatagttatgt

SEQ ID NO: 51883 - DNA, 398 bp, Homo sapiens
ttttggggggaatcctggatcctcttctgcagggaccccagtcctgagaggcccagcctggggcttagtccactattctgagcaaaggcctgtggagatcagggaacaatggagttttcacccaggtctgacttagtgggcatgataggtccagaatctatgtattgtcatttcttaaagttcgaaagcatcattgaattgacacactcagcaaatggaagcagccacatattctgcactcctggacccggggagtgtgggccattatggtggcaaaggtgcaggggagtcctggacctgctcctccctgtgaaaacgttgaaggaagcaatgccaagctcctggagaaatggaaaggtgcagagagggcatcaggcacttagaggtgttggtgacag

SEQ ID NO: 51884 - DNA, 253 bp, Homo sapiens
gagaaggacccctgagtcctcaaatactctggctgggcctggagtcagctgcggaggggcagagatctactgctgggtgctctgtgaccttgcgctagttccttaaaccctctgtgcctcggtttcctcagtaacatggaaatggtaatagtccttccatcatagtgttgtttcgagaattaaatgagataattacataaagcacctagtggctggcttaggaaggaactcactcactttttttgagatggag

SEQ ID NO: 51885 - DNA, 290 bp, Homo sapiens
ggaacttctgtctcagtgttcagtttttacttagtaccttgacactactcttagttcctggctctactggtataattttgggatttgggggtgtatctatttttttgtgcctcagttcttctgaccctgtccccgcacccctctcccgccccccatttcccaggactgtggacctatttcatttcttcaagaatgaaatttccttcttccactatgcaataccccgttctagaaatttgcctttcatctctttccttgaatcagagagctgccctgtttttgcaagattt

SEQ ID NO: 51886 - DNA, 341 bp, Homo sapiens
gctccctagatactgccttggaatgttactcttggaaaacagtggctacagagtgatgcctttctccataactttaatttaccttaagaaaagctttgagtgctactgagtcgggaatgaaaaacctagagaatgttctgtcctgtgggagcaaggagtatagttagtccctgtattactacccaaaggggcatgaggcttcaccctccttgggctccctagggacttataatgccttcctgtaattatcgggccagttaatttaatactaatccacttaattcagttaacatcagatttgtcctagggatcttgttacatccttttgtatactaaaagag

SEQ ID NO: 51887 - DNA, 8244 bp, Homo sapiens
  misc_feature (6424)..(6424): n is a, c, g, or t
agcggagtgctgaggacgcgcgcagcgctgctcaaggtctctctctctcagcaccctcgccggccggcgtctgacgcgggtgccagggtctccgggcacctttcagtgtccattccctcagccagccaggactccgcaacccagcagttgccgctgcggtcacagcccgaggggacctgcggacaggacgccggcaggaggaggggtgcgcagcgcccgcgcagagcgtctccctcgctacgcagcgagacccgggcctcccggccccaggagcccccagctgcctcggccaggtgtgtgggactgaagttcttggagaagggagtccaactcttcaaggtgaactatgaccactttactctgggttttcgtgactctgagggtcatcactgcagctgtcactgtagaaacttcagaccatgacaactcgctgagtgtcagcatcccccaaccgtccccgctgagggtcctcctggggacctccctcaccatcccctgctatttcatcgaccccatgcaccctgtgaccaccgccccttctaccgccccactggccccaagaatcaagtggagccgtgtgtccaaggagaaggaggtagtgctgctggtggccactgaagggcgcgtgcgggtcaacagtgcctatcaggacaaggtctcactgcccaactacccggccatccccagtgacgccaccttggaagtccagagcctgcgctccaatgactctggggtctaccgctgcgaggtgatgcatggcatcgaggacagcgaggccaccctggaagtcgtggtgaaaggcatcgtgttccattacagagccatctctacacgctacaccctcgactttgacagggcgcagcgggcctgcctgcagaacagtgccatcattgccacgcctgagcagctgcaggccgcctacgaagacggcttccaccagtgtgacgccggctggctggctgaccagactgtcagataccccatccacactccccgggaaggctgctatggagacaaggatgagtttcctggtgtgaggacgtatggcatccgagacaccaacgagacctatgatgtgtactgcttcgccgaggagatggagggtgaggtcttttatgcaacatctccagagaagttcaccttccaggaagcagccaatgagtgccggcagctgggtgcccggctggccaccacgggccagctctacctggcctggcaggctggcatggacatgtgcagcgccggctggctggccgaccgcagcgtgcgctaccccatctccaaggcccggcccaactgcggtggcaacctcctgggcgtgaggaccgtctacgtgcatgccaaccagacgggctaccccgacccctcatcccgctacgacgccatctgctacacaggtgaagactttgtggacatcccagaaaacttctttggagtggggggtgaggaggacatcaccgtccagacagtgacctggcctgacatggagctgccactgcctcgaaacatcactgagggtgaagcccgaggcagcgtgatccttaccgtaaagcccatcttcgaggtctcccccagtcccctggaacccgaggagcccttcacgtttgcccctgaaataggggccactgccttcgctgaggttgagaatgagactggagaggccaccaggccctggggctttcccacacctggcctgggccctgccacggcattcaccagtgaggacctcgtcgtgcaggtgaccgctgtccctgggcagccgcatttgccagggggggtcgtcttccactaccgcccgggacccacccgctactcgctgacctttgaggaggcacagcaggcctgccctggcacgggggcggtcattgcctcgccggagcagctccaggccgcctacgaagcaggctatgagcagtgtgacgccggctggctgcgggaccagaccgtcagataccccattgtgagcccacggaccccatgcgtgggtgacaaggacagcagcccaggggtcaggacctatggcgtgcgcccatcaacagagacctacgatgtctactgctttgtagacagacttgagggggaggtgttcttcgccacacgccttgagcagttcaccttccaggaagcactggagttctgtgaatctcacaatgccactgccaccacgggccagctctacgccgcctggagccgcggcctggacaagtgctatgccggctggctggccgacggcagcctccgctaccccatcgtcaccccaaggcctgcctgcggtggggacaagccaggcgtgagaacggtctacctctaccctaaccagacgggcctcccagacccactgtcccggcaccatgccttctgcttccgaggcatttcagcggttccttctccaggagaagaagagggtggcacacccacatcaccctctggtgtggaggagtggatcgtgacccaagtggttcctggtgtggctgctgtccccgtagaagaggagacaactgctgtaccctcaggggagactactgccatcctagagttcaccaccgagccagaaaaccagacagaatgggaaccagcctataccccagtgggcacatccccgctgccagggatccttcctacttggcctcctactggcgccgaaacagaggaaagtacagaaggcccttctgcaactgaagtgccctctgcctcagaggaaccatccccctcagaggtgccattcccctcagaggagccatccccctcagaggaaccattcccctcagtgaggccattcccctcagtggagctgttcccctcagaggagccattcccctccaaggagccatccccctcagaggaaccatcagcctcagaagagccgtatacaccttcaccccccgagcccagctggactgagctgcccagctctggggaggaatctggggcccctgatgtcagtggtgacttcacaggcagtggagatgtttcaggacaccttgacttcagtgggcagctgtcaggggacagggcaagtggactgccctctggagacctggactccagtggtcttacttccacagtgggctcaggcctgactgtggaaagtggactaccctcaggggatgaagagagaattgagtggcccagcactcctacggttggtgaactgccctctggagctgagatcctagagggctctgcctctggagttggggatctcagtggacttccttctggagaagttctagagacctctgcctctggagtaggagacctcagtgggcttccttctggagaagttctagagaccactgcccctggagtagaggacatcagcgggcttccttctggagaagttctagagaccactgcccctggagtagaggacatcagcgggcttccttctggagaagttctagagaccactgcccctggagtagaggacatcagcgggcttccttctggagaagttctagagaccactgcccctggagtagaggacatcagcgggcttccttctggagaagttctagagaccactgcccctggagtagaggacatcagcgggcttccttctggagaagttctagagaccgctgcccctggagtagaggacatcagcgggcttccttctggagaagttctagagaccgctgcccctggagtagaggacatcagcgggcttccttctggagaagttctagagaccgctgcccctggagtagaggacatcagcgggcttccttctggagaagttctagagaccgctgcccctggagtagaggacatcagcgggcttccttctggagaagttctagagaccgctgcccctggagtagaggacatcagcgggcttccttctggagaagttctagagaccgctgcccctggagtagaggacatcagcgggcttccttctggagaagttctagagaccgctgcccctggagtagaggacatcagcgggcttccttctggagaagttctagagactgctgcccctggagtagaggacatcagcgggcttccttctggagaagttctagagactgctgcccctggagtagaggacatcagcgggcttccttctggagaagttctagagactgctgcccctggagtagaggacatcagcgggcttccttctggagaagttctagagactgctgcccctggagtagaggacatcagcgggcttccttctggagaagttctagagactactgcccctggagtagaggagatcagcgggcttccttctggagaagttctagagactactgcccctggagtagatgagatcagtgggcttccttctggagaagttctagagactactgcccctggagtagaggagatcagcgggcttccttctggagaagttctagagacttctacctctgcggtaggggacctcagtggacttccttctggaggagaagttctagagatttctgtctctggagtagaggacatcagtgggcttccttctggagaggttgtagagacttctgcctctggaatagaggatgtcagtgaacttccttcaggagaaggtctagagacctctgcttctggagtagaggacctcagcaggctcccttctggagaagaagttctagagatttctgcctctggatttggggacctcagtggagttccttctggaggagaaggtctagagacctctgcttctgaagtagggactgacctcagtgggcttccttctggaagggagggtctagagacttcagcttctggagctgaggacctcagtgggttgccttctggaaaagaagacttggtggggtcagcttctggagacttggacttgggcaaactgccttctggaactctaggaagtgggcaagctccagaaacaagtggtcttccctctggatttagtggtgagtattctggggtggaccttggaagtggcccaccctctggcctgcctgactttagtggacttccatctggattcccaactgtttccctagtggattctacattggtggaagtggtcacagcctccactgcaagtgaactggaagggaggggaaccattggcatcagtggtgcaggagaaatatctggactgccctccagtgagctggacattagtgggagagctagtggactcccttcaggaactgaactcagtggccaagcatctgggtctcctgatgtcagtggggaaatacctggactctttggtgtcagtggacagccatcagggtttcctgacactagtggggaaacatctggagtgactgagcttagcgggctgtcctctggacaaccaggtgttagtggagaagcatctggagttctttatggcactagtcaaccctttggcataactgatctgagtggagaaacatctggggtccctgatctcagtgggcagccttcagggttaccagggttcagtggggcaacatcaggagtccctgacctggtttctggtaccacgagtggcagcggtgaatcttctgggattacatttgtggacaccagtttggttgaagtggcccctactacatttaaagaagaagaaggcttagggtctgtggaactcagtggcctcccttccggagaggcagatctgtcaggcaaatctgggatggtggatgtcagtggacagttttctggaacagtcgattccagtgggtttacatcccagactccggaattcagtggcctaccaagtggcatagctgaggtcagtggagaatcctccagagctgagattgggagcagcctgccctcgggagcatattatggcagtggaactccatctagtttccccacggtctctcttgtagacagaactttggtggaatctgtaacccaggctccaacagcccaagaggcaggagaagggccttctggcattttagaactcagtggtgctcattctggagcaccagacatgtctggggagcattctggatttctggacctaagtgggctgcagtccgggctgatagagcccagcggagagccaccaggtactccatattttagtggggattttgccagcaccaccaatgtaagtggagaatcctctgtagccatgggcaccagtggagaggcctcaggacttccagaagttactttaatcacttctgagttcgtggagggtgttactgaaccaactatttctcaggaactaggccaaaggccccctgtgacacacacaccccagctttttgagtccagtggaaaagtctccacagctggggacgttagtggagctaccccagtgctccctgggtctggagtagaagtatcatcagtcccagaatctagcagtgagacgtccgcctatcctgaagctgggttcggggcatctgccgcccctgaggccagcagagaagattctgggtcccctgatctgagtgaaaccacctctgcattccacgaagctaacctngagagatcctctggcctaggagtgagcggcagcactttgacatttcaagaaggcgaggcgtccgctgccccagaagtgagtggagaatccaccaccaccagtgatgtggggacagaggcaccaggcttgccttcagccactcccacggcttctggagacaggactgaaatcagcggagacctgtctggtcacacctcgcagctgggcgttgtcatcagcaccagcatcccagagtctgagtggacccagcagacccagcgccctgcagagacgcatctagaaattgagtcctcaagcctcctgtactcaggagaagagactcacacagtcgaaacagccacctccccaacagatgcttccatcccagcttctccggaatggaaacgtgaatcagaatcaactgctgcagcccccgccaggtcctgtgcagaggagccctgtggagctgggacctgcaaggagacagagggacacgtcatatgcctgtgcccccctggctacactggcgagcactgtaacatagaccaggaggtatgtgaggagggctggaacaagtaccagggccactgttaccgccacttcccggaccgcgagacctgggtggatgctgagcgccggtgtcgggagcagcagtcacacctgagcagcatcgtcacccccgaggagcaggagtttgtcaacaacaatgcccaagactaccagtggatcggcctgaacgacaggaccatcgaaggggacttccgctggtcagatggacaccccatgcaatttgagaactggcgccccaaccagcctgacaacttttttgccgctggagaggactgtgtggtgatgatctggcacgagaagggcgagtggaatgatgttccctgcaattaccacctccccttcacgtgtaaaaagggcacagtggcctgcggagagccccctgtggtggagcatgccaggaccttcgggcagaagaaggaccggtatgagatcaattccctggtgcggtaccagtgcacagaggggtttgtccagcgccacatgcccaccatccggtgccagcccagcgggcactgggaggagcctcagatcacctgcacagaccccaccacctacaaacgcagactacagaagcggagctcacggcaccctcggaggagccgccccagcacagcccactgagaagagcttccaggacgcacccaggacgctgagcccaggagcctgccaggctgacgtgcatcccacccagacggtgtcctcttcttgtcgctttttgtcatataaggaatcccattaaagaaggaaaaaaataaatcccacatttgtgtatgcacccactcacccctccaaatcagcaaaaccgcatctaatttgtccgccgaatgccaaagcaaagcaaacttattataacccttggactgagtttagagacatttcttcaatttcccatcgtgcctttccagggaccagtgcagggacagggggagaaggggaggggttaagttaaataaagaagattatttttgtttcctgactttatccaagagcagtgcaatcgttggttatttcacctccagggagagctagggaggagggaggagggctccaaaggagctggaaggagcagaggcctgagagcaggaagaactcggaaccgcagctgaatgtattggatgagaaggagccaggagggctacaccatctgtatgagggaaaagccttgggggagaggggtgggttcctgcctcctgccgagggtaagccggcaggagagagccatcagagggacctccgctgcctgggagttgggttccctccaagggtccctc

SEQ ID NO: 51888 - DNA, 3554 bp, Homo sapiens
  misc_feature (1848)..(1848): n is a, c, g, or t
ggcacgagcccaaatccagaggcagaaatctctagaacttcttctccagaaggggacctcagtggagttccttctggaggagaaggtctagagacctctgcttctgaagtagggactgacctcagtgggcttccttctggaagggagggtctagagacttcagcttctggagctgaggacctcagtgggttgccttctggaaaagaagacttggtggggtcagcttctggagacttggacttgggcaaactgccttctggaactctaggaagtgggcaagctccagaaacaagtggtcttccctctggatttagtggtgagtattctggggtggaccttggaagtggcccaccctctggcctgcctgactttagtggacttccatctggattcccaactgtttccctagtggattctacattggtggaagtggtcacagcctccactgcaagtgaactggaagggaggggaaccattggcatcagtggtgcaggagaaatatctggactgccctccagtgagctggacattagtgggagagctagtggactcccttcaggaactgaactcagtggccaagcatctgggtctcctgatgtcagtggggaaatacctggactctttggtgtcagtggacagccatcagggtttcctgacactagtggggaaacatctggagtgactgagcttagcgggctgtcctctggacaaccaggtgttagtggagaagcatctggagttctttatggcactagtcaaccctttggcataactgatctgagtggagaaacatctggggtccctgatctcagtgggcagccttcagggttaccagggttcagtggggcaacatcaggagtccctgacctggtttctggtaccacgagtggcagcggtgaatcttctgggattacatttgtggacaccagtttggttgaagtggcccctactacatttaaagaagaagaaggcttagggtctgtggaactcagtggcctcccttccggagaggcagatctgtcaggcaaatctgggatggtggatgtcagtggacagttttctggaacagtcgattccagtgggtttacatcccagactccggaattcagtggcctaccaagtggcatagctgaggtcagtggagaatcctccagagctgagattgggagcagcctgccctcgggagcatattatggcagtggaactccatctagtttccccacggtctctcttgtagacagaactttggtggaatctgtaacccaggctccaacagcccaagaggcaggagaagggccttctggcattttagaactcagtggtgctcattctggagcaccagacatgtctggggagcattctggatttctggacctaagtgggctgcagtccgggctgatagagcccagcggagagccaccaggtactccatattttagtggggattttgccagcaccaccaatgtaagtggagaatcctctgtagccatgggcaccagtggagaggcctcaggacttccagaagttactttaatcacttctgagttcgtggagggtgttactgaaccaactatttctcaggaactaggccaaaggccccctgtgacacacacaccccagctttttgagtccagtggaaaagtctccacagctggggacgttagtggagctaccccagtgctccctgggtctggagtagaagtatcatcagtcccagaatctagcagtgagacgtccgcctatcctgaagctgggttcggggcatctgccgcccctgaggccagcagagaagattctgggtcccctgatctgagtgaaaccacctctgcattccacgaagctaacctngagagatcctctggcctaggagtgagcggcagcactttgacatttcaagaaggcgaggcgtccgctgccccagaagtgagtggagaatccaccaccaccagtgatgtggggacagaggcaccaggcttgccttcagccactcccacggcttctggagacaggactgaaatcagcggagacctgtctggtcacacctcgcagctgggcgttgtcatcagcaccagcatcccagagtctgagtggacccagcagacccagcgccctgcagagacgcatctagaaattgagtcctcaagcctcctgtactcaggagaagagactcacacagtcgaaacagccacctccccaacagatgcttccatcccagcttctccggaatggaaacgtgaatcagaatcaactgctgcagaccaggaggtatgtgaggagggctggaacaagtaccagggccactgttaccgccacttcccggaccgcgagacctgggtggatgctgagcgccggtgtcgggagcagcagtcacacctgagcagcatcgtcacccccgaggagcaggagtttgtcaacaacaatgcccaagactaccagtggatcggcctgaacgacaggaccatcgaaggggacttccgctggtcagatggacaccccatgcaatttgagaactggcgccccaaccagcctgacaacttttttgccgctggagaggactgtgtggtgatgatctggcacgagaagggcgagtggaatgatgttccctgcaattaccacctccccttcacgtgtaaaaagggcacagtggcctgcggagagccccctgtggtggagcatgccaggaccttcgggcagaagaaggaccggtatgagatcaattccctggtgcggtaccagtgcacagaggggtttgtccagcgccacatgcccaccatccggtgccagcccagcgggcactgggaggagcctcagatcacctgcacagaccccaccacctacaaacgcagactacagaagcggagctcacggcaccctcggaggagccgccccagcacagcccactgagaagagcttccaggacgcacccaggacgctgagcccaggagcctgccaggctgacgtgcatcccacccagacggtgtcctcttcttgtcgctttttgtcatataaggaatcccattaaagaaggaaaaaaataaatcccacatttgtgtatgcacccactcacccctccaaatcagcaaaaccgcatctaatttgtccgccgaatgccaaagcaaagcaaacttattataacccttggactgagtttagagacatttcttcaatttcccatcgtgcctttccagggaccagtgcagggacagggggagaaggggaggggttaagttaaataaagaagattatttttgtttcctgactttatccaagagcagtgcaatcgttggttatttcacctccagggagagctagggaggagggaggagggctccaaaggagctggaaggagcagaggcctgagagcaggaagaactcggaaccgcagctgaatgtattggatgagaaggagccaggagggctacaccatctgtatgagggaaaagccttgggggagaggggtgggttcctgcctcctgccgagggtaagccggcaggagagagccatcagagggacctccgctgcctgggagttgggttccctccaagggtccctc

SEQ ID NO: 51889 - DNA, 7290 bp, Homo sapiens
  misc_feature (5684)..(5684): n is a, c, g, or t
gaagcaagggctgaagactccctggtctctttctctccatggcccaaggagaacagtcaggcatcgtgttccattacagagccatctctacacgctacaccctcgactttgacagggcgcagcgggcctgcctgcagaacagtgccatcattgccacgcctgagcagctgcaggccgcctacgaagacggcttccaccagtgtgacgccggctggctggctgaccagactgtcagataccccatccacactccccgggaaggctgctatggagacaaggatgagtttcctggtgtgaggacgtatggcatccgagacaccaacgagacctatgatgtgtactgcttcgccgaggagatggagggtgaggtcttttatgcaacatctccagagaagttcaccttccaggaagcagccaatgagtgccggcagctgggtgcccggctggccaccacgggccagctctacctggcctggcaggctggcatggacatgtgcagcgccggctggctggccgaccgcagcgtgcgctaccccatctccaaggcccggcccaactgcggtggcaacctcctgggcgtgaggaccgtctacgtgcatgccaaccagacgggctaccccgacccctcatcccgctacgacgccatctgctacacaggtgaagactttgtggacatcccagaaaacttctttggagtggggggtgaggaggacatcaccgtccagacagtgacctggcctgacatggagctgccactgcctcgaaacatcactgagggtgaagcccgaggcagcgtgatccttaccgtaaagcccatcttcgaggtctcccccagtcccctggaacccgaggagcccttcacgtttgcccctgaaataggggccactgccttcgctgaggttgagaatgagactggagaggccaccaggccctggggctttcccacacctggcctgggccctgccacggcattcaccagtgaggacctcgtcgtgcaggtgaccgctgtccctgggcagccgcatttgccagggggggtcgtcttccactaccgcccgggacccacccgctactcgctgacctttgaggaggcacagcaggcctgccctggcacgggggcggtcattgcctcgccggagcagctccaggccgcctacgaagcaggctatgagcagtgtgacgccggctggctgcgggaccagaccgtcagataccccattgtgagcccacggaccccatgcgtgggtgacaaggacagcagcccaggggtcaggacctatggcgtgcgcccatcaacagagacctacgatgtctactgctttgtagacagacttgagggggaggtgttcttcgccacacgccttgagcagttcaccttccaggaagcactggagttctgtgaatctcacaatgccactgccaccacgggccagctctacgccgcctggagccgcggcctggacaagtgctatgccggctggctggccgacggcagcctccgctaccccatcgtcaccccaaggcctgcctgcggtggggacaagccaggcgtgagaacggtctacctctaccctaaccagacgggcctcccagacccactgtcccggcaccatgccttctgcttccgaggcatttcagcggttccttctccaggagaagaagagggtggcacacccacatcaccctctggtgtggaggagtggatcgtgacccaagtggttcctggtgtggctgctgtccccgtagaagaggagacaactgctgtaccctcaggggagactactgccatcctagagttcaccaccgagccagaaaaccagacagaatgggaaccagcctataccccagtgggcacatccccgctgccagggatccttcctacttggcctcctactggcgccgaaacagaggaaagtacagaaggcccttctgcaactgaagtgccctctgcctcagaggaaccatccccctcagaggtgccattcccctcagaggagccatccccctcagaggaaccattcccctcagtgaggccattcccctcagtggagctgttcccctcagaggagccattcccctccaaggagccatccccctcagaggaaccatcagcctcagaagagccgtatacaccttcaccccccgagcccagctggactgagctgcccagctctggggaggaatctggggcccctgatgtcagtggtgacttcacaggcagtggagatgtttcaggacaccttgacttcagtgggcagctgtcaggggacagggcaagtggactgccctctggagacctggactccagtggtcttacttccacagtgggctcaggcctgactgtggaaagtggactaccctcaggggatgaagagagaattgagtggcccagcactcctacggttggtgaactgccctctggagctgagatcctagagggctctgcctctggagttggggatctcagtggacttccttctggagaagttctagagacctctgcctctggagtaggagacctcagtgggcttccttctggagaagttctagagaccactgcccctggagtagaggacatcagcgggcttccttctggagaagttctagagaccactgcccctggagtagaggacatcagcgggcttccttctggagaagttctagagaccactgcccctggagtagaggacatcagcgggcttccttctggagaagttctagagaccactgcccctggagtagaggacatcagcgggcttccttctggagaagttctagagaccactgcccctggagtagaggacatcagcgggcttccttctggagaagttctagagaccgctgcccctggagtagaggacatcagcgggcttccttctggagaagttctagagaccgctgcccctggagtagaggacatcagcgggcttccttctggagaagttctagagaccgctgcccctggagtagaggacatcagcgggcttccttctggagaagttctagagaccgctgcccctggagtagaggacatcagcgggcttccttctggagaagttctagagaccgctgcccctggagtagaggacatcagcgggcttccttctggagaagttctagagaccgctgcccctggagtagaggacatcagcgggcttccttctggagaagttctagagaccgctgcccctggagtagaggacatcagcgggcttccttctggagaagttctagagactgctgcccctggagtagaggacatcagcgggcttccttctggagaagttctagagactgctgcccctggagtagaggacatcagcgggcttccttctggagaagttctagagactgctgcccctggagtagaggacatcagcgggcttccttctggagaagttctagagactgctgcccctggagtagaggacatcagcgggcttccttctggagaagttctagagactactgcccctggagtagaggagatcagcgggcttccttctggagaagttctagagactactgcccctggagtagatgagatcagtgggcttccttctggagaagttctagagactactgcccctggagtagaggagatcagcgggcttccttctggagaagttctagagacttctacctctgcggtaggggacctcagtggacttccttctggaggagaagttctagagatttctgtctctggagtagaggacatcagtgggcttccttctggagaggttgtagagacttctgcctctggaatagaggatgtcagtgaacttccttcaggagaaggtctagagacctctgcttctggagtagaggacctcagcaggctcccttctggagaagaagttctagagatttctgcctctggatttggggacctcagtggagttccttctggaggagaaggtctagagacctctgcttctgaagtagggactgacctcagtgggcttccttctggaagggagggtctagagacttcagcttctggagctgaggacctcagtgggttgccttctggaaaagaagacttggtggggtcagcttctggagacttggacttgggcaaactgccttctggaactctaggaagtgggcaagctccagaaacaagtggtcttccctctggatttagtggtgagtattctggggtggaccttggaagtggcccaccctctggcctgcctgactttagtggacttccatctggattcccaactgtttccctagtggattctacattggtggaagtggtcacagcctccactgcaagtgaactggaagggaggggaaccattggcatcagtggtgcaggagaaatatctggactgccctccagtgagctggacattagtgggagagctagtggactcccttcaggaactgaactcagtggccaagcatctgggtctcctgatgtcagtggggaaatacctggactctttggtgtcagtggacagccatcagggtttcctgacactagtggggaaacatctggagtgactgagcttagcgggctgtcctctggacaaccaggtgttagtggagaagcatctggagttctttatggcactagtcaaccctttggcataactgatctgagtggagaaacatctggggtccctgatctcagtgggcagccttcagggttaccagggttcagtggggcaacatcaggagtccctgacctggtttctggtaccacgagtggcagcggtgaatcttctgggattacatttgtggacaccagtttggttgaagtggcccctactacatttaaagaagaagaaggcttagggtctgtggaactcagtggcctcccttccggagaggcagatctgtcaggcaaatctgggatggtggatgtcagtggacagttttctggaacagtcgattccagtgggtttacatcccagactccggaattcagtggcctaccaagtggcatagctgaggtcagtggagaatcctccagagctgagattgggagcagcctgccctcgggagcatattatggcagtggaactccatctagtttccccacggtctctcttgtagacagaactttggtggaatctgtaacccaggctccaacagcccaagaggcaggagaagggccttctggcattttagaactcagtggtgctcattctggagcaccagacatgtctggggagcattctggatttctggacctaagtgggctgcagtccgggctgatagagcccagcggagagccaccaggtactccatattttagtggggattttgccagcaccaccaatgtaagtggagaatcctctgtagccatgggcaccagtggagaggcctcaggacttccagaagttactttaatcacttctgagttcgtggagggtgttactgaaccaactatttctcaggaactaggccaaaggccccctgtgacacacacaccccagctttttgagtccagtggaaaagtctccacagctggggacgttagtggagctaccccagtgctccctgggtctggagtagaagtatcatcagtcccagaatctagcagtgagacgtccgcctatcctgaagctgggttcggggcatctgccgcccctgaggccagcagagaagattctgggtcccctgatctgagtgaaaccacctctgcattccacgaagctaacctngagagatcctctggcctaggagtgagcggcagcactttgacatttcaagaaggcgaggcgtccgctgccccagaagtgagtggagaatccaccaccaccagtgatgtggggacagaggcaccaggcttgccttcagccactcccacggcttctggagacaggactgaaatcagcggagacctgtctggtcacacctcgcagctgggcgttgtcatcagcaccagcatcccagagtctgagtggacccagcagacccagcgccctgcagagacgcatctagaaattgagtcctcaagcctcctgtactcaggagaagagactcacacagtcgaaacagccacctccccaacagatgcttccatcccagcttctccggaatggaaacgtgaatcagaatcaactgctgcagcccccgccaggtcctgtgcagaggagccctgtggagctgggacctgcaaggagacagagggacacgtcatatgcctgtgcccccctggctacactggcgagcactgtaacatagacattgatgagtgcctctcaagcccttgtctgaatggagccacctgcgtggatgccatcgactctttcacatgcttatgccttcccagctacgaaggggacctgtgtgagattgaccaggaggtatgtgaggagggctggaacaagtaccagggccactgttaccgccacttcccggaccgcgagacctgggtggatgctgagcgccggtgtcgggagcagcagtcacacctgagcagcatcgtcacccccgaggagcaggagtttgtcaacaacaatgcccaagactaccagtggatcggcctgaacgacaggaccatcgaaggggacttccgctggtcagatggacaccccatgccaccacctacaaacgcagactacagaagcggagctcacggcaccctcggaggagccgccccagcacagcccactgagaagagcttccaggacgcacccaggacgctgagcccaggagcctgccaggctgacgtgcatcccacccagacggtgtcctcttcttgtcgctttttgtcatataaggaatcccattaaagaaggaaaaaaataaatcccacatttgtgtatgcacccactcacccctccaaatcagcaaaaccgcatctaatttgtccgccgaatgccaaagcaaagcaaacttattataacccttggactgagtttagagacatttcttcaatttcccatcgtgcctttccagggaccagtgcagggacagggggagaaggggaggggttaagttaaataaagaagattatttttgtttcctgactttatccaagagcagtgcaatcgttggttatttcacctccagggagagctagggaggagggaggagggctccaaaggagctggaaggagcagaggcctgagagcaggaagaactcggaaccgcagctgaatgtattggatgagaaggagccaggagggctacaccatctgtatgagggaaaagccttgggggagaggggtgggttcctgcctcctgccgagggtaagccggcaggagagagccatcagagggacctccgctgcctgggagttgggttccctccaagggtccctc

SEQ ID NO: 51890 - DNA, 499 bp, Homo sapiens
ggggaccctacaccgtccacagggttgagcaagggaagggaggtcggggggctgctcagtcacaaatagctgaccactgcccttagaagggccacgtacttgtcccaggagagggctcacttggaggatgaaggagaaaaagccagaaagtccaagaaaaatccaaatcaggaaagccgataaagcctcaggcgcctgagtcctggtttccacaagggagagagggtagtctggggagagcctgggctcgccccactttctttccaggtccactgatatctttccatctccctttcgtcctagccaccacctacaaacgcagactacagaagcggagctcacggcaccctcggaggagccgccccagcacagcccactgagaagagcttccaggacgcacccaggacgctgagcccaggagcctgccaggctgacgtgcatcccacccagacggtgtcctcttcttgtcgctttttgtcatataaggaatcccattaaa

SEQ ID NO: 51891 - DNA, 7947 bp, Homo sapiens
  misc_feature (6424)..(6424): n is a, c, g, or t
agcggagtgctgaggacgcgcgcagcgctgctcaaggtctctctctctcagcaccctcgccggccggcgtctgacgcgggtgccagggtctccgggcacctttcagtgtccattccctcagccagccaggactccgcaacccagcagttgccgctgcggtcacagcccgaggggacctgcggacaggacgccggcaggaggaggggtgcgcagcgcccgcgcagagcgtctccctcgctacgcagcgagacccgggcctcccggccccaggagcccccagctgcctcggccaggtgtgtgggactgaagttcttggagaagggagtccaactcttcaaggtgaactatgaccactttactctgggttttcgtgactctgagggtcatcactgcagctgtcactgtagaaacttcagaccatgacaactcgctgagtgtcagcatcccccaaccgtccccgctgagggtcctcctggggacctccctcaccatcccctgctatttcatcgaccccatgcaccctgtgaccaccgccccttctaccgccccactggccccaagaatcaagtggagccgtgtgtccaaggagaaggaggtagtgctgctggtggccactgaagggcgcgtgcgggtcaacagtgcctatcaggacaaggtctcactgcccaactacccggccatccccagtgacgccaccttggaagtccagagcctgcgctccaatgactctggggtctaccgctgcgaggtgatgcatggcatcgaggacagcgaggccaccctggaagtcgtggtgaaaggcatcgtgttccattacagagccatctctacacgctacaccctcgactttgacagggcgcagcgggcctgcctgcagaacagtgccatcattgccacgcctgagcagctgcaggccgcctacgaagacggcttccaccagtgtgacgccggctggctggctgaccagactgtcagataccccatccacactccccgggaaggctgctatggagacaaggatgagtttcctggtgtgaggacgtatggcatccgagacaccaacgagacctatgatgtgtactgcttcgccgaggagatggagggtgaggtcttttatgcaacatctccagagaagttcaccttccaggaagcagccaatgagtgccggcagctgggtgcccggctggccaccacgggccagctctacctggcctggcaggctggcatggacatgtgcagcgccggctggctggccgaccgcagcgtgcgctaccccatctccaaggcccggcccaactgcggtggcaacctcctgggcgtgaggaccgtctacgtgcatgccaaccagacgggctaccccgacccctcatcccgctacgacgccatctgctacacaggtgaagactttgtggacatcccagaaaacttctttggagtggggggtgaggaggacatcaccgtccagacagtgacctggcctgacatggagctgccactgcctcgaaacatcactgagggtgaagcccgaggcagcgtgatccttaccgtaaagcccatcttcgaggtctcccccagtcccctggaacccgaggagcccttcacgtttgcccctgaaataggggccactgccttcgctgaggttgagaatgagactggagaggccaccaggccctggggctttcccacacctggcctgggccctgccacggcattcaccagtgaggacctcgtcgtgcaggtgaccgctgtccctgggcagccgcatttgccagggggggtcgtcttccactaccgcccgggacccacccgctactcgctgacctttgaggaggcacagcaggcctgccctggcacgggggcggtcattgcctcgccggagcagctccaggccgcctacgaagcaggctatgagcagtgtgacgccggctggctgcgggaccagaccgtcagataccccattgtgagcccacggaccccatgcgtgggtgacaaggacagcagcccaggggtcaggacctatggcgtgcgcccatcaacagagacctacgatgtctactgctttgtagacagacttgagggggaggtgttcttcgccacacgccttgagcagttcaccttccaggaagcactggagttctgtgaatctcacaatgccactgccaccacgggccagctctacgccgcctggagccgcggcctggacaagtgctatgccggctggctggccgacggcagcctccgctaccccatcgtcaccccaaggcctgcctgcggtggggacaagccaggcgtgagaacggtctacctctaccctaaccagacgggcctcccagacccactgtcccggcaccatgccttctgcttccgaggcatttcagcggttccttctccaggagaagaagagggtggcacacccacatcaccctctggtgtggaggagtggatcgtgacccaagtggttcctggtgtggctgctgtccccgtagaagaggagacaactgctgtaccctcaggggagactactgccatcctagagttcaccaccgagccagaaaaccagacagaatgggaaccagcctataccccagtgggcacatccccgctgccagggatccttcctacttggcctcctactggcgccgaaacagaggaaagtacagaaggcccttctgcaactgaagtgccctctgcctcagaggaaccatccccctcagaggtgccattcccctcagaggagccatccccctcagaggaaccattcccctcagtgaggccattcccctcagtggagctgttcccctcagaggagccattcccctccaaggagccatccccctcagaggaaccatcagcctcagaagagccgtatacaccttcaccccccgagcccagctggactgagctgcccagctctggggaggaatctggggcccctgatgtcagtggtgacttcacaggcagtggagatgtttcaggacaccttgacttcagtgggcagctgtcaggggacagggcaagtggactgccctctggagacctggactccagtggtcttacttccacagtgggctcaggcctgactgtggaaagtggactaccctcaggggatgaagagagaattgagtggcccagcactcctacggttggtgaactgccctctggagctgagatcctagagggctctgcctctggagttggggatctcagtggacttccttctggagaagttctagagacctctgcctctggagtaggagacctcagtgggcttccttctggagaagttctagagaccactgcccctggagtagaggacatcagcgggcttccttctggagaagttctagagaccactgcccctggagtagaggacatcagcgggcttccttctggagaagttctagagaccactgcccctggagtagaggacatcagcgggcttccttctggagaagttctagagaccactgcccctggagtagaggacatcagcgggcttccttctggagaagttctagagaccactgcccctggagtagaggacatcagcgggcttccttctggagaagttctagagaccgctgcccctggagtagaggacatcagcgggcttccttctggagaagttctagagaccgctgcccctggagtagaggacatcagcgggcttccttctggagaagttctagagaccgctgcccctggagtagaggacatcagcgggcttccttctggagaagttctagagaccgctgcccctggagtagaggacatcagcgggcttccttctggagaagttctagagaccgctgcccctggagtagaggacatcagcgggcttccttctggagaagttctagagaccgctgcccctggagtagaggacatcagcgggcttccttctggagaagttctagagaccgctgcccctggagtagaggacatcagcgggcttccttctggagaagttctagagactgctgcccctggagtagaggacatcagcgggcttccttctggagaagttctagagactgctgcccctggagtagaggacatcagcgggcttccttctggagaagttctagagactgctgcccctggagtagaggacatcagcgggcttccttctggagaagttctagagactgctgcccctggagtagaggacatcagcgggcttccttctggagaagttctagagactactgcccctggagtagaggagatcagcgggcttccttctggagaagttctagagactactgcccctggagtagatgagatcagtgggcttccttctggagaagttctagagactactgcccctggagtagaggagatcagcgggcttccttctggagaagttctagagacttctacctctgcggtaggggacctcagtggacttccttctggaggagaagttctagagatttctgtctctggagtagaggacatcagtgggcttccttctggagaggttgtagagacttctgcctctggaatagaggatgtcagtgaacttccttcaggagaaggtctagagacctctgcttctggagtagaggacctcagcaggctcccttctggagaagaagttctagagatttctgcctctggatttggggacctcagtggagttccttctggaggagaaggtctagagacctctgcttctgaagtagggactgacctcagtgggcttccttctggaagggagggtctagagacttcagcttctggagctgaggacctcagtgggttgccttctggaaaagaagacttggtggggtcagcttctggagacttggacttgggcaaactgccttctggaactctaggaagtgggcaagctccagaaacaagtggtcttccctctggatttagtggtgagtattctggggtggaccttggaagtggcccaccctctggcctgcctgactttagtggacttccatctggattcccaactgtttccctagtggattctacattggtggaagtggtcacagcctccactgcaagtgaactggaagggaggggaaccattggcatcagtggtgcaggagaaatatctggactgccctccagtgagctggacattagtgggagagctagtggactcccttcaggaactgaactcagtggccaagcatctgggtctcctgatgtcagtggggaaatacctggactctttggtgtcagtggacagccatcagggtttcctgacactagtggggaaacatctggagtgactgagcttagcgggctgtcctctggacaaccaggtgttagtggagaagcatctggagttctttatggcactagtcaaccctttggcataactgatctgagtggagaaacatctggggtccctgatctcagtgggcagccttcagggttaccagggttcagtggggcaacatcaggagtccctgacctggtttctggtaccacgagtggcagcggtgaatcttctgggattacatttgtggacaccagtttggttgaagtggcccctactacatttaaagaagaagaaggcttagggtctgtggaactcagtggcctcccttccggagaggcagatctgtcaggcaaatctgggatggtggatgtcagtggacagttttctggaacagtcgattccagtgggtttacatcccagactccggaattcagtggcctaccaagtggcatagctgaggtcagtggagaatcctccagagctgagattgggagcagcctgccctcgggagcatattatggcagtggaactccatctagtttccccacggtctctcttgtagacagaactttggtggaatctgtaacccaggctccaacagcccaagaggcaggagaagggccttctggcattttagaactcagtggtgctcattctggagcaccagacatgtctggggagcattctggatttctggacctaagtgggctgcagtccgggctgatagagcccagcggagagccaccaggtactccatattttagtggggattttgccagcaccaccaatgtaagtggagaatcctctgtagccatgggcaccagtggagaggcctcaggacttccagaagttactttaatcacttctgagttcgtggagggtgttactgaaccaactatttctcaggaactaggccaaaggccccctgtgacacacacaccccagctttttgagtccagtggaaaagtctccacagctggggacgttagtggagctaccccagtgctccctgggtctggagtagaagtatcatcagtcccagaatctagcagtgagacgtccgcctatcctgaagctgggttcggggcatctgccgcccctgaggccagcagagaagattctgggtcccctgatctgagtgaaaccacctctgcattccacgaagctaacctngagagatcctctggcctaggagtgagcggcagcactttgacatttcaagaaggcgaggcgtccgctgccccagaagtgagtggagaatccaccaccaccagtgatgtggggacagaggcaccaggcttgccttcagccactcccacggcttctggagacaggactgaaatcagcggagacctgtctggtcacacctcgcagctgggcgttgtcatcagcaccagcatcccagagtctgagtggacccagcagacccagcgccctgcagagacgcatctagaaattgagtcctcaagcctcctgtactcaggagaagagactcacacagtcgaaacagccacctccccaacagatgcttccatcccagcttctccggaatggaaacgtgaatcagaatcaactgctgcagaccaggaggtatgtgaggagggctggaacaagtaccagggccactgttaccgccacttcccggaccgcgagacctgggtggatgctgagcgccggtgtcgggagcagcagtcacacctgagcagcatcgtcacccccgaggagcaggagtttgtcaacaacaatgcccaagactaccagtggatcggcctgaacgacaggaccatcgaaggggacttccgctggtcagatggacaccccatgcaatttgagaactggcgccccaaccagcctgacaacttttttgccgctggagaggactgtgtggtgatgatctggcacgagaagggcgagtggaatgatgttccctgcaattaccacctccccttcacgtgtaaaaagggcacagccaccacctacaaacgcagactacagaagcggagctcacggcaccctcggaggagccgccccagcacagcccactgagaagagcttccaggacgcacccaggacgctgagcccaggagcctgccaggctgacgtgcatcccacccagacggtgtcctcttcttgtcgctttttgtcatataaggaatcccattaaagaaggaaaaaaataaatcccacatttgtgtatgcacccactcacccctccaaatcagcaaaaccgcatctaatttgtccgccgaatgccaaagcaaagcaaacttattataacccttggactgagtttagagacatttcttcaatttcccatcgtgcctttccagggaccagtgcagggacagggggagaaggggaggggttaagttaaataaagaagattatttttgtttcctgactttatccaagagcagtgcaatcgttggttatttcacctccagggagagctagggaggagggaggagggctccaaaggagctggaaggagcagaggcctgagagcaggaagaactcggaaccgcagctgaatgtattggatgagaaggagccaggagggctacaccatctgtatgagggaaaagccttgggggagaggggtgggttcctgcctcctgccgagggtaagccggcaggagagagccatcagagggacctccgctgcctgggagttgggttccctccaagggtccctc

SEQ ID NO: 51892 - DNA, 7390 bp, Homo sapiens
  misc_feature (5684)..(5684): n is a, c, g, or t
gaagcaagggctgaagactccctggtctctttctctccatggcccaaggagaacagtcaggcatcgtgttccattacagagccatctctacacgctacaccctcgactttgacagggcgcagcgggcctgcctgcagaacagtgccatcattgccacgcctgagcagctgcaggccgcctacgaagacggcttccaccagtgtgacgccggctggctggctgaccagactgtcagataccccatccacactccccgggaaggctgctatggagacaaggatgagtttcctggtgtgaggacgtatggcatccgagacaccaacgagacctatgatgtgtactgcttcgccgaggagatggagggtgaggtcttttatgcaacatctccagagaagttcaccttccaggaagcagccaatgagtgccggcagctgggtgcccggctggccaccacgggccagctctacctggcctggcaggctggcatggacatgtgcagcgccggctggctggccgaccgcagcgtgcgctaccccatctccaaggcccggcccaactgcggtggcaacctcctgggcgtgaggaccgtctacgtgcatgccaaccagacgggctaccccgacccctcatcccgctacgacgccatctgctacacaggtgaagactttgtggacatcccagaaaacttctttggagtggggggtgaggaggacatcaccgtccagacagtgacctggcctgacatggagctgccactgcctcgaaacatcactgagggtgaagcccgaggcagcgtgatccttaccgtaaagcccatcttcgaggtctcccccagtcccctggaacccgaggagcccttcacgtttgcccctgaaataggggccactgccttcgctgaggttgagaatgagactggagaggccaccaggccctggggctttcccacacctggcctgggccctgccacggcattcaccagtgaggacctcgtcgtgcaggtgaccgctgtccctgggcagccgcatttgccagggggggtcgtcttccactaccgcccgggacccacccgctactcgctgacctttgaggaggcacagcaggcctgccctggcacgggggcggtcattgcctcgccggagcagctccaggccgcctacgaagcaggctatgagcagtgtgacgccggctggctgcgggaccagaccgtcagataccccattgtgagcccacggaccccatgcgtgggtgacaaggacagcagcccaggggtcaggacctatggcgtgcgcccatcaacagagacctacgatgtctactgctttgtagacagacttgagggggaggtgttcttcgccacacgccttgagcagttcaccttccaggaagcactggagttctgtgaatctcacaatgccactgccaccacgggccagctctacgccgcctggagccgcggcctggacaagtgctatgccggctggctggccgacggcagcctccgctaccccatcgtcaccccaaggcctgcctgcggtggggacaagccaggcgtgagaacggtctacctctaccctaaccagacgggcctcccagacccactgtcccggcaccatgccttctgcttccgaggcatttcagcggttccttctccaggagaagaagagggtggcacacccacatcaccctctggtgtggaggagtggatcgtgacccaagtggttcctggtgtggctgctgtccccgtagaagaggagacaactgctgtaccctcaggggagactactgccatcctagagttcaccaccgagccagaaaaccagacagaatgggaaccagcctataccccagtgggcacatccccgctgccagggatccttcctacttggcctcctactggcgccgaaacagaggaaagtacagaaggcccttctgcaactgaagtgccctctgcctcagaggaaccatccccctcagaggtgccattcccctcagaggagccatccccctcagaggaaccattcccctcagtgaggccattcccctcagtggagctgttcccctcagaggagccattcccctccaaggagccatccccctcagaggaaccatcagcctcagaagagccgtatacaccttcaccccccgagcccagctggactgagctgcccagctctggggaggaatctggggcccctgatgtcagtggtgacttcacaggcagtggagatgtttcaggacaccttgacttcagtgggcagctgtcaggggacagggcaagtggactgccctctggagacctggactccagtggtcttacttccacagtgggctcaggcctgactgtggaaagtggactaccctcaggggatgaagagagaattgagtggcccagcactcctacggttggtgaactgccctctggagctgagatcctagagggctctgcctctggagttggggatctcagtggacttccttctggagaagttctagagacctctgcctctggagtaggagacctcagtgggcttccttctggagaagttctagagaccactgcccctggagtagaggacatcagcgggcttccttctggagaagttctagagaccactgcccctggagtagaggacatcagcgggcttccttctggagaagttctagagaccactgcccctggagtagaggacatcagcgggcttccttctggagaagttctagagaccactgcccctggagtagaggacatcagcgggcttccttctggagaagttctagagaccactgcccctggagtagaggacatcagcgggcttccttctggagaagttctagagaccgctgcccctggagtagaggacatcagcgggcttccttctggagaagttctagagaccgctgcccctggagtagaggacatcagcgggcttccttctggagaagttctagagaccgctgcccctggagtagaggacatcagcgggcttccttctggagaagttctagagaccgctgcccctggagtagaggacatcagcgggcttccttctggagaagttctagagaccgctgcccctggagtagaggacatcagcgggcttccttctggagaagttctagagaccgctgcccctggagtagaggacatcagcgggcttccttctggagaagttctagagaccgctgcccctggagtagaggacatcagcgggcttccttctggagaagttctagagactgctgcccctggagtagaggacatcagcgggcttccttctggagaagttctagagactgctgcccctggagtagaggacatcagcgggcttccttctggagaagttctagagactgctgcccctggagtagaggacatcagcgggcttccttctggagaagttctagagactgctgcccctggagtagaggacatcagcgggcttccttctggagaagttctagagactactgcccctggagtagaggagatcagcgggcttccttctggagaagttctagagactactgcccctggagtagatgagatcagtgggcttccttctggagaagttctagagactactgcccctggagtagaggagatcagcgggcttccttctggagaagttctagagacttctacctctgcggtaggggacctcagtggacttccttctggaggagaagttctagagatttctgtctctggagtagaggacatcagtgggcttccttctggagaggttgtagagacttctgcctctggaatagaggatgtcagtgaacttccttcaggagaaggtctagagacctctgcttctggagtagaggacctcagcaggctcccttctggagaagaagttctagagatttctgcctctggatttggggacctcagtggagttccttctggaggagaaggtctagagacctctgcttctgaagtagggactgacctcagtgggcttccttctggaagggagggtctagagacttcagcttctggagctgaggacctcagtgggttgccttctggaaaagaagacttggtggggtcagcttctggagacttggacttgggcaaactgccttctggaactctaggaagtgggcaagctccagaaacaagtggtcttccctctggatttagtggtgagtattctggggtggaccttggaagtggcccaccctctggcctgcctgactttagtggacttccatctggattcccaactgtttccctagtggattctacattggtggaagtggtcacagcctccactgcaagtgaactggaagggaggggaaccattggcatcagtggtgcaggagaaatatctggactgccctccagtgagctggacattagtgggagagctagtggactcccttcaggaactgaactcagtggccaagcatctgggtctcctgatgtcagtggggaaatacctggactctttggtgtcagtggacagccatcagggtttcctgacactagtggggaaacatctggagtgactgagcttagcgggctgtcctctggacaaccaggtgttagtggagaagcatctggagttctttatggcactagtcaaccctttggcataactgatctgagtggagaaacatctggggtccctgatctcagtgggcagccttcagggttaccagggttcagtggggcaacatcaggagtccctgacctggtttctggtaccacgagtggcagcggtgaatcttctgggattacatttgtggacaccagtttggttgaagtggcccctactacatttaaagaagaagaaggcttagggtctgtggaactcagtggcctcccttccggagaggcagatctgtcaggcaaatctgggatggtggatgtcagtggacagttttctggaacagtcgattccagtgggtttacatcccagactccggaattcagtggcctaccaagtggcatagctgaggtcagtggagaatcctccagagctgagattgggagcagcctgccctcgggagcatattatggcagtggaactccatctagtttccccacggtctctcttgtagacagaactttggtggaatctgtaacccaggctccaacagcccaagaggcaggagaagggccttctggcattttagaactcagtggtgctcattctggagcaccagacatgtctggggagcattctggatttctggacctaagtgggctgcagtccgggctgatagagcccagcggagagccaccaggtactccatattttagtggggattttgccagcaccaccaatgtaagtggagaatcctctgtagccatgggcaccagtggagaggcctcaggacttccagaagttactttaatcacttctgagttcgtggagggtgttactgaaccaactatttctcaggaactaggccaaaggccccctgtgacacacacaccccagctttttgagtccagtggaaaagtctccacagctggggacgttagtggagctaccccagtgctccctgggtctggagtagaagtatcatcagtcccagaatctagcagtgagacgtccgcctatcctgaagctgggttcggggcatctgccgcccctgaggccagcagagaagattctgggtcccctgatctgagtgaaaccacctctgcattccacgaagctaacctngagagatcctctggcctaggagtgagcggcagcactttgacatttcaagaaggcgaggcgtccgctgccccagaagtgagtggagaatccaccaccaccagtgatgtggggacagaggcaccaggcttgccttcagccactcccacggcttctggagacaggactgaaatcagcggagacctgtctggtcacacctcgcagctgggcgttgtcatcagcaccagcatcccagagtctgagtggacccagcagacccagcgccctgcagagacgcatctagaaattgagtcctcaagcctcctgtactcaggagaagagactcacacagtcgaaacagccacctccccaacagatgcttccatcccagcttctccggaatggaaacgtgaatcagaatcaactgctgcagaccaggaggtatgtgaggagggctggaacaagtaccagggccactgttaccgccacttcccggaccgcgagacctgggtggatgctgagcgccggtgtcgggagcagcagtcacacctgagcagcatcgtcacccccgaggagcaggagtttgtcaacaacaatgcccaagactaccagtggatcggcctgaacgacaggaccatcgaaggggacttccgctggtcagatggacaccccatgcaatttgagaactggcgccccaaccagcctgacaacttttttgccgctggagaggactgtgtggtgatgatctggcacgagaagggcgagtggaatgatgttccctgcaattaccacctccccttcacgtgtaaaaagggcacagtggcctgcggagagccccctgtggtggagcatgccaggaccttcgggcagaagaaggaccggtatgagatcaattccctggtgcggtaccagtgcacagaggggtttgtccagcgccacatgcccaccatccggtgccagcccagcgggcactgggaggagcctcagatcacctgcacagaccccaccacctacaaacgcagactacagaagcggagctcacggcaccctcggaggagccgccccagcacagcccactgagaagagcttccaggacgcacccaggacgctgagcccaggagcctgccaggctgacgtgcatcccacccagacggtgtcctcttcttgtcgctttttgtcatataaggaatcccattaaagaaggaaaaaaataaatcccacatttgtgtatgcacccactcacccctccaaatcagcaaaaccgcatctaatttgtccgccgaatgccaaagcaaagcaaacttattataacccttggactgagtttagagacatttcttcaatttcccatcgtgcctttccagggaccagtgcagggacagggggagaaggggaggggttaagttaaataaagaagattatttttgtttcctgactttatccaagagcagtgcaatcgttggttatttcacctccagggagagctagggaggagggaggagggctccaaaggagctggaaggagcagaggcctgagagcaggaagaactcggaaccgcagctgaatgtattggatgagaaggagccaggagggctacaccatctgtatgagggaaaagccttgggggagaggggtgggttcctgcctcctgccgagggtaagccggcaggagagagccatcagagggacctccgctgcctgggagttgggttccctccaagggtccctc

SEQ ID NO: 51893 - DNA, 7618 bp, Homo sapiens
  misc_feature (5684)..(5684): n is a, c, g, or t
gaagcaagggctgaagactccctggtctctttctctccatggcccaaggagaacagtcaggcatcgtgttccattacagagccatctctacacgctacaccctcgactttgacagggcgcagcgggcctgcctgcagaacagtgccatcattgccacgcctgagcagctgcaggccgcctacgaagacggcttccaccagtgtgacgccggctggctggctgaccagactgtcagataccccatccacactccccgggaaggctgctatggagacaaggatgagtttcctggtgtgaggacgtatggcatccgagacaccaacgagacctatgatgtgtactgcttcgccgaggagatggagggtgaggtcttttatgcaacatctccagagaagttcaccttccaggaagcagccaatgagtgccggcagctgggtgcccggctggccaccacgggccagctctacctggcctggcaggctggcatggacatgtgcagcgccggctggctggccgaccgcagcgtgcgctaccccatctccaaggcccggcccaactgcggtggcaacctcctgggcgtgaggaccgtctacgtgcatgccaaccagacgggctaccccgacccctcatcccgctacgacgccatctgctacacaggtgaagactttgtggacatcccagaaaacttctttggagtggggggtgaggaggacatcaccgtccagacagtgacctggcctgacatggagctgccactgcctcgaaacatcactgagggtgaagcccgaggcagcgtgatccttaccgtaaagcccatcttcgaggtctcccccagtcccctggaacccgaggagcccttcacgtttgcccctgaaataggggccactgccttcgctgaggttgagaatgagactggagaggccaccaggccctggggctttcccacacctggcctgggccctgccacggcattcaccagtgaggacctcgtcgtgcaggtgaccgctgtccctgggcagccgcatttgccagggggggtcgtcttccactaccgcccgggacccacccgctactcgctgacctttgaggaggcacagcaggcctgccctggcacgggggcggtcattgcctcgccggagcagctccaggccgcctacgaagcaggctatgagcagtgtgacgccggctggctgcgggaccagaccgtcagataccccattgtgagcccacggaccccatgcgtgggtgacaaggacagcagcccaggggtcaggacctatggcgtgcgcccatcaacagagacctacgatgtctactgctttgtagacagacttgagggggaggtgttcttcgccacacgccttgagcagttcaccttccaggaagcactggagttctgtgaatctcacaatgccactgccaccacgggccagctctacgccgcctggagccgcggcctggacaagtgctatgccggctggctggccgacggcagcctccgctaccccatcgtcaccccaaggcctgcctgcggtggggacaagccaggcgtgagaacggtctacctctaccctaaccagacgggcctcccagacccactgtcccggcaccatgccttctgcttccgaggcatttcagcggttccttctccaggagaagaagagggtggcacacccacatcaccctctggtgtggaggagtggatcgtgacccaagtggttcctggtgtggctgctgtccccgtagaagaggagacaactgctgtaccctcaggggagactactgccatcctagagttcaccaccgagccagaaaaccagacagaatgggaaccagcctataccccagtgggcacatccccgctgccagggatccttcctacttggcctcctactggcgccgaaacagaggaaagtacagaaggcccttctgcaactgaagtgccctctgcctcagaggaaccatccccctcagaggtgccattcccctcagaggagccatccccctcagaggaaccattcccctcagtgaggccattcccctcagtggagctgttcccctcagaggagccattcccctccaaggagccatccccctcagaggaaccatcagcctcagaagagccgtatacaccttcaccccccgagcccagctggactgagctgcccagctctggggaggaatctggggcccctgatgtcagtggtgacttcacaggcagtggagatgtttcaggacaccttgacttcagtgggcagctgtcaggggacagggcaagtggactgccctctggagacctggactccagtggtcttacttccacagtgggctcaggcctgactgtggaaagtggactaccctcaggggatgaagagagaattgagtggcccagcactcctacggttggtgaactgccctctggagctgagatcctagagggctctgcctctggagttggggatctcagtggacttccttctggagaagttctagagacctctgcctctggagtaggagacctcagtgggcttccttctggagaagttctagagaccactgcccctggagtagaggacatcagcgggcttccttctggagaagttctagagaccactgcccctggagtagaggacatcagcgggcttccttctggagaagttctagagaccactgcccctggagtagaggacatcagcgggcttccttctggagaagttctagagaccactgcccctggagtagaggacatcagcgggcttccttctggagaagttctagagaccactgcccctggagtagaggacatcagcgggcttccttctggagaagttctagagaccgctgcccctggagtagaggacatcagcgggcttccttctggagaagttctagagaccgctgcccctggagtagaggacatcagcgggcttccttctggagaagttctagagaccgctgcccctggagtagaggacatcagcgggcttccttctggagaagttctagagaccgctgcccctggagtagaggacatcagcgggcttccttctggagaagttctagagaccgctgcccctggagtagaggacatcagcgggcttccttctggagaagttctagagaccgctgcccctggagtagaggacatcagcgggcttccttctggagaagttctagagaccgctgcccctggagtagaggacatcagcgggcttccttctggagaagttctagagactgctgcccctggagtagaggacatcagcgggcttccttctggagaagttctagagactgctgcccctggagtagaggacatcagcgggcttccttctggagaagttctagagactgctgcccctggagtagaggacatcagcgggcttccttctggagaagttctagagactgctgcccctggagtagaggacatcagcgggcttccttctggagaagttctagagactactgcccctggagtagaggagatcagcgggcttccttctggagaagttctagagactactgcccctggagtagatgagatcagtgggcttccttctggagaagttctagagactactgcccctggagtagaggagatcagcgggcttccttctggagaagttctagagacttctacctctgcggtaggggacctcagtggacttccttctggaggagaagttctagagatttctgtctctggagtagaggacatcagtgggcttccttctggagaggttgtagagacttctgcctctggaatagaggatgtcagtgaacttccttcaggagaaggtctagagacctctgcttctggagtagaggacctcagcaggctcccttctggagaagaagttctagagatttctgcctctggatttggggacctcagtggagttccttctggaggagaaggtctagagacctctgcttctgaagtagggactgacctcagtgggcttccttctggaagggagggtctagagacttcagcttctggagctgaggacctcagtgggttgccttctggaaaagaagacttggtggggtcagcttctggagacttggacttgggcaaactgccttctggaactctaggaagtgggcaagctccagaaacaagtggtcttccctctggatttagtggtgagtattctggggtggaccttggaagtggcccaccctctggcctgcctgactttagtggacttccatctggattcccaactgtttccctagtggattctacattggtggaagtggtcacagcctccactgcaagtgaactggaagggaggggaaccattggcatcagtggtgcaggagaaatatctggactgccctccagtgagctggacattagtgggagagctagtggactcccttcaggaactgaactcagtggccaagcatctgggtctcctgatgtcagtggggaaatacctggactctttggtgtcagtggacagccatcagggtttcctgacactagtggggaaacatctggagtgactgagcttagcgggctgtcctctggacaaccaggtgttagtggagaagcatctggagttctttatggcactagtcaaccctttggcataactgatctgagtggagaaacatctggggtccctgatctcagtgggcagccttcagggttaccagggttcagtggggcaacatcaggagtccctgacctggtttctggtaccacgagtggcagcggtgaatcttctgggattacatttgtggacaccagtttggttgaagtggcccctactacatttaaagaagaagaaggcttagggtctgtggaactcagtggcctcccttccggagaggcagatctgtcaggcaaatctgggatggtggatgtcagtggacagttttctggaacagtcgattccagtgggtttacatcccagactccggaattcagtggcctaccaagtggcatagctgaggtcagtggagaatcctccagagctgagattgggagcagcctgccctcgggagcatattatggcagtggaactccatctagtttccccacggtctctcttgtagacagaactttggtggaatctgtaacccaggctccaacagcccaagaggcaggagaagggccttctggcattttagaactcagtggtgctcattctggagcaccagacatgtctggggagcattctggatttctggacctaagtgggctgcagtccgggctgatagagcccagcggagagccaccaggtactccatattttagtggggattttgccagcaccaccaatgtaagtggagaatcctctgtagccatgggcaccagtggagaggcctcaggacttccagaagttactttaatcacttctgagttcgtggagggtgttactgaaccaactatttctcaggaactaggccaaaggccccctgtgacacacacaccccagctttttgagtccagtggaaaagtctccacagctggggacgttagtggagctaccccagtgctccctgggtctggagtagaagtatcatcagtcccagaatctagcagtgagacgtccgcctatcctgaagctgggttcggggcatctgccgcccctgaggccagcagagaagattctgggtcccctgatctgagtgaaaccacctctgcattccacgaagctaacctngagagatcctctggcctaggagtgagcggcagcactttgacatttcaagaaggcgaggcgtccgctgccccagaagtgagtggagaatccaccaccaccagtgatgtggggacagaggcaccaggcttgccttcagccactcccacggcttctggagacaggactgaaatcagcggagacctgtctggtcacacctcgcagctgggcgttgtcatcagcaccagcatcccagagtctgagtggacccagcagacccagcgccctgcagagacgcatctagaaattgagtcctcaagcctcctgtactcaggagaagagactcacacagtcgaaacagccacctccccaacagatgcttccatcccagcttctccggaatggaaacgtgaatcagaatcaactgctgcagcccccgccaggtcctgtgcagaggagccctgtggagctgggacctgcaaggagacagagggacacgtcatatgcctgtgcccccctggctacactggcgagcactgtaacatagacattgatgagtgcctctcaagcccttgtctgaatggagccacctgcgtggatgccatcgactctttcacatgcttatgccttcccagctacgaaggggacctgtgtgagattgaccaggaggtatgtgaggagggctggaacaagtaccagggccactgttaccgccacttcccggaccgcgagacctgggtggatgctgagcgccggtgtcgggagcagcagtcacacctgagcagcatcgtcacccccgaggagcaggagtttgtcaacaacaatgcccaagactaccagtggatcggcctgaacgacaggaccatcgaaggggacttccgctggtcagatggacaccccatgcaatttgagaactggcgccccaaccagcctgacaacttttttgccgctggagaggactgtgtggtgatgatctggcacgagaagggcgagtggaatgatgttccctgcaattaccacctccccttcacgtgtaaaaagggcacagtggcctgcggagagccccctgtggtggagcatgccaggaccttcgggcagaagaaggaccggtatgagatcaattccctggtgcggtaccagtgcacagaggggtttgtccagcgccacatgcccaccatccggtgccagcccagcgggcactgggaggagcctcagatcacctgcacagaccccaccacctacaaacgcagactacagaagcggagctcacggcaccctcggaggagccgccccagcacagcccactgagaagagcttccaggacgcacccaggacgctgagcccaggagcctgccaggctgacgtgcatcccacccagacggtgtcctcttcttgtcgctttttgtcatataaggaatcccattaaagaaggaaaaaaataaatcccacatttgtgtatgcacccactcacccctccaaatcagcaaaaccgcatctaatttgtccgccgaatgccaaagcaaagcaaacttattataacccttggactgagtttagagacatttcttcaatttcccatcgtgcctttccagggaccagtgcagggacagggggagaaggggaggggttaagttaaataaagaagattatttttgtttcctgactttatccaagagcagtgcaatcgttggttatttcacctccagggagagctagggaggagggaggagggctccaaaggagctggaaggagcagaggcctgagagcaggaagaactcggaaccgcagctgaatgtattggatgagaaggagccaggagggctacaccatctgtatgagggaaaagccttgggggagaggggtgggttcctgcctcctgccgagggtaagccggcaggagagagccatcagagggacctccgctgcctgggagttgggttccctccaagggtccctc

SEQ ID NO: 51894 - DNA, 676 bp, Homo sapiens
gagccacagctgacttccagatcttgtcctctttgttgatgtttctccctcaaaatgcaattcatgaggaggtcccagggtgagagcgtgtttgcttctggcgtgttctggggtagaggacagctctctgcctgatgtttgagcctcacgaggaagagcatgggagataccgttcatctcctaagggtgaggggtcacccttctggagtgaggggccacgggtcacaactgagggccactcacagtgcttatgcagaggccaggccaggtgccaacagtgggagtgggctgtttagtgagggctcctttggaagcccagaactcacaagttgcctcaaggaagcagcagtgaatgactgagtagtacctggtattcagaaggaagctgcgtacgtagccatgcagataccaattgctggtatgtgggtgggagttcttctgatccagcctttctaggttgggaactgtttccaccctgaaagaaactgaatgaaaaatgcctttttggcaatactgaagatatcttgaacattgattttggaaattaatttttattaatctacccagaatcagtatcgacttgctttatccacacggcagttctttaatatggttgatttaaaaatacagatatgttcattagaaactggaataagatcacgttttcagtgatcat

SEQ ID NO: 51895 - DNA, 352 bp, Homo sapiens
tttatttcaaatgaaagtgttcagagatatctgaggatgctattaacatgaataattgtgtctcttcagaaagaactgtgtgactaaagaaataggcactggagaggccactgagggactttctagaactttcatatttaaagatgtttaaagggaagaatggatggtttttaataactgcaattaacagtttaaccatgttcttataggctggactaaacagtggtatcttgagatctttttaagttttgagcaatcagagagaaatgagttttagagcaatataaattgaggtttataatcgagctacaatgaaaagtctcttgatttctagctcagaatggttgagtaa

SEQ ID NO: 51896 - DNA, 354 bp, Homo sapiens
cagagagaggcggcagctccgggcgggatcaggcatgctcttcaaactcagtcagccagtgctggatgcctgctggatgcagacgccatgccggcaggtggcatgctgcagggagcacccgagaagacgaggcgctcagcctgcccgacttctctcagcttgcctcctccctgcttgtgccaagctctagttaatgaagcttggagcacgccagtgggttttaaaaactaatgaccaagaggaagggaaaattccttacactttccagtcatttgactgcttccctcttgggtgggtgccacactgtgacatggagagcatgactcagaccgactgcttgcttccagcccgtgc

SEQ ID NO: 51897 - DNA, 120 bp, Homo sapiens
gctgtgaatgaagctggcagacgctcctactagacgttacactcacgggaaccagttcagccctgtgctcagagcttcacactcaggggcctcactgatgcctcatgaccactaccggag

SEQ ID NO: 51898 - DNA, 364 bp, Homo sapiens
gctaagggggaaaaaacttttttcactcccttacatagtcactcttaacacagtacagaatatttcacctctggtcatcaaaatgtgtgaggcacacacaccaaggaatgctccagaggccaccagctggatatcctataattcaattctgacactatttacctaaagatagcatcagatctcacaggttaagggctcagtaccacaaggctgcttccacttcagattccaattgcaaggcacaggttgtgacctgtgcttctgattgatttgctataaattggtgttccctggccaggcgcggtgacgcacacctgtaatcccaacaccttgggtggggcgaatcgcttgagcccaggagttc

SEQ ID NO: 51899 - DNA, 371 bp, Homo sapiens
tttgtatttttagtagagatggggtttcaccatgttggccaggctggtcttgaacctcaagtgatccaccctcctcagcctctcaaagtgctgggattacaggtgtgagccaccatgccaggccaaactatcttctctttctcagaccttgaaaatctgggctgctaggctttgctgatttcataaaccctaataattaacgactaacaataaaagatatctatttaaggtaatatatgaggggactgggcaaggatctaacctctatctatgtagatccaatcccaggttctctaaaggcccctgaggaatctctttcactgaattatgtgacatcaggttcaatcaacattttcaatagcattgtagcc

SEQ ID NO: 51900 - DNA, 341 bp, Homo sapiens
taatatgcctcctgcttctagggtagcagtgcccacccccagcaccattgtagttcattttccacacggcagccagagtggattttataaaactcaagaatctgatcatgatcatgtctcttctgataatgacctggtttataactattgtcctggaacactctcaaaaatgtaatagtatattgtcttctagtccctgtttgtcatatctgtgatagtgggggaaatgattctgtgttcctttgactaaaagtttattctaggacaggatttggggttggtacacactgtcaattccaggaagtcttgcaggtgataatgttgcaaaacaaagcaaagaa

SEQ ID NO: 51901 - DNA, 254 bp, Homo sapiens
caagaacacatataagatttaacaaaaaattggaacatggaagaggaaagagagagaagtgccaggaactttaaatcagttggttctgtaattgcacactacatttagctgtgagttttctggccaagggaaaataggacccacgtcgagttatttagatatcttgtttggagttattatacttctactggttggacgcagtggctcatgcctgtgaaactagcactttggaaggccgaggtgtgaggattgct

SEQ ID NO: 51902 - DNA, 462 bp, Homo sapiens
gaatatttgctttcattctgtcccattgttaccctggttcttccaagcgtccagcttacctgccgagcttctttcagtcatcctctggtgtcctctgacaattgtcctctgcttccgcatgctctagcgttccttcacaggggttttcgttgccccacattgggtgccagaaatgttggagtgatcagacccaacaccaggctgtgggggctacaaagtctggcagagtcgaaggaatgagacaagacaagaatgcataaagtgggtccagggggccaacaccagtatggcagctgcgaaggccctgagctctgggagcccacgctctttattggtgatcaaacagaagcaggtggtgaggacgtgaggacatggggttagaaaggaagcggtgcatcaagcgtttgacctatagctgtggcagtttagcattttcttttaagcatatggaaaaccccctgt

SEQ ID NO: 51903 - DNA, 793 bp, Homo sapiens
aaaggatcaagcatccctgagtttcaaacagaaacttgcactgaatacattcaaagaaccatcaagaaatggggacctggattttatttgcctgcctcctgggagcagcttttgccatgcctctaccacctcatcctgggcaccctggttatatcaacttcagctatgaggtgcttacccctttgaagtggtaccagagcataaggccaccgtacccttcctatggttacgagcccatgggtggatggctgcaccaccaaatcatccccgtgctgtcccaacagcaccccccgactcacaccctgcagcctcatcaccacatcccagtggtgccagctcagcagcccgtgatcccccagcaaccaatgatgcccgttcctggccaacactccatgactccaatccaacaccaccagccaaacctccctccgcccgcccagcagccctaccagccccagcctgttcagccacagcctcaccagcccatgcagccccagccacctgtgcaccccatgcagcccctgccgccacagccacctctgcctccgatgttccccatgcagcccctgcctcccatgcttcctgatctgactctggaagcttggccatcaacagacaagaccaagcgggaggaagtggattaaaagatcagaagatgagaggggaatgaatacttcagatgctttcaggagtgacacaagaacacaatgatttttgcttataatcactttacttagcaaattctgtaactaaaaaagtaccattagcagacaataaaatgcattaaaaatca

SEQ ID NO: 51904 - DNA, 316 bp, Homo sapiens
cagctcttcagactggataatttctttggatctctcttcatgttcactgattcttctgccatatccaatctactgctaacttcatccagataatttttcattttgcttattgtgctttttagttgtaaaattttgatttggttctatcatattttcccatttctttgtatgtctattaatattttattgactacaggacattttagatatgtggtatagagactctggattttgttatcttacaccaaagagtgttgcccctgttacagcaagcagttcaggtactggctagtcaccttgaacgtgtgtgggtttg

SEQ ID NO: 51905 - DNA, 826 bp, Homo sapiens
agccccaccactgagggctaaagtgctctggagttctaaatgaacttgaaaggccacaaggcctgcaattcctgtgcaagtcctagtgctgcactgggcttggagccactggacttggggtgcacacgacctagtgaaatactagctggggtggccaaaggagtgcttgcatcaccactcctccaactccagacatcacagcttgcagctccagcagaagagggaaaagtaaagaggatttttttcttgcaacttggatcccagctcagctacagtaaaataaagcccccattctagaccatagcttctggatgacatttctagacccaccctaggccagaagggaacccactgccctaaagagaagggtacactcctagcagaattcaccacctgctgaccaaagagccattgggttttgaataaacatcagcagtagccaggcagtagttgccatgggccctgggcaagaaccaaaactgtgctcatttcaggtgtgacccagcacaattctcatctgtggtggccatcaggagagactcctgcttgagaaaaggagagggaagaataaagaggactttgttttataactcaggtaccagctcagccacaataaaataaagcaccaagtagactcctaaagattccaggctttggctcctggagtgcatttctagaccccccactgggccagaatggaacccacgaccctgaagggagagacccagtcctggcaggattcatcatctgctgactaaagagcccctgggcttgaataaacatcagtgatagtcaggagatagttgccacaggccttgggcgaaac

SEQ ID NO: 51906 - DNA, 633 bp, Homo sapiens
  misc_feature (7)..(7): n is a, c, g, or t
  misc_feature (112)..(112): n is a, c, g, or t
  misc_feature (129)..(129): n is a, c, g, or t
agatggnccaggtaattctaaaagtccgggtattttctgcttgcttaactttctcaggctgaatcccttaagacacccgtgtgacataaatacccttgtccgtcttgtcttnagagaagggattctggnaaggatcctggtcgattccacctccaatgctgaaacccaggattaagttctcaccttgacgaattcaccacctgctgaccaaagagccattgggttttgaataaacatcagcagtagccaggcagtagttgccatgggccctgggcaagaaccaaaactgtgctcatttcaggtgtgacccagcacaattctcatctgtggtggccatcaggagagactcctgcttgagaaaaggagagggaagaataaagaggactttgttttataactcaggtaccagctcagccacaataaaataaagcaccaagtagactcctaaagattccaggctttggctcctggagtgcatttctagaccccccactgggccagaatggaacccacgaccctgaagggagagacccagtcctggcaggattcatcatctgctgactaaagagcccctgggcttgaataaacatcagtgatagtcaggagatagttgccacaggccttgggcgaaac

SEQ ID NO: 51907 - DNA, 368 bp, Homo sapiens
aggaatttctccacacagaagaaaaataccagatggaaatgtgcatctacaaaaagaaatgaagagtgaaagaaatggtaaatatggccaggcgtggtggctcacgcctgtaatcccagcacttaggaagaccgaggaaggcgaatcacctgaggccaggagatcgagaccaacctggccaacatggtgaaaccccatctctactaaaaatataaaaattagctgggcgtggagatgggtgcctgtagtcccagatactcaggaggctgaggcaggagaattgattgaacctgggaggcagaggttgcagtgagctgagattgcgccactgcactccagcctagatgacagagcgagaccctgtcgca

SEQ ID NO: 51908 - DNA, 350 bp, Homo sapiens
cagctctgagggaacaaggatctgagaaagggtgatggctgtggggctgcaaggtagagcatacggatgttatatatatattttaatgccttaaatggttaaacagttcagtctgcacaattacataatataaagccacatatctaatctattaaatgcaatgtattttttttattaatgatctgttcaaggtgtagtcataatgtcttcaaaagggcttgtggaatctccgtttgtatcaaaaccaggagaaatctcttcaaaatctgaaattcgtccagatttactccacataaactactttttgacctttcatcttgagaaaagcataatttctgtctttggtggga

SEQ ID NO: 51909 - DNA, 641 bp, Homo sapiens
ctataaaatctgagcattccctttgttctctggagcaaacaatgttaagttgttaactctctgtacctttctctagaactggatggaaacaactccatctgaaatgcagccctaataccagggaactcctacagtaaagcgctaaacaactttattactctaaccaacgtttatgtccctaatcagcaagaagtagttagaatggtcatcatccctttccctcaagattgaggaatggacataaaaaggaggggatttgtaactgctccagactgatctgttgtcagaaaggggctcttgaaccagaccatgaaagagggttcttggatctcctgcaggaaggaattcaaggagagtcacagagtgtagagagaatagacagtttattgaaagctactcagttacagagtagggcatcctccaaaagcaggaggaggaatgtgctgtctttgttttaaactcttcttttataggggtttaatctatgtaaaacctaagctatgtctacatgtgggtaggctgtcagtgtgacaaaatttagtattttgttgatataaagaaacttatccttgtcatcttagtgcataagtacatcaaagtatgactttagctaccttaaaagcatgtattgttatgtgata

SEQ ID NO: 51910 - DNA, 328 bp, Homo sapiens
agagactgttatcatactcattgcacagatgagaaaatggaggcagagagggaggttcagtaatttgcctgaagtcaaagagtagggtaccagagacgggctccagattttgttgctttcaaccacttgctatactgccaaggtggaattttgcatttcaaagaatgcctactccctcgctttggagagagtagtgttttaatgatgtctgcactgtggacatttttcctgtccttaccgctccagaaactagtagagctccctgtccaggtgtcttcgttacacatgtgccttcctagtctggagtccacggcttcaagatcctctc

SEQ ID NO: 51911 - DNA, 336 bp, Homo sapiens
gaacatcttcaacctgatgaagggcatccatgagaaaaaaaatgcaatggatatcatatttagtgaaatattgactactttgcccctaagatcaggaccaaggcaaagatgtttgctcttaccacttctattcagccttatactggactagagttctggccagtgcaataaggcaagaaataaaaaggcataaagactagaaaggaagaaataaaactctttacagatgacatgattatgtggaagatcctaaggaatcctaaaaataaattattaaaataaaagtgactacacccaagtggatttggcagggtcacaagatacagtcaatgtaca

SEQ ID NO: 51912 - DNA, 783 bp, Homo sapiens
agtctccatttataagcttgtctctctgcatcaggaagaaaagaaggactaaatcaccagacactcttaaccaatggagaaggagtttaagtaacaaaccttacctttgtttaaggtgctttttctggctctctgccattaagatctacattttccaccctgtctcctctaggacctgagggttatctctttgatatgcaaatgccagggagattactcaccagaagaagaagaagaaatagagctaattggaaattgagcaaataaaaaaatcttgttttttctcccagaaacagtgaaaagctttagccatcctttagataatcttaacttgttccatctgccagaaacacaatttggattcagaaattctttatgaactgtttttgtattattgtacctggcacatggctacagttttcaaatgaaaactgtgaaatctgcttctgtctgtattttatgtatgtctgtgtatgcatgtatgtgtaatatttttctacctctagagactatcctaaaattaacttataaagagctgtatttaattgccttaaagaaaaagcacttatacaaattaagtattttttaaactttcagaaaaataagacctagcgcaaatgttcttcaagttgatattgttaaaagaagaaacttcagccaaattaaacttaaagaagtttaattgagcaatgaatgattcacaaatcaggcagcctccagagttacagctgattcatggagactccagggatgcctcatggtcagaacaaatttatagacaaa

SEQ ID NO: 51913 - DNA, 284 bp, Homo sapiens
tggtacgaattttagacggcttctttgacagacttttctgtgggcctgtccctgtggactggctttctgtctgttctgctcttgcccattcacttattcatatcctttgtaactctgaagggcatctgcccttgactctggccttgggggacttggtgaatgtagggcccatctgggctaagggtcagagttaagtcttctgatgttggtaaaataagacagttgaagccttccccccttcccttttatgcctccaaaaaaaaaaaccaaacaaacaaacaagg

SEQ ID NO: 51914 - DNA, 626 bp, Homo sapiens
atctcagaggctgactaccatagtaagaaatatgaaggttaacttgaattctaccactcttatgaattttgaatttgttactgatgttcactaaaaagtgctttgcaaattatgaggtgaacatggtggaaaatagaaatagcatttcacaaaaagtcctgatcagtgtatgaataacatcctctgcttcgaaatattatgaacattgcatatcatcacattagatagcttttggtggggcacgagatcagataattgcaaagaaaagatggagaaaaggtaaagactgaaaaagaaaataccaaagaccagagaaaggaaaaagaagtagaaaaagagaagataaaggaaaggggataaaagggacaagacaagacaaatcagaggtagaagagcagagacacagaagataaaaacatgcaaataaaaggcaaaagaaatgtgaacccagaggtgatctgaacaagagagaaggaaaaggagaaatgatcgtgaggggggggaaagaaaaaaaaaagacagaaaaaaaaattaaggttttcattcctttaccagtttttagatccttttccacctcagaacaggcttgcagcctcttattttctgtgtttcctcgtgctcctctg

SEQ ID NO: 51915 - DNA, 680 bp, Homo sapiens
atctcagaggctgactaccatagtaagaaatatgaaggttaacttgaattctaccactcttatgaattttgaatttgttactgatgttcactaaaaagtgctttgcaaattatgaggtgaacatggtggaaaatagaaatagcatttcacaaaaagtcctgatcagtgtatgaataacatcctctgcttcgaaatattatgaacattgcatatcatcacattagataaagcatatacataagtattgtcaaatctgcttcataagattataaacatcttttgcttttggtggggcacgagatcagataattgcaaagaaaagatggagaaaaggtaaagactgaaaaagaaaataccaaagaccagagaaaggaaaaagaagtagaaaaagagaagataaaggaaaggggataaaagggacaagacaagacaaatcagaggtagaagagcagagacacagaagataaaaacatgcaaataaaaggcaaaagaaatgtgaacccagaggtgatctgaacaagagagaaggaaaaggagaaatgatcgtgaggggggggaaagaaaaaaaaaagacagaaaaaaaaattaaggttttcattcctttaccagtttttagatccttttccacctcagaacaggcttgcagcctcttattttctgtgtttcctcgtgctcctctg

SEQ ID NO: 51916 - DNA, 442 bp, Homo sapiens
gctcagacaggctgaaaatgtgttcaagcttacatgatctggtaagtcagagccagcctccgagccaccggcttcctctgaagcctgagttcctacccattctgctggctgtctcccgagtactgtgggcacatgaggccagagatctcagaattcagctgcactggaatcccctggagggctggctgaaatgcaggttgcctgctcccactgagttgcttactccctagggtgcagtgggccggagaatctgcatttctaactagtgttcaggtgctgctgctgctgctgctgctggtggtgggtatccattttagggaccactgcttgaggctgggagactggctggggcaggggacactgaggtctcattctgattcccctgggacctgagtgagctcccctgagcctgctggtgaattcccattctggctgttcatgt

SEQ ID NO: 51917 - DNA, 327 bp, Homo sapiens
tccatcaggaatatttaaacaaagttcactacttaaacaccatctaaatatactttttgttatattcccagcagaaattgatggcaaggaatcatatatcccatcaaaaccgtatttttccccctaaaaggcagtttagatgttctcattctaggttttccatctctctcctccaccattccaattcccagagtacctctacaaatatccctgcttaccagtagaactatttgctttaacaatctttctgtgggtaaggagatgcatatgccaatgtgaaaactatggaggggactcctgccttcagagctgactagaaacattgaa

SEQ ID NO: 51918 - DNA, 529 bp, Homo sapiens
aggattggcagaatttggaattatatgtcttattaaatatgctttgaaagacagaagtaataagttctggttaatcttttatagtgtttgtcttgggagcaaatagtatgagagagaggtgtgagaatgggaataataatctaacatatcaaaattagagaaccccaaaccatcacattctttctctttgtgccattttagaattgagaataccgtccttcttactgtggttatatttttacttttgtatataaacttgtagcagaaaataagattcagtagcttaaaggggccaggcactgtggctcatgcccgtaatcccagtggtttagaaggctgaggggaaggatcacttgaggcctggagtttgaaatcaacctgggcaacatagcaagactctgttccttcaaaaaaaatttttaaaaattagctgagcatggaggtgcatgcctataatcctagcaatgattataccattacactccagcctggatgatagagtgacaccctgtctcaaaagaaaaaaaaa

SEQ ID NO: 51919 - DNA, 489 bp, Homo sapiens
tgtcagattaacaaatgctctaatgaacaaatattaacattggttcaattttttctgacatttccagaaaagcttgggcacttaaagaagatcataaaaagccttagtttctactacgtatgttgttgtgtgagggtttttttttttaaatgaagtatgttgtcttttgtaaattgaatagttaaaaaaatgaactgtcacagatactaaaacctggtattcaacatactatgtttgactcaagtgttcacagaatgtgatgcaaacaaatgttctctcaacttacatccaggatagctaaaatattactttaacacatgttgaaagtagagtgctctatttggctagatataattccaggctgtctaagttgagtaatttcctcagacattccaactttgatcaactgcagcaagaacttttagcatgtctgtaaagcagccagtgcatctgtaaatatgtcctgagatagggagaaaagagaatgcc

SEQ ID NO: 51920 - DNA, 2924 bp, Homo sapiens
aaccgaaagagaaaacaggccgcgcgggcggcagaggagccgggcgccgcaatggacgtgcgggcgctgccgtggctgccgtggctgctgtggctgctgtgccggggcggcggcgatgcggactcccgcgcccccttcaccccgacctggccgcggagccgcgagcgtgaagccgccgccttccgggaaagtcttaatagacatcgatacttgaattctttatttcccagtgaaaactccaccgccttctatggaataaatcagttttcctatttgtttcctgaagagtttaaagccatttatttaagaagcaaaccttccaagtttcccagatactcagcagaagtacatatgtccatccccaatgtgtctttgccgttaagatttgactggagggacaagcaggttgtgacacaagtgagaaaccagcagatgtgtggaggatgctgggccttcagcgtggtgggggcagtggaatctgcttatgcaataaaggggaagcccctggaagacctaagtgtccagcaggtcattgactgttcgtataataattatggctgcaatggaggctctactctcaatgctttgaactggttaaacaagatgcaagtaaaactggtgaaagattcagaatatccttttaaagcacaaaatggtctgtgccattacttttctggttcacattctggattttcaatcaaaggttattctgcatatgacttcagtgaccaagaagatgaaatggcaaaagcacttcttacctttggccctttggtagtcatagtagatgcagtgagctggcaagattatctgggaggcattatacagcatcactgctctagtggagaagcaaatcatgcagttctcataactgggtttgataaaacaggaagcactccatattggattgtgcggaattcctggggaagttcttggggagtagatggttatgcccatgtcaaaatgggaagtaatgtttgtggtattgcagattccgtttcttctatatttgtgtgacatgttgggcagatcaagagacagctacaaaaatgaaggttttcataatgcaatgtaacatagtacttcaaagtattattcaacttcaagtttcagcaactacctacaaaagattctaaggcctagtagtatttaaactaagtttcagaatgttcccttcttgtagagagatggacaaccaaagtcagtgggacaaactccagcacagaagcctgcgaggaagcctatggaatagtttcctgtcctgagacgaaattcagattaggagatattttaggcccctgcaactggggaaggctactgtttgtttttgtttgcttattatttatttgtttgtttattgtgagatatttcaggtgggatcaaagaggtcataagaatttattttcttttgtggggtgtaactactagctttagattacccctatacacaagaatggccaacctaaaattatgtgtgtcttgtacagttagttatattagcagccctctgagatggcgtatctatcggaaggatttcaaacaccaattgctttacctgaacaaatggtgcttaccctttgaacagcagagtgaccacgtagaaggaaggaaaagggcaaaatcgcttcagttaaactgaaattaaatgaacaataaggcaactatataagtaacttctagtagcattgcctgagagacaaattattgtttgataattttcattgtgaataggaatccaatagatcatattgcttactttgttctttttatactatagaataatattttgttctctagtatatcaaaataccaaaatattatctcatattttctccctctttctcttactcttaccaagttttcctggtggcttggcttccctgactaaagaattaagtctcatttttactttccatttctattttcttaccacttggttggctccctttgtctctgtacctttaccaacattaggatctcacctctttcttcctcccttaattcataagcaccactcctatcaaagtcccatctcttaaccctgggtatcaaacaaactgtgagttttccagaatctgtttcccagttttcccctcagctttcctggtctcccatccgaactgcttctttgtgcacctcttgttctttctcttggctcccagtcttgattcctgtgatcactcttgcatcactaattgcacaagtgatttcaggtgcaattctgattagcctgcgtccacacagtgatcgatgatcctatgtgcctagaaaggacactgtgtgctgctcatgacctgcaacaggaaaaaagccatttcttgttagcagtgtaagaaccttagagcaaaggagttgaccttctgattgaatataagcacaaccatattaaatgaatcaatacaagaaaattatttctgatactatgtatgtacatatttcttctctaaaatgtatcattcttttctaatgtatatgatctaacaaaaatgaaacatgaaatgcagtagcaaccactaaaaaaaaaattcaaggacatctaactttttctctcacttttgccctttgtttatccttccctgtgattagataaacaaaataaaaaacaaaatgctgtatttctcttcttacgccagtcagaaccaatccgaaaagaatgtgtgttgactcaggtttggagttatttcaggaagacagatattgaccttttaattgataaatattcttattatcctggaatgccagaaaagaactatgtcctgcttgtctagtttgtattcgctgactttctatgtgatatagatgcatttgtaatactctttttcaagtgctaaaggatttctaaaatttcaaactgattaatatgtttctgctgttctggattttgatgacatttacaataaaacaacctacatttgactttggtt

SEQ ID NO: 51921 - DNA, 3203 bp, Homo sapiens
aaccgaaagagaaaacaggccgcgcgggcggcagaggagccgggcgccgcaatggacgtgcgggcgctgccgtggctgccgtggctgctgtggctgctgtgccggggcggcggcgatgcggactcccgcgcccccttcaccccgacctggccgcggagccgcgagcgtgaagccgccgccttccgggaaagtcttaatagacatcgatacttgaattctttatttcccagtgaaaactccaccgccttctatggaataaatcagttttcctatttgtttcctgaagagtttaaagccatttatttaagaagcaaaccttccaagtttcccagatactcagcagaagtacatatgtccatccccaatgtgtctttgccgttaagatttgactggagggacaagcaggttgtgacacaagtgagaaaccagcagatgtgtggaggatgctgggccttcagcgtggtgggggcagtggaatctgcttatgcaataaaggggaagcccctggaagacctaagtgtccagcaggtcattgactgttcgtataataattatggctgcaatggaggctctactctcaatgctttgaactggttaaacaagatgcaagtaaaactggtgaaagattcagaatatccttttaaagcacaaaatggtctgtgccattacttttctggttcacattctggattttcaatcaaaggttattctgcatatgacttcagtgaccaagaagatgaaatggcaaaagcacttcttacctttggccctttggtagtcatagtagatgcagtgagctggcaagattatctgggaggcattatacagcatcactgctctagtggagaagcaaatcatgcagttctcataactgggtttgataaaacaggaagcactccatattggattgtgcggaattcctggggaagttcttggggagtagatggttatgcccatgtcaaaatgggaagtaatgtttgtggtattgcagattccgtttcttctatatttgtgtgacatgttgggcagatcaagagacagctacaaaaatgaaggttttcataatgcaatgtaacatagtacttcaaagtattattcaacttcaagtttcagcaactacctacaaaagattctaaggcctagtagtatttaaactaagtttcagaatgttcccttcttgtagagagatggacaaccaaagtcagtgggacaaactccagcacagaagcctgcgaggaagcctatggaatagtttcctgtcctgagacgaaattcagattaggagatattttaggcccctgcaactggggaaggctactgtttgtttttgtttgcttattatttatttgtttgtttattgtgagatatttcaggtgggatcaaagaggtcataagaatttattttcttttgtggggtgtaactactagctttagattacccctatacacaagaatggccaacctaaaattatgtgtgtcttgtacagttagttatattagcagccctctgagatggcgtatctatcggaaggatttcaaacaccaattgctttacctgaacaaatggtgcttaccctttgaacagcagagtgaccacgtagaaggaaggaaaagggcaaaatcgcttcagttaaactgaaattaaatgaacaataaggcaactatataagtaacttctagtagcattgcctgagagacaaattattgtttgataattttcattgtgaataggaatccaatagatcatattgcttactttgttctttttatactatagaataatattttgttctctagtatatcaaaataccaaaatattatctcatattttctccctctttctcttactcttaccaagttttcctggtggcttggcttccctgactaaagaattaagtctcatttttactttccatttctattttcttaccacttggttggctccctttgtctctgtacctttaccaacattaggatctcacctctttcttcctcccttaattcataagcaccactcctatcaaagtcccatctcttaaccctgggtatcaaacaaactgtgagttttccagaatctgtttcccagttttcccctcagctttcctggtctcccatccgaactgcttctttgtgcacctcttgttctttctcttggctcccagtcttgattcctgtgatcactcttgcatcactaattgcacaagtgatttcaggtgcaattctgattagcctgcgtccacacagtgatcgatgatcctatgtgcctagaaaggacactgtgtgctgctcatgacctgcaacaggaaaaaagccatttcttgttagcagtgtaagaaccttagagcaaaggagttgaccttctgattgaatataagcacaaccatattaaatgaatcaatacaagaaaattatttctgatactatgtatgtacatatttcttctctaaaatgtatcattcttttctaatgtatatgatctaacaaaaatgaaacatgaaatgcagtagcaaccactaaaaaaaaaattcaaggacatctaactttttctctcacttttgccctttgtttatccttccctgtgattagataaacaaaataaaaaacaaaatgctgtatttctcttcttacgccagtcagaaccaatccgaaaagaatgtgtgttgactcaggtttggagttatttcaggaagacagatattgaccttttaattgataaatattcttattatcctggaatgccagaaaagaactatgtcctgcttgtctagtttgtattcgctgactttctatgtgatatagatgcatttgtaatactctttttcaagtgctaaaggatttctaaaatttcaaactgattaatatgtttctgctgttctggattttgatgacatttacaataaaacaacctacatttgactttggtttaaaaagaacctcttcttaagtgtatggcttacattttgtcaacacggtattaatgtgctttatatttacagttttctcagctctaaattaatatatccagcttttggttttctccataggcactttaacctcagtgtttccgaaactccattcgtcatcctccctaacttctcccaccacccccaacaaaaatttcctttacctctaagagcctctattttggttaacagaatcaacattatggaatcacccaatcaataaaattaagacaaatccta

SEQ ID NO: 51922 - DNA, 1496 bp, Homo sapiens
  misc_feature (55)..(55): n is a, c, g, or t
ccctctgagatagatacgccatctcagagggctgctaatataactaactgtacangacacacattatattagcagccctctgagatggcgtatctatcggaaggatttcaaacaccaattgctttacctgaacaaatggtgcttaccctttgaacagcagagtgaccacgtagaaggaaggaaaagggcaaaatcgcttcagttaaactgaaattaaatgaacaataaggcaactatataagtaacttctagtagcattgcctgagagacaaattattgtttgataattttcattgtgaataggaatccaatagatcatattgcttactttgttctttttatactatagaataatattttgttctctagtatatcaaaataccaaaatattatctcatattttctccctctttctcttactcttaccaagttttcctggtggcttggcttccctgactaaagaattaagtctcatttttactttccatttctattttcttaccacttggttggctccctttgtctctgtacctttaccaacattaggatctcacctctttcttcctcccttaattcataagcaccactcctatcaaagtcccatctcttaaccctgggtatcaaacaaactgtgagttttccagaatctgtttcccagttttcccctcagctttcctggtctcccatccgaactgcttctttgtgcacctcttgttctttctcttggctcccagtcttgattcctgtgatcactcttgcatcactaattgcacaagtgatttcaggtgcaattctgattagcctgcgtccacacagtgatcgatgatcctatgtgcctagaaaggacactgtgtgctgctcatgacctgcaacaggaaaaaagccatttcttgttagcagtgtaagaaccttagagcaaaggagttgaccttctgattgaatataagcacaaccatattaaatgaatcaatacaagaaaattatttctgatactatgtatgtacatatttcttctctaaaatgtatcattcttttctaatgtatatgatctaacaaaaatgaaacatgaaatgcagtagcaaccactaaaaaaaaaattcaaggacatctaactttttctctcacttttgccctttgtttatccttccctgtgattagataaacaaaataaaaaacaaaatgctgtatttctcttcttacgccagtcagaaccaatccgaaaagaatgtgtgttgactcaggtttggagttatttcaggaagacagatattgaccttttaattgataaatattcttattatcctggaatgccagaaaagaactatgtcctgcttgtctagtttgtattcgctgactttctatgtgatatagatgcatttgtaatactctttttcaagtgctaaaggatttctaaaatttcaaactgattaatatgtttctgctgttctggattttgatgacatttacaataaaacaacctacatttgactttggtt

SEQ ID NO: 51923 - DNA, 2413 bp, Homo sapiens
aaccgaaagagaaaacaggccgcgcgggcggcagaggagccgggcgccgcaatggacgtgcgggcgctgccgtggctgccgtggctgctgtggctgctgtgccggggcggcggcgatgcggactcccgcgcccccttcaccccgacctggccgcggagccgcgagcgtgaagccgccgccttccgggaaagtcttaatagacatcgatacttgaattctttatttcccagtgaaaactccaccgccttctatggaataaatcagttttcctatttgtttcctgaagagtttaaagccatttatttaagaagcaaaccttccaagtttcccagatactcagcagaagtacatatgtccatccccaatgtgtctttgccgttaagatttgactggagggacaagcaggttgtgacacaagtgagaaaccagcagatgtgtggaggatgctgggccttcagcgtggtgggggcagtggaatctgcttatgcaataaaggggaagcccctggaagacctaagtgtccagcaggtcattgactgttcgtataataattatggctgcaatggaggctctactctcaatgctttgaactggttaaacaagatgcaagtaaaactggtgaaagattcagaatatccttttaaagcacaaaatggtctgtgccattacttttctggttcacattctggattttcaatcaaaggttattctgcatatgacttcagtgaccaagaagatgaaatggcaaaagcacttcttacctttggccctttggtagtcatagtagatgcagtgagctggcaagattatctgggaggcattatacagcatcactgctctagtggagaagcaaatcatgcagttctcataactgggtttgataaaacaggaagcactccatattggattgtgcggaattcctggggaagttcttggggagtagatggttatgcccatgtcaaaatgggaagtaatgtttgtggtattgcagattccgtttcttctatatttgtgtgacatgttgggcagatcaagagacagctacaaaaatgaaggttttcataatgcaatgtaacatagtacttcaaagtattattcaacttcaagtttcagcaactacctacaaaagattctaaggcctagtagtatttaaactaagtttcagaatgttcccttcttgtagagagatggacaaccaaagtcagtgggacaaactccagcacagaagcctgcgaggaagcctatggaatagtttcctgtcctgagacgaaattcagattaggagatattttaggcccctgcaactggggaaggctactgtttgtttttgtttgcttattatttatttgtttgtttattgtgagatatttcaggtgggatcaaagaggtcataagaatttattttcttttgtggggtgtaactactagctttagattacccctatacacaagaatggccaacctaaaattatgtgtgtcttgtacagttagttatattagcagccctctgagatggcgtatctatcggaaggatttcaaacaccaattgctttacctgaacaaatggtgcttaccctttgaacagcagagtgaccacgtagaaggaaggaaaagggcaaaatcgcttcagttaaactgaaattaaatgaacaataaggcaactatataagtaacttctagtagcattgcctgagagacaaattattgtttgataattttcattgtgaataggaatccaatagatcatattgcttactttgttctttttatactatagaataatattttgttctctagtatatcaaaataccaaaatattatctcatattttctccctctttctcttactcttaccaagttttcctggtggcttggcttccctgactaaagaattaagtctcatttttactttccatttctattttcttaccacttggttggctccctttgtctctgtacctttaccaacattaggatctcacctctttcttcctcccttaattcataagcaccactcctatcaaagtcccatctcttaaccctgggtatcaaacaaactgtgagttttccagaatctgtttcccagttttcccctcagctttcctggtctcccatccgaactgcttctttgtgcacctcttgttctttctcttggctcccagtcttgattcctgtgatcactcttgcatcactaattgcacaagtgatttcaggtgcaattctgattagcctgcgtccacacagtgatcgatgatcctatgtgcctagaaaggacactgtgtgctgctcatgacctgcaacaggaaaaaagccatttcttgttagcagtgtaagaaccttagagcaaagaaagattatcaaaggtatccatatataaatcaacaaacaactattgttcccagtgtggagagag

SEQ ID NO: 51924 - DNA, 1364 bp, Homo sapiens
caggatctcagaggtcgtatgacagcagagtgaccacgtagaaggaaggaaaagggcaaaatcgcttcagttaaactgaaattaaatgaacaataaggcaactatataagtaacttctagtagcattgcctgagagacaaattattgtttgataattttcattgtgaataggaatccaatagatcatattgcttactttgttctttttatactatagaataatattttgttctctagtatatcaaaataccaaaatattatctcatattttctccctctttctcttactcttaccaagttttcctggtggcttggcttccctgactaaagaattaagtctcatttttactttccatttctattttcttaccacttggttggctccctttgtctctgtacctttaccaacattaggatctcacctctttcttcctcccttaattcataagcaccactcctatcaaagtcccatctcttaaccctgggtatcaaacaaactgtgagttttccagaatctgtttcccagttttcccctcagctttcctggtctcccatccgaactgcttctttgtgcacctcttgttctttctcttggctcccagtcttgattcctgtgatcactcttgcatcactaattgcacaagtgatttcaggtgcaattctgattagcctgcgtccacacagtgatcgatgatcctatgtgcctagaaaggacactgtgtgctgctcatgacctgcaacaggaaaaaagccatttcttgttagcagtgtaagaaccttagagcaaaggagttgaccttctgattgaatataagcacaaccatattaaatgaatcaatacaagaaaattatttctgatactatgtatgtacatatttcttctctaaaatgtatcattcttttctaatgtatatgatctaacaaaaatgaaacatgaaatgcagtagcaaccactaaaaaaaaaattcaaggacatctaactttttctctcacttttgccctttgtttatccttccctgtgattagataaacaaaataaaaaacaaaatgctgtatttctcttcttacgccagtcagaaccaatccgaaaagaatgtgtgttgactcaggtttggagttatttcaggaagacagatattgaccttttaattgataaatattcttattatcctggaatgccagaaaagaactatgtcctgcttgtctagtttgtattcgctgactttctatgtgatatagatgcatttgtaatactctttttcaagtgctaaaggatttctaaaatttcaaactgattaatatgtttctgctgttctggattttgatgacatttacaataaaacaacctacatttgactttggtt

SEQ ID NO: 51925 - DNA, 2786 bp, Homo sapiens
aaccgaaagagaaaacaggccgcgcgggcggcagaggagccgggcgccgcaatggacgtgcgggcgctgccgtggctgccgtggctgctgtggctgctgtgccggggcggcggcgatgcggactcccgcgcccccttcaccccgacctggccgcggagccgcgagcgtgaagccgccgccttccgggaaagtcttaatagacatcgatacttgaattctttatttcccagtgaaaactccaccgccttctatggaataaatcagttttcctatttgtttcctgaagagtttaaagccatttatttaagaagcaaaccttccaagtttcccagatactcagcagaagtacatatgtccatccccaatgtgtctttgccgttaagatttgactggagggacaagcaggttgtgacacaagtgagaaaccagcagatgtgtggaggatgctgggccttcagcgtggtgggggcagtggaatctgcttatgcaataaaggggaagcccctggaagacctaagtgtccagcaggtcattgactgttcgtataataattatggctgcaatggaggctctactctcaatgctttgaactggttaaacaagatgcaagtaaaactggtgaaagattcagaatatccttttaaagcacaaaatggtctgtgccattacttttctggttcacattctggattttcaatcaaaggttattctgcatatgacttcagtgaccaagaagatgaaatggcaaaaggaagcactccatattggattgtgcggaattcctggggaagttcttggggagtagatggttatgcccatgtcaaaatgggaagtaatgtttgtggtattgcagattccgtttcttctatatttgtgtgacatgttgggcagatcaagagacagctacaaaaatgaaggttttcataatgcaatgtaacatagtacttcaaagtattattcaacttcaagtttcagcaactacctacaaaagattctaaggcctagtagtatttaaactaagtttcagaatgttcccttcttgtagagagatggacaaccaaagtcagtgggacaaactccagcacagaagcctgcgaggaagcctatggaatagtttcctgtcctgagacgaaattcagattaggagatattttaggcccctgcaactggggaaggctactgtttgtttttgtttgcttattatttatttgtttgtttattgtgagatatttcaggtgggatcaaagaggtcataagaatttattttcttttgtggggtgtaactactagctttagattacccctatacacaagaatggccaacctaaaattatgtgtgtcttgtacagttagttatattagcagccctctgagatggcgtatctatcggaaggatttcaaacaccaattgctttacctgaacaaatggtgcttaccctttgaacagcagagtgaccacgtagaaggaaggaaaagggcaaaatcgcttcagttaaactgaaattaaatgaacaataaggcaactatataagtaacttctagtagcattgcctgagagacaaattattgtttgataattttcattgtgaataggaatccaatagatcatattgcttactttgttctttttatactatagaataatattttgttctctagtatatcaaaataccaaaatattatctcatattttctccctctttctcttactcttaccaagttttcctggtggcttggcttccctgactaaagaattaagtctcatttttactttccatttctattttcttaccacttggttggctccctttgtctctgtacctttaccaacattaggatctcacctctttcttcctcccttaattcataagcaccactcctatcaaagtcccatctcttaaccctgggtatcaaacaaactgtgagttttccagaatctgtttcccagttttcccctcagctttcctggtctcccatccgaactgcttctttgtgcacctcttgttctttctcttggctcccagtcttgattcctgtgatcactcttgcatcactaattgcacaagtgatttcaggtgcaattctgattagcctgcgtccacacagtgatcgatgatcctatgtgcctagaaaggacactgtgtgctgctcatgacctgcaacaggaaaaaagccatttcttgttagcagtgtaagaaccttagagcaaaggagttgaccttctgattgaatataagcacaaccatattaaatgaatcaatacaagaaaattatttctgatactatgtatgtacatatttcttctctaaaatgtatcattcttttctaatgtatatgatctaacaaaaatgaaacatgaaatgcagtagcaaccactaaaaaaaaaattcaaggacatctaactttttctctcacttttgccctttgtttatccttccctgtgattagataaacaaaataaaaaacaaaatgctgtatttctcttcttacgccagtcagaaccaatccgaaaagaatgtgtgttgactcaggtttggagttatttcaggaagacagatattgaccttttaattgataaatattcttattatcctggaatgccagaaaagaactatgtcctgcttgtctagtttgtattcgctgactttctatgtgatatagatgcatttgtaatactctttttcaagtgctaaaggatttctaaaatttcaaactgattaatatgtttctgctgttctggattttgatgacatttacaataaaacaacctacatttgactttggtt

SEQ ID NO: 51926 - DNA, 707 bp, Homo sapiens
  misc_feature (622)..(622): n is a, c, g, or t
gaggagggacccgcagctcagctacagcacagatcagcaccatgaagcttctcacgggcctggttttctgctccttggtcctgagtgtcagcagccgaagcttcttttcgttccttggcgaggcttttgatggggctcgggacatgtggagagcctactctgacatgagagaagccaattacatcggctcagacaaatacttccatgctcgggggaactatgatgctgccaaaaggggacctgggggtgcctgggccgcagaagtgatcagcaatgccagagagaatatccagagactcacaggccatggtgcggaggactcgctggccgatcaggctgccaataaatggggcaggagtggcagagaccccaatcacttccgacctgctggcctgcctgagaaatactgagcttcctcttcactctgctctcaggagacctggctatgaggccctcggggcagggatacaaagttagtgaggtctatgtccagagaagctgagatatggcatataataggcatctaataaatgcttaagaggtggaaacaaaaaaccaacacacaacaaaaaacttttttgggccgccctgggcccctggaaaaacttttttaaaccccttncttgtgggccgggggccccaatgttacgcgaccgtggcaaagcgtgtcccaagaaaaaccgggccagaaagggcggggttcccca

SEQ ID NO: 51927 - DNA, 819 bp, Homo sapiens
  misc_feature (642)..(642): n is a, c, g, or t
  misc_feature (664)..(664): n is a, c, g, or t
  misc_feature (681)..(681): n is a, c, g, or t
  misc_feature (703)..(703): n is a, c, g, or t
gaggagggacccgcagctcagctacagcacagatcagcaccatgaagcttctcacgggcctggttttctgctccttggtcctgagtgtcagcagccgaagcttcttttcgttccttggcgaggcttttgatggggctcgggacatgtggagagcctactctgacatgagagaagccaattacatcggctcagacaaatacttccatgctcgggggaactatgatgctgccaaaaggggacctgggggtgcctgggccgcagaagtgatcagcaatgccagagagaatatccagagactcacaggccatggtgcggaggactcgctggccgatcaggctgccaataaatggggcaggagtggcagagaccccaatcacttccgacctgctggcctgcctgagaaatactgagcttcctcttcactctgctctcaggagacctggctatgaggccctcggggcagggatacaaagttagtgaggtctatgtccagagaagctgagatatggcatataataggcatctaataaatgcttaagaggtggagtaaaaaaaaaaaaaacaaaaaaaaaatttttggggggcttgggccttgaaaaagtttttaaaacactttgtttggggcgcgggggccccattggngtacgggaaccgtgggtcaaanggggttccagagaaaanccgggcgcgagacaagggcggnggattcccccgaagtaaaaagagcccggggcaaaccgggggttcggaaccaaccccaaggggatccggaggccacgaggagcctacacgggggtcccaagggagccgaataaaaca

SEQ ID NO: 51928 - DNA, 607 bp, Homo sapiens
gaggagggacccgcagctcagctacagcacagatcagttatcctggggcatacagccataccattctgaaggtgtcttatctcctctgatctagagagcaccatgaagcttctcacgggcctggttttctgctccttggtcctgagtgtcagcagccgaagcttcttttcgttccttggcgaggcttttgatggggctcgggacatgtggagagcctactctgacatgagagaagccaattacatcggctcagacaaatacttccatgctcgggggaactatgatgctgccaaaaggggacctgggggtgcctgggccgcagaagtgatcagcaatgccagagagaatatccagagactcacaggccatggtgcggaggactcgctggccgatcaggctgccaataaatggggcaggagtggcagagaccccaatcacttccgacctgctggcctgcctgagaaatactgagcttcctcttcactctgctctcaggagacctggctatgaggccctcggggcagggatacaaagttagtgaggtctatgtccagagaagctgagatatggcatataataggcatctaataaatgcttaagaggtgga

SEQ ID NO: 51929 - DNA, 810 bp, Homo sapiens
gaggagggacccgcagctcagctacagcacagatcagaggagcacaccaaggagtgatttttaaaacttactctgttttctctttcccaacaagattatcatttcctttaaaaaaaatagttatcctggggcatacagccataccattctgaaggtgtcttatctcctctgatctagagagcaccatgaagcttctcacgggcctggttttctgctccttggtcctgagtgtcagcagccgaagcttcttttcgttccttggcgaggcttttgatggggctcgggacatgtggagagcctactctgacatgagagaagccaattacatcggctcagacaaatacttccatgctcgggggaactatgatgctgccaaaaggggacctgggggtgcctgggccgcagaagtgatcagcaatgccagagagaatatccagagactcacaggccatggtgcggaggactcgctggccgatcaggctgccaataaatggggcaggagtggcagagaccccaatcacttccgacctgctggcctgcctgagaaatactgagcttcctcttcactctgctctcaggagacctggctatgaggccctcggggcagggatacaaagttagtgaggtctatgtccagagaagctgagatatggcatataataggcatctaataaatgcttaagaggtggatcaaaaagaagacaaagaagacaaaaagatgtgtgtgggcaggcatgagggccgtgaaaaaggtgtttgacaaacagtccgataggggcacggggcacccgacggatagggaaaagtggt

SEQ ID NO: 51930 - DNA, 826 bp, Homo sapiens
tgggcgactgcctgacttctcctttcatttcagcaccatgaagcttctcacgggcctggttttctgctccttggtcctgagtgtcagcagccgaagcttcttttcgttccttggcgaggcttttgatggtaaggcttcagaaggtttgcaggatttctgaagagaaacatcgccctggacctgataaactggggaaaatgatgctttcggaaggctgcttttgaaccacagagttgctagtgtctgcgttgctgaggcctgccaggaactagggtttgctgggttgcctgtctcgagtctttcagagctgctgggaatatcccctttccccgtagtgcagcttctcaggatgtgttaagtggatggatcacatttcagaagccgctgcaaggtgtatcaaaaacacatctcctgagccgtaagggacggggcatccagtaacaacgcacacggggtatttttgggcttccttaagatttgagccgctgccttaggttgtgctgcccaatgtgcctggggagctgctaaacagattagagagtcgaggattgttgtcagttactcagagaaagaacaatcatcctttccaggagcacctgagctgtttgttttgagtagaagatgcaaaataaggcctgcaattggtataaaatgtccctcagcataaatcgcataggagtatgactaaggctgttgactcttctgtcttctttctccttcctccttcgatttcctagttggataatgtacagggctctttagcctcgctctgtcaggggctcccttcctggtttgttctgtttccattcttccttctccagccttc

SEQ ID NO: 51931 - DNA, 251 bp, Homo sapiens
gaggagggacccgcagctcagctacagcacagatcagaggagcacaccaaggagtgatttttaaaacttactctgttttctctttcccaacaagattatcatttcctttaaaaaaaatagttatcctggggcatacagccataccattctgaaggtgtcttatctcctctgatctagagaggtaagcagggtcgggcctggtagtacttggatgggagaacacctgggaataccaggtgctaaaggcttta

SEQ ID NO: 51932 - DNA, 690 bp, Homo sapiens
gaggagggacccgcagctcagctacagcacagatcagaggagcacaccaaggagtgatttttaaaacttactctgttttctctttcccaacaagattatcatttcctttaaaaaaaatagttatcctggggcatacagccataccattctgaaggtgtcttatctcctctgatctagagagcaccatgaagcttctcacgggcctggttttctgctccttggtcctgagtgtcagcagccgaagcttcttttcgttccttggcgaggcttttgatggggctcgggacatgtggagagcctactctgacatgagagaagccaattacatcggctcagacaaatacttccatgctcgggggaactatgatgctgccaaaaggggacctgggggtgcctgggccgcagaagtgatcagcaatgccagagagaatatccagagactcacaggccatggtgcggaggactcgctggccgatcaggctgccaataaatggggcaggagtggcagagaccccaatcacttccgacctgctggcctgcctgagaaatactgagcttcctcttcactctgctctcaggagacctggctatgaggccctcggggcagggatacaaagttagtgaggtctatgtccagagaagctgagatatggcatataataggcatctaataaatgcttaagaggtgga

SEQ ID NO: 51933 - DNA, 686 bp, Homo sapiens
tgcgacctttacaaatgagtacagcgtagctagaggagcacaccaaggagtgatttttaaaacttactctgttttctctttcccaacaagattatcatttcctttaaaaaaaatagttatcctggggcatacagccataccattctgaaggtgtcttatctcctctgatctagagagcaccatgaagcttctcacgggcctggttttctgctccttggtcctgagtgtcagcagccgaagcttcttttcgttccttggcgaggcttttgatggggctcgggacatgtggagagcctactctgacatgagagaagccaattacatcggctcagacaaatacttccatgctcgggggaactatgatgctgccaaaaggggacctgggggtgcctgggccgcagaagtgatcagcaatgccagagagaatatccagagactcacaggccatggtgcggaggactcgctggccgatcaggctgccaataaatggggcaggagtggcagagaccccaatcacttccgacctgctggcctgcctgagaaatactgagcttcctcttcactctgctctcaggagacctggctatgaggccctcggggcagggatacaaagttagtgaggtctatgtccagagaagctgagatatggcatataataggcatctaataaatgcttaagaggtgga

SEQ ID NO: 51934 - DNA, 970 bp, Homo sapiens
tgcgacctttacaaatgagtacagcgtagctagaggagcacaccaaggagtgatttttaaaacttactctgttttctctttcccaacaagattatcatttcctttaaaaaaaatagttatcctggggcatacagccataccattctgaaggtgtcttatctcctctgatctagagagcaccatgaagcttctcacgggcctggttttctgctccttggtcctgagtgtcagcagccgaagcttcttttcgttccttggcgaggcttttgatggtaaggcttcagaaggtttgcaggatttctgaagagaaacatcgccctggacctgataaactggggaaaatgatgctttcggaaggctgcttttgaaccacagagttgctagtgtctgcgttgctgaggcctgccaggaactagggtttgctgggttgcctgtctcgagtctttcagagctgctgggaatatcccctttccccgtagtgcagcttctcaggatgtgttaagtggatggatcacatttcagaagccgctgcaaggtgtatcaaaaacacatctcctgagccgtaagggacggggcatccagtaacaacgcacacggggtatttttgggcttccttaagatttgagccgctgccttaggttgtgctgcccaatgtgcctggggagctgctaaacagattagagagtcgaggattgttgtcagttactcagagaaagaacaatcatcctttccaggagcacctgagctgtttgttttgagtagaagatgcaaaataaggcctgcaattggtataaaatgtccctcagcataaatcgcataggagtatgactaaggctgttgactcttctgtcttctttctccttcctccttcgatttcctagttggataatgtacagggctctttagcctcgctctgtcaggggctcccttcctggtttgttctgtttccattcttccttctccagccttc

SEQ ID NO: 51935 - DNA, 344 bp, Homo sapiens
catataataggcatctaataaatgcttaagaggtggaaatttgttgaaacagtgtgttcttcttttggtgctgactgcctgtttggtacaaaagggaaatcaatgcacacccacatgaagggtgagcctaggtaggcctatgtgtttggatgtgaggagacattcttagtagtcacagtgcagacacctgcatcaacccttccacaaattagacctccttttttccagacctttgtggttacattgttgctatttccagtcccttccttgcccaggcttctcatctcctgtgaattatttcctgttaccttctctgtccctcagttcttcattcctcagtgatc

SEQ ID NO: 51936 - DNA, 546 bp, Homo sapiens
gaggagggacccgcagctcagctacagcacagatcagcaccatgaagcttctcacgggcctggttttctgctccttggtcctgagtgtcagcagccgaagcttcttttcgttccttggcgaggcttttgatggggctcgggacatgtggagagcctactctgacatgagagaagccaattacatcggctcagacaaatacttccatgctcgggggaactatgatgctgccaaaaggggacctgggggtgcctgggccgcagaagtgatcagcaatgccagagagaatatccagagactcacaggccatggtgcggaggactcgctggccgatcaggctgccaataaatggggcaggagtggcagagaccccaatcacttccgacctgctggcctgcctgagaaatactgagcttcctcttcactctgctctcaggagacctggctatgaggccctcggggcagggatacaaagttagtgaggtctatgtccagagaagctgagatatggcatataataggcatctaataaatgcttaagaggtgga

SEQ ID NO: 51937 - DNA, 738 bp, Homo sapiens
gaggagggacccgcagctcagctacagcacagatcagcaccatgaagcttctcacgggcctggttttctgctccttggtcctgagtgtcagcagccgaagcttcttttcgttccttggcgaggcttttgatggggctcgggacatgtggagagcctactctgacatgagagaagccaattacatcggctcagacaaatacttccatgctcgggggaactatgatgctgccaaaaggggacctgggggtgcctgggccgcagaagtgatcagcaatgccagagagaatatccagagactcacaggccatggtgcggaggactcgctggccgatcaggctgccaataaatggggcaggagtggcagagaccccaatcacttccgacctgctggcctgcctgagaaatactgagcttcctcttcactctgctctcaggagacctggctatgaggccctcggggcagggatacaaagttagtgaggtctatgtccagagaagctgagatatggcatataataggcatctaataaatgcttaagaggtggacaaaaaaaaaaaaaaaaaaaaaaaaaaaaaaaaaaaaaacaatggtcggtacggactgaggccctcgagaaagctcgaagaacacatcggttgggcgaggggacccacaagatacagggacacagggccaaaagcggtcccaaaggagaaccggggccaagaacaggggcggggattcccaccaattaaaag

SEQ ID NO: 51938 - DNA, 819 bp, Homo sapiens
  misc_feature (642)..(642): n is a, c, g, or t
  misc_feature (664)..(664): n is a, c, g, or t
  misc_feature (681)..(681): n is a, c, g, or t
  misc_feature (703)..(703): n is a, c, g, or t
acctctaagtatatagatacctatatataccatagctcagctacagcacagatcagcaccatgaagcttctcacgggcctggttttctgctccttggtcctgagtgtcagcagccgaagcttcttttcgttccttggcgaggcttttgatggggctcgggacatgtggagagcctactctgacatgagagaagccaattacatcggctcagacaaatacttccatgctcgggggaactatgatgctgccaaaaggggacctgggggtgcctgggccgcagaagtgatcagcaatgccagagagaatatccagagactcacaggccatggtgcggaggactcgctggccgatcaggctgccaataaatggggcaggagtggcagagaccccaatcacttccgacctgctggcctgcctgagaaatactgagcttcctcttcactctgctctcaggagacctggctatgaggccctcggggcagggatacaaagcggggagagggtacacaatgggtatctaataaatacttaagaggtcaaagagaagtaaaaaaaaaaaaaacaaaaaaaaaatttttggggggcttgggccttgaaaaagtttttaaaacactttgtttggggcgcgggggccccattggngtacgggaaccgtgggtcaaanggggttccagagaaaanccgggcgcgagacaagggcggnggattcccccgaagtaaaaagagcccggggcaaaccgggggttcggaaccaaccccaaggggatccggaggccacgaggagcctacacgggggtcccaagggagccgaataaaaca

SEQ ID NO: 51939 - DNA, 565 bp, Homo sapiens
acctctaagtatatagatacctatatataccatagctcagctacagcacagatcagcaccatgaagcttctcacgggcctggttttctgctccttggtcctgagtgtcagcagccgaagcttcttttcgttccttggcgaggcttttgatggggctcgggacatgtggagagcctactctgacatgagagaagccaattacatcggctcagacaaatacttccatgctcgggggaactatgatgctgccaaaaggggacctgggggtgcctgggccgcagaagtgatcagcaatgccagagagaatatccagagactcacaggccatggtgcggaggactcgctggccgatcaggctgccaataaatggggcaggagtggcagagaccccaatcacttccgacctgctggcctgcctgagaaatactgagcttcctcttcactctgctctcaggagacctggctatgaggccctcggggcagggatacaaagttagtgaggtctatgtccagagaagctgagatatggcatataataggcatctaataaatgcttaagaggtgga

SEQ ID NO: 51940 - DNA, 1029 bp, Homo sapiens
acctctaagtatatagatacctatatataccatagctcagctacagcacagatcagcaccatgaagcttctcacgggcctggttttctgctccttggtcctgagtgtcagcagccgaagcttcttttcgttccttggcgaggcttttgatggggctcgggacatgtggagagcctactctgacatgagagaagccaattacatcggctcagacaaatacttccatgctcgggggaactatgatgctgccaaaaggggacctgggggtgcctgggccgcagaagtgatcaggtaactggagctcctgggacgttagggctgggtgagcagagcttgcctgccttggacagtcaggagggagacgagctccttgtggagaagttagaggctgtggtccctcctcttcttgccctctctctgcctctgtgctcagtgtgagggtctgagtggatggtaggagtgagtgattcctccccctccccctctgggtgctgttcatccagcctaggggtgcccagcctgtctgaatggggcagtgcccaggcagggtcagtgtttcactcctccttccttggcctttctgggctcctctctgagccctcccttggaacagggagaatgggagggtgagctgttgctcactggcctgatgattaatctccttcttgcctgcctggactacagcaatgccagagagaatatccagagactcacaggccatggtgcggaggactcgctggccgatcaggctgccaataaatggggcaggagtggcagagaccccaatcacttccgacctgctggcctgcctgagaaatactgagcttcctcttcactctgctctcaggagacctggctatgaggccctcggggcagggatacaaagttagtgaggtctatgtccagagaagctgagatatggcatataataggcatctaataaatgcttaagaggtggaatagaataatgtcaaatacgctacttaaatatatagagaaccagatctctgtggggggggcgggacaacga

SEQ ID NO: 51941 - DNA, 640 bp, Homo sapiens
agttagctctgactaccttgcctatgaacttttctttgaaattatgcttttctatgagaatttgtatattttttgttgatgtttctagccttttagcctgatgataggacctttgagtgtctgtctaggatacattggtaggtaagggtagaccatgatcatttttggcagaaatgaagcctgtttccagaaggcacgttcctccatgattttcctgaacatttttggttgatgacttgggggtcagggaatccattcaggtgagaggttagttttttggtcttcaaattggaagagcaactttagcctttgatttgtattatcttctcacagcaactattatgttgactgcctgtacatgccttcaataccatgtaaacctagtttatcttttgtatatttgatttcttagatggttagagctgcctgtaatcccagcactttgggaggccgaggtgggcagacctcatgatctactaaataagagaaattttctcttattaataagaaaaacccatctctactaaaataagaaaaaatagctgggcatggtggtgcacgccagtagttccagctactcgggaggccaaggaaggggaatcgcttgaacccgagaggcggaggttgcagtgaactgaga

SEQ ID NO: 51942 - DNA, 429 bp, Homo sapiens
actctgggactaggcatacacacggacaatggacgagcttctgtgacaatagaactctcaccccagaccctctgcagcaaccactcccctggaagccaaaccacaatctcccccagtgatccattcagaatggtcaagacttactcagttactgccatcatcccaacattttgctccctcttccaacatgggaccaatcagagaaagccaaataggttccccaaagcaatcctgtaagacacctgcagtgagctgatcagcctccagcttcctcatgccaacaccctccaagcagagcattcctgaaccttgcccctttccccccactataaacctatctgcctctgagtctgctaaacacaagagatcgtggctgattcctttgtaccgcaagctctgaataaaaagtctgtttttctcatgtttggt

SEQ ID NO: 51943 - DNA, 323 bp, Homo sapiens
ataaccttcatacagaaaagtacaccaataattaccacaaaatacattcacttttgcactaccacccaaattaggaaatagaacattaccagtacccagaagcccccttccacaaacagtgtattttaagtatttactaagcagttatgagaaaagtgatatttttccatagttttttttaatcagctttattaagatatggttcatataccatacatttcacccatttgaagtacacaattcagtggttcttagtatatttgcagatatgtgcaaccatcaccacagtcaactttagagcattttcatcacctcaaaaaaga

SEQ ID NO: 51944 - DNA, 704 bp, Homo sapiens
ggttgtgatgcagggacagaaaattcagaatgccacatgcttgcctcatttctctgggtggcctacccaagagcttcaagaaaaacagtttaagaaaatgctaacttcagcaatattggcaagacaaagccccttacactccttagttctttattcagcattgttctgctctcatttattaaaaattccaagtaccattgtcagtattcttcagaaaatcttatagtgctgtctcatttctcttggcaaaagaaagcctgttgtgcaacccaatgaatttaattttttttttttaaagagatcgtgccactgaactccagcctgggcgacagaacgaggctccgtcccccaaaaaagaactgaagcatttagaatcatagtggcagtggtggtggtggtgatggtgatggtgatggtgataatgatggtgatgggatggtgacggtcatggtgattttggtagtgggagtattggtgtggcatttcagcaaatgttgttttcatttgttttaaccatcagccaaggaacaaagcaatctgtctcttcaatatagttacacaggtgactaagtgtcacccgcttccaccttctctaatcaaggaaatggtgacgatcaggttactatagattccttataaggtgccttcataatggataactgtagccattttatgtaagcattgtcctgtgattaaaaaaaaaa

SEQ ID NO: 51945 - DNA, 3432 bp, Homo sapiens
gaattccgacttgttttgtggtctaacatatggtctatgctgcagaatggtccatgtgctgatgagaagaatgtatattctgcagctgttggaagaaagggtctgtaaatgtctgttaggtccatttggtctataatgcagattaagtctgatgtttctttctagatgatctgcccaatactgaaagtgaggcattaaaatcccctgcctttttttgtattaggatctgcctctctctttagctctaatagtgtttgtttatacatgtgagtactttggtattgggtgcatatatatttaaaattgttacatccttttgctgaattgatccctttttcattatgtaatgatcttctttgtccctttttatgttttctgacttagtctattatgaataagtggcgcctgcagacggcccctggaagggctctggtggggctgagcgctctgccgcgggggcgcgggcacagcaggaagcaggtccgcgtgggcgctgggggcatcagctaccggggtggtccgggctgaagagccaggcagccaaggcagccaccccggggggtgggcgactttgggggagttggtgccccgccccccaggccttggcggggtcatggggcccccccattctgggccggggggcgtgcgagtcggggccctgctgctgctgggggttttggggctggtgtctgggctcagcctggagcctgtctactggaactcggcgaataagaggttccaggcagagggtggttatgtgctgtaccctcagatcggggaccggctagacctgctctgcccccgggcccggcctcctggccctcactcctctcctaattatgagttctacaagctgtacctggtagggggtgctcagggccggcgctgtgaggcaccccctgccccaaacctccttctcacttgtgatcgcccagacctggatctccgcttcaccatcaagttccaggagtatagccctaatctctggggccacgagttccgctcgcaccacgattactacatcattgccacatcggatgggacccgggagggcctggagagcctgcagggaggtgtgtgcctaaccagaggcatgaaggtgcttctccgagtgggacaaagtccccgaggaggggctgtcccccgaaaacctgtgtctgaaatgcccatggaaagagaccgaggggcagcccacagcctggagcctgggaaggagaacctgccaggtgaccccaccagcaatgcaacctcccggggtgctgaaggccccctgccccctcccagcatgcctgcagtggctggggcagcaggggggctggcgctgctcttgctgggcgtggcaggggctgggggtgccatgtgttggcggagacggcgggccaagccttcggagagtcgccaccctggtcctggctccttcgggaggggagggtctctgggcctggggggtggaggtgggatgggacctcgggaggctgagcctggggagctagggatagctctgcggggtggcggggctgcagatccccccttctgcccccactatgagaaggtgagtggtgactatgggcatcctgtgtatatcgtgcaggatgggcccccccagagccctccaaacatctactacaaggtatgagggctcctctcacgtggctatcctgaatccagcccttcttggggtgctcctccagtttaattcctggtttgagggacacctctaacatctcggccccctgtgcccccccagccccttcactcctcccggctgctgtcctcgtctccacttttaggattccttaggattcccactgccccacttcctgccctcccgtttggccatgggtgcccccctctgtctcagtgtccctggatcctttttccttggggaggggcacaggctcagcctcctctctgaccatgacccaggcatccttgtccccctcacccacccagagctaggggcgggaacagcccaccttttggttggcaccgccttctttctgcctctcactggttttctcttctctatctcttattctttccctctcttccgtctctaggtctgttcttcttccctagcatcctcctccccacatctcctttcaccctcttggcttcttatcctgtgcctctcccatctcctgggtgggggcatcaaagcatttctccccttagctttcagccccccttctgacctctcataccaaccactcccctcagtctgccaaaaatgggggccttatggggaaggctctgacactccaccccagctcaggccatgggcagcagggctccattctctggcctggcccaggcctctacatacttactccagccatttggggtggttgggtcatgacagctaccatgagaagaagtgtcccgttttgtccagtggccaatagcaagatatgaaccggtcgggacatgtatggacttggtctgatgccgaatgggccacttgggaccggaagtgacttgctccagacaagaggtgaccaggcccggacagaaatggcctgggaagtagcagaagcagtgcagcaggaactggaagtgccttcatccaggacaggaagtagcacttctgaaacaggaagtggtctggctggaactccaagtggcttagtctgggggatcaggaggtgggaggtggatggttcttattctgtggagaagaagggcgggaagaacttcctttcaggaggaagctggaacttactgactgtaagaggttagaggtggaccgagaaggacttttcccagtcttcagtggcacttcccaagatctcccttcccttgtgctctgtgctgattttaggacagctaagatgactgccatgtgctgtggcaggcctaatttgtcttgttctttcctttccatatcccagtataatctctgttaatcaacaggactaccccaagaacccatgtgctctcccgagtaacccagatggctgtcttgttcattccatcctacatttctgactcctttcagactcaacacagttcccttcttagtgaccaaaatggtggcctactggctggtctagctgacagtggtacttagcaaaggccactgtttccatagtgaccagctgatacctcttcctgccctctagtgtgcaattgggtgttgcctcagtttcctcccagctcagttttattagatcaaagctgttgttgggcaccaggttggccacctcaatcaccagccaagatggttgctttgtccaccagaggtcaagttcacctctctggtgctgtagttcccagctccttcctgatttttctaatcgctccttctggggaacaggaagttgatattgccatggtggcgggatatgccgtcacctcagtagttttactgtaaaagggaaatttgaacaacaaaaaccaaaaaaaataaaaataaaaaacttcaaaagttga

SEQ ID NO: 51946 - DNA, 3346 bp, Homo sapiens
aggtgtggggggcgtgggccgcgggatgctgccgcccgctccgcctcgagctccagctccggtttttccctccaccatcctctgcccctccccgcctctcctttaactcccccctcctgggctcgggactggtttcctcccttagcccgctgccctcaatcccagcgaggctggggctccggctcggcgcccccttcctcgctccctggtccggcgccccatgccgcccccgcccggtccccggctcccccagtcccccacttaggcgggctcacagatcccggggtgctggcgcgtgggccgggggcgcgtagggcgcctgcagacggcccctggaagggctctggtggggctgagcgctctgccgcgggggcgcgggcacagcaggaagcaggtccgcgtgggcgctgggggcatcagctaccggggtggtccgggctgaagagccaggcagccaaggcagccaccccggggggtgggcgactttgggggagttggtgccccgccccccaggccttggcggggtcatggggcccccccattctgggccggggggcgtgcgagtcggggccctgctgctgctgggggttttggggctggtgtctgggctcagcctggagcctgtctactggaactcggcgaataagaggttccaggcagagggtggttatgtgctgtaccctcagatcggggaccggctagacctgctctgcccccgggcccggcctcctggccctcactcctctcctaattatgagttctacaagctgtacctggtagggggtgctcagggccggcgctgtgaggcaccccctgccccaaacctccttctcacttgtgatcgcccagacctggatctccgcttcaccatcaagttccaggagtatagccctaatctctggggccacgagttccgctcgcaccacgattactacatcattgccacatcggatgggacccgggagggcctggagagcctgcagggaggtgtgtgcctaaccagaggcatgaaggtgcttctccgagtgggacaaagtccccgaggaggggctgtcccccgaaaacctgtgtctgaaatgcccatggaaagagaccgaggggcagcccacagcctggagcctgggaaggagaacctgccaggtgaccccaccagcaatgcaacctcccggggtgctgaaggccccctgccccctcccagcatgcctgcagtggctggggcagcaggggggctggcgctgctcttgctgggcgtggcaggggctgggggtgccatgtgttggcggagacggcgggccaagccttcggagagtcgccaccctggtcctggctccttcgggaggggagggtctctgggcctggggggtggaggtgggatgggacctcgggaggctgagcctggggagctagggatagctctgcggggtggcggggctgcagatccccccttctgcccccactatgagaaggtgagtggtgactatgggcatcctgtgtatatcgtgcaggatgggcccccccagagccctccaaacatctactacaaggtatgagggctcctctcacgtggctatcctgaatccagcccttcttggggtgctcctccagtttaattcctggtttgagggacacctctaacatctcggccccctgtgcccccccagccccttcactcctcccggctgctgtcctcgtctccacttttaggattccttaggattcccactgccccacttcctgccctcccgtttggccatgggtgcccccctctgtctcagtgtccctggatcctttttccttggggaggggcacaggctcagcctcctctctgaccatgacccaggcatccttgtccccctcacccacccagagctaggggcgggaacagcccaccttttggttggcaccgccttctttctgcctctcactggttttctcttctctatctcttattctttccctctcttccgtctctaggtctgttcttcttccctagcatcctcctccccacatctcctttcaccctcttggcttcttatcctgtgcctctcccatctcctgggtgggggcatcaaagcatttctccccttagctttcagccccccttctgacctctcataccaaccactcccctcagtctgccaaaaatgggggccttatggggaaggctctgacactccaccccagctcaggccatgggcagcagggctccattctctggcctggcccaggcctctacatacttactccagccatttggggtggttgggtcatgacagctaccatgagaagaagtgtcccgttttgtccagtggccaatagcaagatatgaaccggtcgggacatgtatggacttggtctgatgccgaatgggccacttgggaccggaagtgacttgctccagacaagaggtgaccaggcccggacagaaatggcctgggaagtagcagaagcagtgcagcaggaactggaagtgccttcatccaggacaggaagtagcacttctgaaacaggaagtggtctggctggaactccaagtggcttagtctgggggatcaggaggtgggaggtggatggttcttattctgtggagaagaagggcgggaagaacttcctttcaggaggaagctggaacttactgactgtaagaggttagaggtggaccgagaaggacttttcccagtcttcagtggcacttcccaagatctcccttcccttgtgctctgtgctgattttaggacagctaagatgactgccatgtgctgtggcaggcctaatttgtcttgttctttcctttccatatcccagtataatctctgttaatcaacaggactaccccaagaacccatgtgctctcccgagtaacccagatggctgtcttgttcattccatcctacatttctgactcctttcagactcaacacagttcccttcttagtgaccaaaatggtggcctactggctggtctagctgacagtggtacttagcaaaggccactgtttccatagtgaccagctgatacctcttcctgccctctagtgtgcaattgggtgttgcctcagtttcctcccagctcagttttattagatcaaagctgttgttgggcaccaggttggccacctcaatcaccagccaagatggttgctttgtccaccagaggtcaagttcacctctctggtgctgtagttcccagctccttcctgatttttctaatcgctccttctggggaacaggaagttgatattgccatggtggcgggatatgccgtcacctcagtagttttactgtaaaagggaaatttgaacaacaaaaaccaaaaaaaataaaaataaaaaacttcaaaagttga

SEQ ID NO: 51947 - DNA, 2960 bp, Homo sapiens
aggtgtggggggcgtgggccgcgggatgctgccgcccgctccgcctcgagctccagctccggtttttccctccaccatcctctgcccctccccgcctctcctttaactcccccctcctgggctcgggactggtttcctcccttagcccgctgccctcaatcccagcgaggctggggctccggctcggcgcccccttcctcgctccctggtccggcgccccatgccgcccccgcccggtccccggctcccccagtcccccacttaggcgggctcacagatcccggggtgctggcgcgtgggccgggggcgcgtagggcgcctgcagacggcccctggaagggctctggtggggctgagcgctctgccgcgggggcgcgggcacagcaggaagcaggtccgcgtgggcgctgggggcatcagctaccggggtggtccgggctgaagagccaggcagccaaggcagccaccccggggggtgggcgactttgggggagttggtgccccgccccccaggccttggcggggtcatggggcccccccattctgggccggggggcgtgcgagtcggggccctgctgctgctgggggttttggggctggtgtctgggctcagcctggagcctgtctactggaactcggcgaataagaggttccaggcagagggtggttatgtgctgtaccctcagatcggggaccggctagacctgctctgcccccgggcccggcctcctggccctcactcctctcctaattatgagttctacaagctgtacctggtagggggtgctcagggccggcgctgtgaggcaccccctgccccaaacctccttctcacttgtgatcgcccagacctggatctccgcttcaccatcaagttccaggagtatagccctaatctctggggccacgagttccgctcgcaccacgattactacatcattgccacatcggatgggacccgggagggcctggagagcctgcagggaggtgtgtgcctaaccagaggcatgaaggtgcttctccgagtgggacaaagtccccgaggaggggctgtcccccgaaaacctgtgtctgaaatgcccatggaaagagaccgaggggcagcccacagcctggagcctgggaaggagaacctgccaggtgaccccaccagcaatgcaacctcccggggtgctgaaggccccctgccccctcccagcatgcctgcagtggctggggcagcaggggggctggcgctgctcttgctgggcgtggcaggggctgggggtgccatgtgttggcggagacggcgggccaagccttcggagagtcgccaccctggtcctggctccttcgggaggggagggtctctgggcctggggggtggaggtgggatgggacctcgggaggctgagcctggggagctagggatagctctgcggggtggcggggctgcagatccccccttctgcccccactatgagaaggtgagtggtgactatgggcatcctgtgtatatcgtgcaggatgggcccccccagagccctccaaacatctactacaaggtatgagggctcctctcacgtggctatcctgaatccagcccttcttggggtgctcctccagtttaattcctggtttgagggacacctctaacatctcggccccctgtgcccccccagccccttcactcctcccggctgctgtcctcgtctccacttttaggattccttaggattcccactgccccacttcctgccctcccgtttggccatgggtgcccccctctgtctcagtgtccctggatcctttttccttggggaggggcacaggctcagcctcctctctgaccatgacccaggcatccttgtccccctcacccacccagagctaggggcgggaacagcccaccttttggttggcaccgccttctttctgcctctcactggttttctcttctctatctcttattctttccctctcttccgtctctaggtctgttcttcttccctagcatcctcctccccacatctcctttcaccctcttggcttcttatcctgtgcctctcccatctcctgggtgggggcatcaaagcatttctccccttagctttcagccccccttctgacctctcataccaaccactcccctcagtctgccaaaaatgggggccttatggggaaggctctgacactccaccccagctcaggccatgggcagcagggctccattctctggcctggcccaggcctctacatacttactccagccatttggggtggttgggtcatgacagctaccatgagaagaagtgtcccgttttgtccagtggccaatagcaagatatgaaccggtcgggacatgtatggacttggtctgatgccgaatgggccacttgggaccggaagtgacttgctccagacaagaggtgaccaggcccggacagaaatggcctgggaagtagcagaagcagtgcagcaggaactggaagtgccttcatccaggacaggaagtagcacttctgaaacaggaagtggtctggctggaactccaagtggcttagtctgggggatcaggaggtgggaggtggatggttcttattctgtggagaagaagggcgggaagaacttcctttcaggaggaagctggaacttactgactgccctctagtgtgcaattgggtgttgcctcagtttcctcccagctcagttttattagatcaaagctgttgttgggcaccaggttggccacctcaatcaccagccaagatggttgctttgtccaccagaggtcaagttcacctctctggtgctgtagttcccagctccttcctgatttttctaatcgctccttctggggaacaggaagttgatattgccatggtggcgggatatgccgtcacctcagtagttttactgtaaaagggaaatttgaacaacaaaaaccaaaaaaaataaaaataaaaaacttcaaaagttga

SEQ ID NO: 51948 - DNA, 2429 bp, Homo sapiens
atgctgcctctgccatctggcgtctccagtctgcctgtatgttggttctgtattgctctcatctcacagtctcttattcccacgctctggccagtccaaagcatacatggcccagttagtccccgaggaggggctgtcccccgaaaacctgtgtctgaaatgcccatggaaagagaccgaggggcagcccacagcctggagcctgggaaggagaacctgccaggtgaccccaccagcaatgcaacctcccggggtgctgaaggccccctgccccctcccagcatgcctgcagtggctggggcagcaggggggctggcgctgctcttgctgggcgtggcaggggctgggggtgccatgtgttggcggagacggcgggccaagccttcggagagtcgccaccctggtcctggctccttcgggaggggagggtctctgggcctggggggtggaggtgggatgggacctcgggaggctgagcctggggagctagggatagctctgcggggtggcggggctgcagatccccccttctgcccccactatgagaaggtgagtggtgactatgggcatcctgtgtatatcgtgcaggatgggcccccccagagccctccaaacatctactacaaggtatgagggctcctctcacgtggctatcctgaatccagcccttcttggggtgctcctccagtttaattcctggtttgagggacacctctaacatctcggccccctgtgcccccccagccccttcactcctcccggctgctgtcctcgtctccacttttaggattccttaggattcccactgccccacttcctgccctcccgtttggccatgggtgcccccctctgtctcagtgtccctggatcctttttccttggggaggggcacaggctcagcctcctctctgaccatgacccaggcatccttgtccccctcacccacccagagctaggggcgggaacagcccaccttttggttggcaccgccttctttctgcctctcactggttttctcttctctatctcttattctttccctctcttccgtctctaggtctgttcttcttccctagcatcctcctccccacatctcctttcaccctcttggcttcttatcctgtgcctctcccatctcctgggtgggggcatcaaagcatttctccccttagctttcagccccccttctgacctctcataccaaccactcccctcagtctgccaaaaatgggggccttatggggaaggctctgacactccaccccagctcaggccatgggcagcagggctccattctctggcctggcccaggcctctacatacttactccagccatttggggtggttgggtcatgacagctaccatgagaagaagtgtcccgttttgtccagtggccaatagcaagatatgaaccggtcgggacatgtatggacttggtctgatgccgaatgggccacttgggaccggaagtgacttgctccagacaagaggtgaccaggcccggacagaaatggcctgggaagtagcagaagcagtgcagcaggaactggaagtgccttcatccaggacaggaagtagcacttctgaaacaggaagtggtctggctggaactccaagtggcttagtctgggggatcaggaggtgggaggtggatggttcttattctgtggagaagaagggcgggaagaacttcctttcaggaggaagctggaacttactgactgtaagaggttagaggtggaccgagaaggacttttcccagtcttcagtggcacttcccaagatctcccttcccttgtgctctgtgctgattttaggacagctaagatgactgccatgtgctgtggcaggcctaatttgtcttgttctttcctttccatatcccagtataatctctgttaatcaacaggactaccccaagaacccatgtgctctcccgagtaacccagatggctgtcttgttcattccatcctacatttctgactcctttcagactcaacacagttcccttcttagtgaccaaaatggtggcctactggctggtctagctgacagtggtacttagcaaaggccactgtttccatagtgaccagctgatacctcttcctgccctctagtgtgcaattgggtgttgcctcagtttcctcccagctcagttttattagatcaaagctgttgttgggcaccaggttggccacctcaatcaccagccaagatggttgctttgtccaccagaggtcaagttcacctctctggtgctgtagttcccagctccttcctgatttttctaatcgctccttctggggaacaggaagttgatattgccatggtggcgggatatgccgtcacctcagtagttttactgtaaaagggaaatttgaacaacaaaaaccaaaaaaaataaaaataaaaaacttcaaaagttga

SEQ ID NO: 51949 - DNA, 1909 bp, Homo sapiens
aaaaaaaaaaaaaaaaaaaaaaaaaaaaaaaaaaaaaaaaaaaaaaaaaaaaaaaaaatatcgtgcaggatgggcccccccagagccctccaaacatctactacaaggtatgagggctcctctcacgtggctatcctgaatccagcccttcttggggtgctcctccagtttaattcctggtttgagggacacctctaacatctcggccccctgtgcccccccagccccttcactcctcccggctgctgtcctcgtctccacttttaggattccttaggattcccactgccccacttcctgccctcccgtttggccatgggtgcccccctctgtctcagtgtccctggatcctttttccttggggaggggcacaggctcagcctcctctctgaccatgacccaggcatccttgtccccctcacccacccagagctaggggcgggaacagcccaccttttggttggcaccgccttctttctgcctctcactggttttctcttctctatctcttattctttccctctcttccgtctctaggtctgttcttcttccctagcatcctcctccccacatctcctttcaccctcttggcttcttatcctgtgcctctcccatctcctgggtgggggcatcaaagcatttctccccttagctttcagccccccttctgacctctcataccaaccactcccctcagtctgccaaaaatgggggccttatggggaaggctctgacactccaccccagctcaggccatgggcagcagggctccattctctggcctggcccaggcctctacatacttactccagccatttggggtggttgggtcatgacagctaccatgagaagaagtgtcccgttttgtccagtggccaatagcaagatatgaaccggtcgggacatgtatggacttggtctgatgccgaatgggccacttgggaccggaagtgacttgctccagacaagaggtgaccaggcccggacagaaatggcctgggaagtagcagaagcagtgcagcaggaactggaagtgccttcatccaggacaggaagtagcacttctgaaacaggaagtggtctggctggaactccaagtggcttagtctgggggatcaggaggtgggaggtggatggttcttattctgtggagaagaagggcgggaagaacttcctttcaggaggaagctggaacttactgactgtaagaggttagaggtggaccgagaaggacttttcccagtcttcagtggcacttcccaagatctcccttcccttgtgctctgtgctgattttaggacagctaagatgactgccatgtgctgtggcaggcctaatttgtcttgttctttcctttccatatcccagtataatctctgttaatcaacaggactaccccaagaacccatgtgctctcccgagtaacccagatggctgtcttgttcattccatcctacatttctgactcctttcagactcaacacagttcccttcttagtgaccaaaatggtggcctactggctggtctagctgacagtggtacttagcaaaggccactgtttccatagtgaccagctgatacctcttcctgccctctagtgtgcaattgggtgttgcctcagtttcctcccagctcagttttattagatcaaagctgttgttgggcaccaggttggccacctcaatcaccagccaagatggttgctttgtccaccagaggtcaagttcacctctctggtgctgtagttcccagctccttcctgatttttctaatcgctccttctggggaacaggaagttgatattgccatggtggcgggatatgccgtcacctcagtagttttactgtaaaagggaaatttgaacaacaaaaaccaaaaaaaataaaaataaaaaacttcaaaagttga

SEQ ID NO: 51950 - DNA, 946 bp, Homo sapiens
gttttgttgttcaaatttcccttttacagtaaaactactgaggtgacggcataccccgccaccatggcaatatcaacttcctgtccccagaagtagcacttctgaaacaggaagtggtctggctggaactccaagtggcttagtctgggggatcaggaggtgggaggtggatggttcttattctgtggagaagaagggcgggaagaacttcctttcaggaggaagctggaacttactgactgtaagaggttagaggtggaccgagaaggacttttcccagtcttcagtggcacttcccaagatctcccttcccttgtgctctgtgctgattttaggacagctaagatgactgccatgtgctgtggcaggcctaatttgtcttgttctttcctttccatatcccagtataatctctgttaatcaacaggactaccccaagaacccatgtgctctcccgagtaacccagatggctgtcttgttcattccatcctacatttctgactcctttcagactcaacacagttcccttcttagtgaccaaaatggtggcctactggctggtctagctgacagtggtacttagcaaaggccactgtttccatagtgaccagctgatacctcttcctgccctctagtgtgcaattgggtgttgcctcagtttcctcccagctcagttttattagatcaaagctgttgttgggcaccaggttggccacctcaatcaccagccaagatggttgctttgtccaccagaggtcaagttcacctctctggtgctgtagttcccagctccttcctgatttttctaatcgctccttctggggaacaggaagttgatattgccatggtggcgggatatgccgtcacctcagtagttttactgtaaaagggaaatttgaacaacaaaaaccaaaaaaaataaaaataaaaaacttcaaaagttga

SEQ ID NO: 51951 - DNA, 3230 bp, Homo sapiens
aggtgtggggggcgtgggccgcgggatgctgccgcccgctccgcctcgagctccagctccggtttttccctccaccatcctctgcccctccccgcctctcctttaactcccccctcctgggctcgggactggtttcctcccttagcccgctgccctcaatcccagcgaggctggggctccggctcggcgcccccttcctcgctccctggtccggcgccccatgccgcccccgcccggtccccggctcccccagtcccccacttaggcgggctcacagatcccggggtgctggcgcgtgggccgggggcgcgtagggcgcctgcagacggcccctggaagggctctggtggggctgagcgctctgccgcgggggcgcgggcacagcaggaagcaggtccgcgtgggcgctgggggcatcagctaccggggtggtccgggctgaagagccaggcagccaaggcagccaccccggggggtgggcgactttgggggagttggtgccccgccccccaggccttggcggggtcatggggcccccccattctgggccggggggcgtgcgagtcggggccctgctgctgctgggggttttggggctggtgtctgggctcagcctggagcctgtctactggaactcggcgaataagaggttccaggcagagggtggttatgtgctgtaccctcagatcggggaccggctagacctgctctgcccccgggcccggcctcctggccctcactcctctcctaattatgagttctacaagctgtacctggtagggggtgctcagggccggcgctgtgaggcaccccctgccccaaacctccttctcacttgtgatcgcccagacctggatctccgcttcaccatcaagttccaggagtatagccctaatctctggggccacgagttccgctcgcaccacgattactacatcattgccacatcggatgggacccgggagggcctggagagcctgcagggaggtgtgtgcctaaccagaggcatgaaggtgcttctccgagtgggacaaagtccccgaggaggggctgtcccccgaaaacctgtgtctgaaatgcccatggaaagagaccgaggggcagcccacagcctggagcctgggaaggagaacctgccaggtgaccccaccagcaatgcaacctcccggggtgctgaaggccccctgccccctcccagcatgcctgcagtggctggggcagcaggggggctggcgctgctcttgctgggcgtggcaggggctgggggtgccatgtgttggcggagacggcgggccaagccttcggagagtcgccaccctggtcctggctccttcgggaggggagggtctctgggcctggggggtggaggtgggatgggacctcgggaggctgagcctggggagctagggatagctctgcggggtggcggggctgcagatccccccttctgcccccactatgagaaggtgagtggtgactatgggcatcctgtgtatatcgtgcaggatgggcccccccagagccctccaaacatctactacaaggtatgagggctcctctcacgtggctatcctgaatccagcccttcttggggtgctcctccagtttaattcctggtttgagggacacctctaacatctcggcccccctctgtctcagtgtccctggatcctttttccttggggaggggcacaggctcagcctcctctctgaccatgacccaggcatccttgtccccctcacccacccagagctaggggcgggaacagcccaccttttggttggcaccgccttctttctgcctctcactggttttctcttctctatctcttattctttccctctcttccgtctctaggtctgttcttcttccctagcatcctcctccccacatctcctttcaccctcttggcttcttatcctgtgcctctcccatctcctgggtgggggcatcaaagcatttctccccttagctttcagccccccttctgacctctcataccaaccactcccctcagtctgccaaaaatgggggccttatggggaaggctctgacactccaccccagctcaggccatgggcagcagggctccattctctggcctggcccaggcctctacatacttactccagccatttggggtggttgggtcatgacagctaccatgagaagaagtgtcccgttttgtccagtggccaatagcaagatatgaaccggtcgggacatgtatggacttggtctgatgccgaatgggccacttgggaccggaagtgacttgctccagacaagaggtgaccaggcccggacagaaatggcctgggaagtagcagaagcagtgcagcaggaactggaagtgccttcatccaggacaggaagtagcacttctgaaacaggaagtggtctggctggaactccaagtggcttagtctgggggatcaggaggtgggaggtggatggttcttattctgtggagaagaagggcgggaagaacttcctttcaggaggaagctggaacttactgactgtaagaggttagaggtggaccgagaaggacttttcccagtcttcagtggcacttcccaagatctcccttcccttgtgctctgtgctgattttaggacagctaagatgactgccatgtgctgtggcaggcctaatttgtcttgttctttcctttccatatcccagtataatctctgttaatcaacaggactaccccaagaacccatgtgctctcccgagtaacccagatggctgtcttgttcattccatcctacatttctgactcctttcagactcaacacagttcccttcttagtgaccaaaatggtggcctactggctggtctagctgacagtggtacttagcaaaggccactgtttccatagtgaccagctgatacctcttcctgccctctagtgtgcaattgggtgttgcctcagtttcctcccagctcagttttattagatcaaagctgttgttgggcaccaggttggccacctcaatcaccagccaagatggttgctttgtccaccagaggtcaagttcacctctctggtgctgtagttcccagctccttcctgatttttctaatcgctccttctggggaacaggaagttgatattgccatggtggcgggatatgccgtcacctcagtagttttactgtaaaagggaaatttgaacaacaaaaaccaaaaaaaataaaaataaaaaacttcaaaagttga

SEQ ID NO: 51952 - DNA, 2342 bp, Homo sapiens
aggtgtggggggcgtgggccgcgggatgctgccgcccgctccgcctcgagctccagctccggtttttccctccaccatcctctgcccctccccgcctctcctttaactcccccctcctgggctcgggactggtttcctcccttagcccgctgccctcaatcccagcgaggctggggctccggctcggcgcccccttcctcgctccctggtccggcgccccatgccgcccccgcccggtccccggctcccccagtcccccacttaggcgggctcacagatcccggggtgctggcgcgtgggccgggggcgcgtagggcgcctgcagacggcccctggaagggctctggtggggctgagcgctctgccgcgggggcgcgggcacagcaggaagcaggtccgcgtgggcgctgggggcatcagctaccggggtggtccgggctgaagagccaggcagccaaggcagccaccccggggggtgggcgactttgggggaggtctctgggcctggggggtggaggtgggatgggacctcgggaggctgagcctggggagctagggatagctctgcggggtggcggggctgcagatccccccttctgcccccactatgagaaggtgagtggtgactatgggcatcctgtgtatatcgtgcaggatgggcccccccagagccctccaaacatctactacaaggtatgagggctcctctcacgtggctatcctgaatccagcccttcttggggtgctcctccagtttaattcctggtttgagggacacctctaacatctcggccccctgtgcccccccagccccttcactcctcccggctgctgtcctcgtctccacttttaggattccttaggattcccactgccccacttcctgccctcccgtttggccatgggtgcccccctctgtctcagtgtccctggatcctttttccttggggaggggcacaggctcagcctcctctctgaccatgacccaggcatccttgtccccctcacccacccagagctaggggcgggaacagcccaccttttggttggcaccgccttctttctgcctctcactggttttctcttctctatctcttattctttccctctcttccgtctctaggtctgttcttcttccctagcatcctcctccccacatctcctttcaccctcttggcttcttatcctgtgcctctcccatctcctgggtgggggcatcaaagcatttctccccttagctttcagccccccttctgacctctcataccaaccactcccctcagtctgccaaaaatgggggccttatggggaaggctctgacactccaccccagctcaggccatgggcagcagggctccattctctggcctggcccaggcctctacatacttactccagccatttggggtggttgggtcatgacagctaccatgagaagaagtgtcccgttttgtccagtggccaatagcaagatatgaaccggtcgggacatgtatggacttggtctgatgccgaatgggccacttgggaccggaagtgacttgctccagacaagaggtgaccaggcccggacagaaatggcctgggaagtagcagaagcagtgcagcaggaactggaagtgccttcatccaggacaggaagtagcacttctgaaacaggaagtggtctggctggaactccaagtggcttagtctgggggatcaggaggtgggaggtggatggttcttattctgtggagaagaagggcgggaagaacttcctttcaggaggaagctggaacttactgactgtaagaggttagaggtggaccgagaaggacttttcccagtcttcagtggcacttcccaagatctcccttcccttgtgctctgtgctgattttaggacagctaagatgactgccatgtgctgtggcaggcctaatttgtcttgttctttcctttccatatcccagtataatctctgttaatcaacaggactaccccaagaacccatgtgctctcccgagtaacccagatggctgtcttgttcattccatcctacatttctgactcctttcagactcaacacattttattagatcaaagctgttgttgggcaccaggttggccacctcaatcaccagccaagatggttgctttgtccaccagaggtcaagttcacctctctggtgctgtagttcccagctccttcctgatttttctaatcgctccttctggggaacaggaagttgatattgccatggtggcgggatatgccgtcacctcagtagttttactgtaaaagggaaatttgaacaacaaaaaccaaaaaaaataaaaataaaaaacttcaaaagttga

SEQ ID NO: 51953 - DNA, 1744 bp, Homo sapiens
aggtgtggggggcgtgggccgcgggatgctgccgcccgctccgcctcgagctccagctccggtttttccctccaccatcctctgcccctccccgcctctcctttaactcccccctcctgggctcgggactggtttccctcccgtttggccatgggtgcccccctctgtctcagtgtccctggatcctttttccttggggaggggcacaggctcagcctcctctctgaccatgacccaggcatccttgtccccctcacccacccagagctaggggcgggaacagcccaccttttggttggcaccgccttctttctgcctctcactggttttctcttctctatctcttattctttccctctcttccgtctctaggtctgttcttcttccctagcatcctcctccccacatctcctttcaccctcttggcttcttatcctgtgcctctcccatctcctgggtgggggcatcaaagcatttctccccttagctttcagccccccttctgacctctcataccaaccactcccctcagtctgccaaaaatgggggccttatggggaaggctctgacactccaccccagctcaggccatgggcagcagggctccattctctggcctggcccaggcctctacatacttactccagccatttggggtggttgggtcatgacagctaccatgagaagaagtgtcccgttttgtccagtggccaatagcaagatatgaaccggtcgggacatgtatggacttggtctgatgccgaatgggccacttgggaccggaagtgacttgctccagacaagaggtgaccaggcccggacagaaatggcctgggaagtagcagaagcagtgcagcaggaactggaagtgccttcatccaggacaggaagtagcacttctgaaacaggaagtggtctggctggaactccaagtggcttagtctgggggatcaggaggtgggaggtggatggttcttattctgtggagaagaagggcgggaagaacttcctttcaggaggaagctggaacttactgactgtaagaggttagaggtggaccgagaaggacttttcccagtcttcagtggcacttcccaagatctcccttcccttgtgctctgtgctgattttaggacagctaagatgactgccatgtgctgtggcaggcctaatttgtcttgttctttcctttccatatcccagtataatctctgttaatcaacaggactaccccaagaacccatgtgctctcccgagtaacccagatggctgtcttgttcattccatcctacatttctgactcctttcagactcaacacagttcccttcttagtgaccaaaatggtggcctactggctggtctagctgacagtggtacttagcaaaggccactgtttccatagtgaccagctgatacctcttcctgccctctagtgtgcaattgggtgttgcctcagtttcctcccagctcagttttattagatcaaagctgttgttgggcaccaggttggccacctcaatcaccagccaagatggttgctttgtccaccagaggtcaagttcacctctctggtgctgtagttcccagctccttcctgatttttctaatcgctccttctggggaacaggaagttgatattgccatggtggcgggatatgccgtcacctcagtagttttactgtaaaagggaaatttgaacaacaaaaaccaaaaaaaataaaaataaaaaacttcaaaagttga

SEQ ID NO: 51954 - DNA, 4325 bp, Homo sapiens
tgccaacccgcgagcccgcatcatggatgtcgagctcccctatttcgcattgctagccctggaattcgagaccccagacgaggaccaggattcatgaaatcagtcgcaggggccggggcaggggcctctggctcccgacactggccgagaggtgatgagtgaggttcgaagaacggaagatttaaaaagcagccggggcctccgtattgaatgaaagacccagtgcaaagacatcaccatgaacactagcattccttatcagcagaatccttacaatccacggggcagctccaatgtcatccagtgctaccgctgtggagacacctgcaaaggggaagtggtccgcgtgcacaacaaccacttccacatcagatgcttcacctgtcaagtatgtggctgtggcctggcccagtcaggcttcttcttcaagaaccaggagtacatctgcacccaggactaccagcaactctatggcacccgctgtgacagctgccgggacttcatcacaggcgaagtcatctcggccctgggccgcacttaccaccccaagtgcttcgtgtgcagcttgtgcaggaagcctttccccattggagacaaggtgaccttcagcggtaaagaatgtgtgtgccaaacgtgctcccagtccatggccagcagtaagcccatcaagattcgtggaccaagccactgtgccgggtgcaaggaggagatcaagcacggccagtcactcctggctctggacaagcagtggcacgtcagctgcttcaagtgccagacctgcagcgtcatcctcaccggggagtatatcagcaaggatggtgttccatactgtgagtccgactaccatgcccagtttggcattaaatgtgagacttgtgaccgatacatcagtggcagagtcttggaggcaggagggaagcactaccacccaacctgtgccaggtgtgtacgctgccaccagatgttcaccgaaggagaggaaatgtacctcacaggttccgaggtttggcaccccatctgcaaacaggcagcccgggcagagaagaagttaaagcatagacggacatctgaaacctccatctcaccccctggatccagcattgggtcacccaaccgagtcatctgcgctaaagtggataatgagatccttaattacaaagacctggcggctctccccaaggttaagtctatctacgaggtacaacgccccgacctcatttcctatgagcctcattccagatacatgtccgacgagatgctggagagatgtggctatggagagtcgctgggaacattatctccctactcccaggacatctacgagaacctggacctccggcagagacgggcctccagcccggggtacatagactcccccacctacagccggcagggcatgtcccccaccttctcccgctcacctcaccactactaccgctctgggcccgagagtggccggagctctccataccatagccagttagatgtgaggtcctccactccaacctcttaccaggctcccaagcactttcacatcccagctggagacagtaacatctaccggaaacccccgatctacaaacggcatggtgatttgtctacagcaaccaagagcaaaacaagtgaagacatcagccagacctccaagtacagtcccatctactcgccagacccctactatgcttcggagtctgagtactggacctaccatgggtcccccaaagtgccccgagccagaaggttctcgtctggaggagaggaggatgattttgaccgcagcatgcacaagctccaaagtggaattggccggctgattctgaaggaagaaatgaaggcccggtcgagctcctatgcagatccctggacccctccccggagctccaccagcagccgggaagccctgcacacagctggctatgagatgtccctcaatggctcccctcggtcgcactacctggctgacagtgatcctctcatctccaaatctgcctccctgcctgcctaccgaagaaatgggctgcacaggacacccagcgcagacctcttccactacgacagcatgaacgcagtcaactggggcatgcgagagtacaagatctacccttatgaactgctgctggtgactacaagaggaagaaaccgactgcccaaggatgtagacaggacccgtttagagcgccacctgtcccaggaagagttctaccaagtctttggcatgaccatctctgagtttgaccggctggccctctggaagaggaatgaactgaagaagcaagcccggctgttctaggcagaggctctataaatatatatgcatttatataaagatatatgtaaaatctctctactgaagctcggtataatcctctcttgtgtaatgggacacactgcctgccatgagacttgcttttctgtactgtcaggcaagcccacgtcatcgagatatttttatgctccttactttctcttttctaagtgctgtgggatctgggaagggatttgaggggactctgtccttttattggggatcctttttatactgaaacatctgtcctaacttgagtgccccaaggtccaactctctttcctaaagaaggtgcctgaagaagtctctcttctctctgcttcgtggcccctttcttaaatttctagggctgatgctgaccatgtggtttccacaccttattggccccagaggggccctcccatgggaagatctgcagcagtctccccaaatcagtgagcacctttgagcgcccacgaagaactttctcaacacccccaattaggagctcagtgctctcttggggcaatgcagttaaaagggtgagcctcaaatctagtcattacaccagtcaacagaagtggacagggcctaggcctctcctcagctccttaaccctcctccttctgccctggattgtaacctctcccttgtccaaatctaggattcctggtaggaaaaggaaaaggcccttcccttccctccaccacttccaactggcccctttgcctgacctggacttggagaaccagaggaaaagagagggagcggaagtgggagatggagcagggcacctgttagaatcagagctgcaggatttcttgggaccctcctctctccctcactgctcccagcacctcctgacccttccctctttcaaggagaagcccatgattgcagcttgtattctttagccttattacaatctatgtgcctgacaactcaacacaccgcagggctaatgttcccaccagagctccaactgaacaaccagacagacaactctcatcatcctccagagagaaaataggccgtgtctcaaagaaaggttcttggtctatgcctctggtctgtgggctggcagggcaaccataccatactcccgccagtcctcggctcctgctgcaaagttggccatgtttcacagggaaacttttggaagagtggctgcttatgagattccaaaatgaagtgttggccaacaccgctcatggccatcctggattttcccagtggcttcccttcctgctcgcctccctgaacaggggagaaagcttaacctctcttctcctctccaaacctttcaccttgaatgggtaatgtttggtgggggctgttccttcttggagaagccttgagtcggaccattttgagatcatggaggaaggatgaagaagtgaaaatgacaataatgactctcaagaggctggcgatgtgacatggcaaatgtagaactgacttaaattgaacaaaccctcactgagcacctctgatgttgagcacctgctgaatactgagcactgaatgggggagggggaggggagcacggggtgagtcaacctgggactcggtctcagggatatgcctaccaatagcgggtatcgtaaggcatgtacccaaacataacggatgtaaggcagaaagtgatcggagaaggaatgagaaagtgtgcgtgatgttaatgaaaagtcatatgcagctagagcagacccaggaaagctttctggaagagattgcatctgaggaaattcaggaaggatctttgtagattggggggagattctaaattgaaggggtgatagggtgaggggccagagggaagtctgctgtgttctcatgtaggatgtcagccctccctgcaacttctctttttggccaatgtcttttcactttcctgaccctttagaatcatccccagccagacgcaatcatggaagttgccttattgtcactggttaagaacttggcgagattgaagggcttttgttattgttgttggatatttttgtttcccataaaagcacatcatttcaaccctaaa

SEQ ID NO: 51955 - DNA, 836 bp, Homo sapiens
ggccgcgtggttaatcggccgaggcctgcatcgggtcacccaaccgagtcatctgcgacatctacgagaacctggacctccggcagagacgggcctccagcccggggtacatagactcccccacctacagccggcagggcatgtcccccaccttctcccgctcacctcaccactactaccgctctggtgatttgtctacagcaaccaagagcaaaacaagtgaagacatcagccagacctccaagtacagtcccatctactcgccagacccctactatgcttcggagtctgagtactggacctaccatgggtcccccaaagtgccccgagccagaaggttctcgtctggaggagaggaggatgattttgaccgcagcatgcacaagctccaaagtggaattggccggctgattctgaaggaagaaatgaaggcccggtcgagctcctatgcagatccctggacccctccccggagctccaccagcagccgggaagccctgcacacagctggctatgagatgtccctcaatggctcccctcggtcgcactacctggctgacagtgatcctctcatctccaaatctgcctccctgcctgcctaccgaagaaatgggctgcacaggacacccagcgcagacctcttccactacgacagcatgaacgcagtcaactggggcatgcgagagtacaagtacaaggtaaaggatgtgcatagaccctgggggtctccaggattcttggagccgctacactggggatcaccaggaggatgacagcactgtctatgtagggaagggaacatagataaataaccccaggggtcctttcaagaccaa

SEQ ID NO: 51956 - DNA, 2844 bp, Homo sapiens
agccgctgggcaggaatagtccggggtgcgcgcgagcaggcgctgccaaccccacttctgcccgggattccaatctgaggagcaggaggaccggggcgccggtgtcctgccgcctccttctccttgctctcacctgcgcctattagtccacgcgccttcaaggccaggggctacagcccagacagagaggggacagcagagggagagagagcacctgaggatacagagctggcactggactgccttttcaccccccaggtgatgagtgaggttcgaagaacggaagatttaaaaagcagccggggcctccgtattgaatgaaagacccagtgcaaagacatcaccatgaacactagcattccttatcagcagaatccttacaatccacggggcagctccaatgtcatccagtgctaccgctgtggagacacctgcaaaggggaagtggtccgcgtgcacaacaaccacttccacatcagatgcttcacctgtcaagtatgtggctgtggcctggcccagtcaggcttcttcttcaagaaccaggagtacatctgcacccaggactaccagcaactctatggcacccgctgtgacagctgccgggacttcatcacaggcgaagtcatctcggccctgggccgcacttaccaccccaagtgcttcgtgtgcagcttgtgcaggaagcctttccccattggagacaaggtgaccttcagcggtaaagaatgtgtgtgccaaacgtgctcccagtccatggccagcagtaagcccatcaagattcgtggaccaagccactgtgccgggtgcaaggaggagatcaagcacggccagtcactcctggctctggacaagcagtggcacgtcagctgcttcaagtgccagacctgcagcgtcatcctcaccggggagtatatcagcaaggatggtgttccatactgtgagtccgactaccatgcccagtttggcattaaatgtgagacttgtgaccgatacatcagtggcagagtcttggaggcaggagggaagcactaccacccaacctgtgccaggtgtgtacgctgccaccagatgttcaccgaaggagaggaaatgtacctcacaggttccgaggtttggcaccccatctgcaaacaggcagcccgggcagagaagaagttaaagcatagacggacatctgaaacctccatctcaccccctggatccagcattgggtcacccaaccgagtcatctgcgacatctacgagaacctggacctccggcagagacgggcctccagcccggggtacatagactcccccacctacagccggcagggcatgtcccccaccttctcccgctcacctcaccactactaccgctctggtgatttgtctacagcaaccaagagcaaaacaagtgaagacatcagccagacctccaagtacagtcccatctactcgccagacccctactatgcttcggagtctgagtactggacctaccatgggtcccccaaagtgccccgagccagaaggttctcgtctggaggagaggaggatgattttgaccgcagcatgcacaagctccaaagtggaattggccggctgattctgaaggaagaaatgaaggcccggtcgagctcctatgcagatccctggacccctccccggagctccaccagcagccgggaagccctgcacacagctggctatgagatgtccctcaatggctcccctcggtcgcactacctggctgacagtgatcctctcatctccaaatctgcctccctgcctgcctaccgaagaaatgggctgcacaggacacccagcgcagacctcttccactacgacagcatgaacgcagtcaactggggcatgcgagagtacaagatctacccttatgaactgctgctggtgactacaagaggaagaaaccgactgcccaaggatgtagacaggacccgtttagagggaaacttttggaagagtggctgcttatgagattccaaaatgaagtgttggccaacaccgctcatggccatcctggattttcccagtggcttcccttcctgctcgcctccctgaacaggggagaaagcttaacctctcttctcctctccaaacctttcaccttgaatgggtaatgtttggtgggggctgttccttcttggagaagccttgagtcggaccattttgagatcatggaggaaggatgaagaagtgaaaatgacaataatgactctcaagaggctggcgatgtgacatggcaaatgtagaactgacttaaattgaacaaaccctcactgagcacctctgatgttgagcacctgctgaatactgagcactgaatgggggagggggaggggagcacggggtgagtcaacctgggactcggtctcagggatatgcctaccaatagcgggtatcgtaaggcatgtacccaaacataacggatgtaaggcagaaagtgatcggagaaggaatgagaaagtgtgcgtgatgttaatgaaaagtcatatgcagctagagcagacccaggaaagctttctggaagagattgcatctgaggaaattcaggaaggatctttgtagattggggggagattctaaattgaaggggtgatagggtgaggggccagagggaagtctgctgtgttctcatgtaggatgtcagccctccctgcaacttctctttttggccaatgtcttttcactttcctgaccctttagaatcatccccagccagacgcaatcatggaagttgccttattgtcactggttaagaacttggcgagattgaagggcttttgttattgttgttggatatttttgtttcccataaaagcacatcatttcaaccctaaa

SEQ ID NO: 51957 - DNA, 2949 bp, Homo sapiens
  misc_feature (32)..(32): n is a, c, g, or t
  misc_feature (70)..(70): n is a, c, g, or t
gcccaacactcgactacgggacctacaaatgntttgggtcaaaaacccacgcaagggcttaatttaaganaacgagcatatatacgtctaagtacagctggtgggatcgcacagagcgctggcagatagtcgggtgccccgacagcgctgccaaccccacttctgcccgggattccaatctgaggagcaggaggaccggggcgccggtgtcctgccgcctccttctccttgctctcacctgcgcctattagtccacgcgccttcaaggccaggggctacagcccagacagagaggggacagcagagggagagagagcacctgaggatacagagctggcactggactgccttttcaccccccaggtgatgagtgaggttcgaagaacggaagatttaaaaagcagccggggcctccgtattgaatgaaagacccagtgcaaagacatcaccatgaacactagcattccttatcagcagaatccttacaatccacggggcagctccaatgtcatccagtgctaccgctgtggagacacctgcaaaggggaagtggtccgcgtgcacaacaaccacttccacatcagatgcttcacctgtcaagtatgtggctgtggcctggcccagtcaggcttcttcttcaagaaccaggagtacatctgcacccaggactaccagcaactctatggcacccgctgtgacagctgccgggacttcatcacaggcgaagtcatctcggccctgggccgcacttaccaccccaagtgcttcgtgtgcagcttgtgcaggaagcctttccccattggagacaaggtgaccttcagcggtaaagaatgtgtgtgccaaacgtgctcccagtccatggccagcagtaagcccatcaagattcgtggaccaagccactgtgccgggtgcaaggaggagatcaagcacggccagtcactcctggctctggacaagcagtggcacgtcagctgcttcaagtgccagacctgcagcgtcatcctcaccggggagtatatcagcaaggatggtgttccatactgtgagtccgactaccatgcccagtttggcattaaatgtgagacttgtgaccgatacatcagtggcagagtcttggaggcaggagggaagcactaccacccaacctgtgccaggtgtgtacgctgccaccagatgttcaccgaaggagaggaaatgtacctcacaggttccgaggtttggcaccccatctgcaaacaggcagcccgggcagagaagaagttaaagcatagacggacatctgaaacctccatctcaccccctggatccagcattgggtcacccaaccgagtcatctgcgacatctacgagaacctggacctccggcagagacgggcctccagcccggggtacatagactcccccacctacagccggcagggcatgtcccccaccttctcccgctcacctcaccactactaccgctctggtgatttgtctacagcaaccaagagcaaaacaagtgaagacatcagccagacctccaagtacagtcccatctactcgccagacccctactatgcttcggagtctgagtactggacctaccatgggtcccccaaagtgccccgagccagaaggttctcgtctggaggagaggaggatgattttgaccgcagcatgcacaagctccaaagtggaattggccggctgattctgaaggaagaaatgaaggcccggtcgagctcctatgcagatccctggacccctccccggagctccaccagcagccgggaagccctgcacacagctggctatgagatgtccctcaatggctcccctcggtcgcactacctggctgacagtgatcctctcatctccaaatctgcctccctgcctgcctaccgaagaaatgggctgcacaggacacccagcgcagacctcttccactacgacagcatgaacgcagtcaactggggcatgcgagagtacaagatctacccttatgaactgctgctggtgactacaagaggaagaaaccgactgcccaaggatgtagacaggacccgtttagagggaaacttttggaagagtggctgcttatgagattccaaaatgaagtgttggccaacaccgctcatggccatcctggattttcccagtggcttcccttcctgctcgcctccctgaacaggggagaaagcttaacctctcttctcctctccaaacctttcaccttgaatgggtaatgtttggtgggggctgttccttcttggagaagccttgagtcggaccattttgagatcatggaggaaggatgaagaagtgaaaatgacaataatgactctcaagaggctggcgatgtgacatggcaaatgtagaactgacttaaattgaacaaaccctcactgagcacctctgatgttgagcacctgctgaatactgagcactgaatgggggagggggaggggagcacggggtgagtcaacctgggactcggtctcagggatatgcctaccaatagcgggtatcgtaaggcatgtacccaaacataacggatgtaaggcagaaagtgatcggagaaggaatgagaaagtgtgcgtgatgttaatgaaaagtcatatgcagctagagcagacccaggaaagctttctggaagagattgcatctgaggaaattcaggaaggatctttgtagattggggggagattctaaattgaaggggtgatagggtgaggggccagagggaagtctgctgtgttctcatgtaggatgtcagccctccctgcaacttctctttttggccaatgtcttttcactttcctgaccctttagaatcatccccagccagacgcaatcatggaagttgccttattgtcactggttaagaacttggcgagattgaagggcttttgttattgttgttggatatttttgtttcccataaaagcacatcatttcaaccctaaa

SEQ ID NO: 51958 - DNA, 4099 bp, Homo sapiens
agccgctgggcaggaatagtccggggtgcgcgcgagcaggcgctgccaaccccacttctgcccgggattccaatctgaggagcaggaggaccggggcgccggtgtcctgccgcctccttctccttgctctcacctgcgcctattagtccacgcgccttcaaggccaggggctacagcccagacagagaggggacagcagagggagagagagcacctgaggatacagagctggcactggactgccttttcaccccccaggtgatgagtgaggttcgaagaacggaagatttaaaaagcagccggggcctccgtattgaatgaaagacccagtgcaaagacatcaccatgaacactagcattccttatcagcagaatccttacaatccacggggcagctccaatgtcatccagtgctaccgctgtggagacacctgcaaaggggaagtggtccgcgtgcacaacaaccacttccacatcagatgcttcacctgtcaagtatgtggctgtggcctggcccagtcaggcttcttcttcaagaaccaggagtacatctgcacccaggactaccagcaactctatggcacccgctgtgacagctgccgggacttcatcacaggcgaagtcatctcggccctgggccgcacttaccaccccaagtgcttcgtgtgcagcttgtgcaggaagcctttccccattggagacaaggtgaccttcagcggtaaagaatgtgtgtgccaaacgtgctcccagtccatggccagcagtaagcccatcaagattcgtggaccaagccactgtgccgggtgcaaggaggagatcaagcacggccagtcactcctggctctggacaagcagtggcacgtcagctgcttcaagtgccagacctgcagcgtcatcctcaccggggagtatatcagcaaggatggtgttccatactgtgagtccgactaccatgcccagtttggcattaaatgtgagacttgtgaccgatacatcagtggcagagtcttggaggcaggagggaagcactaccacccaacctgtgccaggtgtgtacgctgccaccagatgttcaccgaaggagaggaaatgtacctcacaggttccgaggtttggcaccccatctgcaaacaggcagcccgggcagagaagaagttaaagcatagacggacatctgaaacctccatctcaccccctggatccagcattgggtcacccaaccgagtcatctgcgacatctacgagaacctggacctccggcagagacgggcctccagcccggggtacatagactcccccacctacagccggcagggcatgtcccccaccttctcccgctcacctcaccactactaccgctctggtgatttgtctacagcaaccaagagcaaaacaagtgaagacatcagccagacctccaagtacagtcccatctactcgccagacccctactatgcttcggagtctgagtactggacctaccatgggtcccccaaagtgccccgagccagaaggttctcgtctggaggagaggaggatgattttgaccgcagcatgcacaagctccaaagtggaattggccggctgattctgaaggaagaaatgaaggcccggtcgagctcctatgcagatccctggacccctccccggagctccaccagcagccgggaagccctgcacacagctggctatgagatgtccctcaatggctcccctcggtcgcactacctggctgacagtgatcctctcatctccaaatctgcctccctgcctgcctaccgaagaaatgggctgcacaggacacccagcgcagacctcttccactacgacagcatgaacgcagtcaactggggcatgcgagagtacaagatctacccttatgaactgctgctggtgactacaagaggaagaaaccgactgcccaaggatgtagacaggacccgtttagagcgccacctgtcccaggaagagttctaccaagtctttggcatgaccatctctgagtttgaccggctggccctctggaagaggaatgaactgaagaagcaagcccggctgttctaggcagaggctctataaatatatatgcatttatataaagatatatgtaaaatctctctactgaagctcggtataatcctctcttgtgtaatgggacacactgcctgccatgagacttgcttttctgtactgtcaggcaagcccacgtcatcgagatatttttatgctccttactttctcttttctaagtgctgtgggatctgggaagggatttgaggggactctgtccttttattggggatcctttttatactgaaacatctgtcctaacttgagtgccccaaggtccaactctctttcctaaagaaggtgcctgaagaagtctctcttctctctgcttcgtggcccctttcttaaatttctagggctgatgctgaccatgtggtttccacaccttattggccccagaggggccctcccatgggaagatctgcagcagtctccccaaatcagtgagcacctttgagcgcccacgaagaactttctcaacacccccaattaggagctcagtgctctcttggggcaatgcagttaaaagggtgagcctcaaatctagtcattacaccagtcaacagaagtggacagggcctaggcctctcctcagctccttaaccctcctccttctgccctggattgtaacctctcccttgtccaaatctaggattcctggtaggaaaaggaaaaggcccttcccttccctccaccacttccaactggcccctttgcctgacctggacttggagaaccagaggaaaagagagggagcggaagtgggagatggagcagggcacctgttagaatcagagctgcaggatttcttgggaccctcctctctccctcactgctcccagcacctcctgacccttccctctttcaaggagaagcccatgattgcagcttgtattctttagccttattacaatctatgtgcctgacaactcaacacaccgcagggctaatgttcccaccagagctccaactgaacaaccagacagacaactctcatcatcctccagagagaaaataggccgtgtctcaaagaaaggttcttggtctatgcctctggtctgtgggctggcagggcaaccataccatactcccgccagtcctcggctcctgctgcaaagttggccatgtttcacagggaaacttttggaagagtggctgcttatgagattccaaaatgaagtgttggccaacaccgctcatggccatcctggattttcccagtggcttcccttcctgctcgcctccctgaacaggggagaaagcttaacctctcttctcctctccaaacctttcaccttgaatgggtaatgtttggtgggggctgttccttcttggagaagccttgagtcggaccattttgagatcatggaggaaggatgaagaagtgaaaatgacaataatgactctcaagaggctggcgatgtgacatggcaaatgtagaactgacttaaattgaacaaaccctcactgagcacctctgatgttgagcacctgctgaatactgagcactgaatgggggagggggaggggagcacggggtgagtcaacctgggactcggtctcagggatatgcctaccaatagcgggtatcgtaaggcatgtacccaaacataacggatgtaaggcagaaagtgatcggagaaggaatgagaaagtgtgcgtgatgttaatgaaaagtcatatgcagctagagcagacccaggaaagctttctggaagagattgcatctgaggaaattcaggaaggatctttgtagattggggggagattctaaattgaaggggtgatagggtgaggggccagagggaagtctgctgtgttctcatgtaggatgtcagccctccctgcaacttctctttttggccaatgtcttttcactttcctgaccctttagaatcatccccagccagacgcaatcatggaagttgccttattgtcactggttaagaacttggcgagattgaagggcttttgttattgttgttggatatttttgtttcccataaaagcacatcatttcaaccctaaa

SEQ ID NO: 51959 - DNA, 4147 bp, Homo sapiens
agccgctgggcaggaatagtccggggtgcgcgcgagcaggcgctgccaaccccacttctgcccgggattccaatctgaggagcaggaggaccggggcgccggtgtcctgccgcctccttctccttgctctcacctgcgcctattagtccacgcgccttcaaggccaggggctacagcccagacagagaggggacagcagagggagagagagcacctgaggatacagagctggcactggactgccttttcaccccccaggtgatgagtgaggttcgaagaacggaagatttaaaaagcagccggggcctccgtattgaatgaaagacccagtgcaaagacatcaccatgaacactagcattccttatcagcagaatccttacaatccacggggcagctccaatgtcatccagtgctaccgctgtggagacacctgcaaaggggaagtggtccgcgtgcacaacaaccacttccacatcagatgcttcacctgtcaagtatgtggctgtggcctggcccagtcaggcttcttcttcaagaaccaggagtacatctgcacccaggactaccagcaactctatggcacccgctgtgacagctgccgggacttcatcacaggcgaagtcatctcggccctgggccgcacttaccaccccaagtgcttcgtgtgcagcttgtgcaggaagcctttccccattggagacaaggtgaccttcagcggtaaagaatgtgtgtgccaaacgtgctcccagtccatggccagcagtaagcccatcaagattcgtggaccaagccactgtgccgggtgcaaggaggagatcaagcacggccagtcactcctggctctggacaagcagtggcacgtcagctgcttcaagtgccagacctgcagcgtcatcctcaccggggagtatatcagcaaggatggtgttccatactgtgagtccgactaccatgcccagtttggcattaaatgtgagacttgtgaccgatacatcagtggcagagtcttggaggcaggagggaagcactaccacccaacctgtgccaggtgtgtacgctgccaccagatgttcaccgaaggagaggaaatgtacctcacaggttccgaggtttggcaccccatctgcaaacaggcagcccgggcagagaagaagttaaagcatagacggacatctgaaacctccatctcaccccctggatccagcattgggtcacccaaccgagtcatctgcgacatctacgagaacctggacctccggcagagacgggcctccagcccggggtacatagactcccccacctacagccggcagggcatgtcccccaccttctcccgctcacctcaccactactaccgctctgctggagacagtaacatctaccggaaacccccgatctacaaacggcatggtgatttgtctacagcaaccaagagcaaaacaagtgaagacatcagccagacctccaagtacagtcccatctactcgccagacccctactatgcttcggagtctgagtactggacctaccatgggtcccccaaagtgccccgagccagaaggttctcgtctggaggagaggaggatgattttgaccgcagcatgcacaagctccaaagtggaattggccggctgattctgaaggaagaaatgaaggcccggtcgagctcctatgcagatccctggacccctccccggagctccaccagcagccgggaagccctgcacacagctggctatgagatgtccctcaatggctcccctcggtcgcactacctggctgacagtgatcctctcatctccaaatctgcctccctgcctgcctaccgaagaaatgggctgcacaggacacccagcgcagacctcttccactacgacagcatgaacgcagtcaactggggcatgcgagagtacaagatctacccttatgaactgctgctggtgactacaagaggaagaaaccgactgcccaaggatgtagacaggacccgtttagagcgccacctgtcccaggaagagttctaccaagtctttggcatgaccatctctgagtttgaccggctggccctctggaagaggaatgaactgaagaagcaagcccggctgttctaggcagaggctctataaatatatatgcatttatataaagatatatgtaaaatctctctactgaagctcggtataatcctctcttgtgtaatgggacacactgcctgccatgagacttgcttttctgtactgtcaggcaagcccacgtcatcgagatatttttatgctccttactttctcttttctaagtgctgtgggatctgggaagggatttgaggggactctgtccttttattggggatcctttttatactgaaacatctgtcctaacttgagtgccccaaggtccaactctctttcctaaagaaggtgcctgaagaagtctctcttctctctgcttcgtggcccctttcttaaatttctagggctgatgctgaccatgtggtttccacaccttattggccccagaggggccctcccatgggaagatctgcagcagtctccccaaatcagtgagcacctttgagcgcccacgaagaactttctcaacacccccaattaggagctcagtgctctcttggggcaatgcagttaaaagggtgagcctcaaatctagtcattacaccagtcaacagaagtggacagggcctaggcctctcctcagctccttaaccctcctccttctgccctggattgtaacctctcccttgtccaaatctaggattcctggtaggaaaaggaaaaggcccttcccttccctccaccacttccaactggcccctttgcctgacctggacttggagaaccagaggaaaagagagggagcggaagtgggagatggagcagggcacctgttagaatcagagctgcaggatttcttgggaccctcctctctccctcactgctcccagcacctcctgacccttccctctttcaaggagaagcccatgattgcagcttgtattctttagccttattacaatctatgtgcctgacaactcaacacaccgcagggctaatgttcccaccagagctccaactgaacaaccagacagacaactctcatcatcctccagagagaaaataggccgtgtctcaaagaaaggttcttggtctatgcctctggtctgtgggctggcagggcaaccataccatactcccgccagtcctcggctcctgctgcaaagttggccatgtttcacagggaaacttttggaagagtggctgcttatgagattccaaaatgaagtgttggccaacaccgctcatggccatcctggattttcccagtggcttcccttcctgctcgcctccctgaacaggggagaaagcttaacctctcttctcctctccaaacctttcaccttgaatgggtaatgtttggtgggggctgttccttcttggagaagccttgagtcggaccattttgagatcatggaggaaggatgaagaagtgaaaatgacaataatgactctcaagaggctggcgatgtgacatggcaaatgtagaactgacttaaattgaacaaaccctcactgagcacctctgatgttgagcacctgctgaatactgagcactgaatgggggagggggaggggagcacggggtgagtcaacctgggactcggtctcagggatatgcctaccaatagcgggtatcgtaaggcatgtacccaaacataacggatgtaaggcagaaagtgatcggagaaggaatgagaaagtgtgcgtgatgttaatgaaaagtcatatgcagctagagcagacccaggaaagctttctggaagagattgcatctgaggaaattcaggaaggatctttgtagattggggggagattctaaattgaaggggtgatagggtgaggggccagagggaagtctgctgtgttctcatgtaggatgtcagccctccctgcaacttctctttttggccaatgtcttttcactttcctgaccctttagaatcatccccagccagacgcaatcatggaagttgccttattgtcactggttaagaacttggcgagattgaagggcttttgttattgttgttggatatttttgtttcccataaaagcacatcatttcaaccctaaa

SEQ ID NO: 51960 - DNA, 3633 bp, Homo sapiens
ctgcccttgttttcctccttgttccccaagtatgtggctgtggcctggcccagtcaggcttcttcttcaagaaccaggagtacatctgcacccaggactaccagcaactctatggcacccgctgtgacagctgccgggacttcatcacaggcgaagtcatctcggccctgggccgcacttaccaccccaagtgcttcgtgtgcagcttgtgcaggaagcctttccccattggagacaaggtgaccttcagcggtaaagaatgtgtgtgccaaacgtgctcccagtccatggccagcagtaagcccatcaagattcgtggaccaagccactgtgccgggtgcaaggaggagatcaagcacggccagtcactcctggctctggacaagcagtggcacgtcagctgcttcaagtgccagacctgcagcgtcatcctcaccggggagtatatcagcaaggatggtgttccatactgtgagtccgactaccatgcccagtttggcattaaatgtgagacttgtgaccgatacatcagtggcagagtcttggaggcaggagggaagcactaccacccaacctgtgccaggtgtgtacgctgccaccagatgttcaccgaaggagaggaaatgtacctcacaggttccgaggtttggcaccccatctgcaaacaggcagcccgggcagagaagaagttaaagcatagacggacatctgaaacctccatctcaccccctggatccagcattgggtcacccaaccgagtcatctgcgacatctacgagaacctggacctccggcagagacgggcctccagcccggggtacatagactcccccacctacagccggcagggcatgtcccccaccttctcccgctcacctcaccactactaccgctctggtgatttgtctacagcaaccaagagcaaaacaagtgaagacatcagccagacctccaagtacagtcccatctactcgccagacccctactatgcttcggagtctgagtactggacctaccatgggtcccccaaagtgccccgagccagaaggttctcgtctggaggagaggaggatgattttgaccgcagcatgcacaagctccaaagtggaattggccggctgattctgaaggaagaaatgaaggcccggtcgagctcctatgcagatccctggacccctccccggagctccaccagcagccgggaagccctgcacacagctggctatgagatgtccctcaatggctcccctcggtcgcactacctggctgacagtgatcctctcatctccaaatctgcctccctgcctgcctaccgaagaaatgggctgcacaggacacccagcgcagacctcttccactacgacagcatgaacgcagtcaactggggcatgcgagagtacaagatctacccttatgaactgctgctggtgactacaagaggaagaaaccgactgcccaaggatgtagacaggacccgtttagagcgccacctgtcccaggaagagttctaccaagtctttggcatgaccatctctgagtttgaccggctggccctctggaagaggaatgaactgaagaagcaagcccggctgttctaggcagaggctctataaatatatatgcatttatataaagatatatgtaaaatctctctactgaagctcggtataatcctctcttgtgtaatgggacacactgcctgccatgagacttgcttttctgtactgtcaggcaagcccacgtcatcgagatatttttatgctccttactttctcttttctaagtgctgtgggatctgggaagggatttgaggggactctgtccttttattggggatcctttttatactgaaacatctgtcctaacttgagtgccccaaggtccaactctctttcctaaagaaggtgcctgaagaagtctctcttctctctgcttcgtggcccctttcttaaatttctagggctgatgctgaccatgtggtttccacaccttattggccccagaggggccctcccatgggaagatctgcagcagtctccccaaatcagtgagcacctttgagcgcccacgaagaactttctcaacacccccaattaggagctcagtgctctcttggggcaatgcagttaaaagggtgagcctcaaatctagtcattacaccagtcaacagaagtggacagggcctaggcctctcctcagctccttaaccctcctccttctgccctggattgtaacctctcccttgtccaaatctaggattcctggtaggaaaaggaaaaggcccttcccttccctccaccacttccaactggcccctttgcctgacctggacttggagaaccagaggaaaagagagggagcggaagtgggagatggagcagggcacctgttagaatcagagctgcaggatttcttgggaccctcctctctccctcactgctcccagcacctcctgacccttccctctttcaaggagaagcccatgattgcagcttgtattctttagccttattacaatctatgtgcctgacaactcaacacaccgcagggctaatgttcccaccagagctccaactgaacaaccagacagacaactctcatcatcctccagagagaaaataggccgtgtctcaaagaaaggttcttggtctatgcctctggtctgtgggctggcagggcaaccataccatactcccgccagtcctcggctcctgctgcaaagttggccatgtttcacagggaaacttttggaagagtggctgcttatgagattccaaaatgaagtgttggccaacaccgctcatggccatcctggattttcccagtggcttcccttcctgctcgcctccctgaacaggggagaaagcttaacctctcttctcctctccaaacctttcaccttgaatgggtaatgtttggtgggggctgttccttcttggagaagccttgagtcggaccattttgagatcatggaggaaggatgaagaagtgaaaatgacaataatgactctcaagaggctggcgatgtgacatggcaaatgtagaactgacttaaattgaacaaaccctcactgagcacctctgatgttgagcacctgctgaatactgagcactgaatgggggagggggaggggagcacggggtgagtcaacctgggactcggtctcagggatatgcctaccaatagcgggtatcgtaaggcatgtacccaaacataacggatgtaaggcagaaagtgatcggagaaggaatgagaaagtgtgcgtgatgttaatgaaaagtcatatgcagctagagcagacccaggaaagctttctggaagagattgcatctgaggaaattcaggaaggatctttgtagattggggggagattctaaattgaaggggtgatagggtgaggggccagagggaagtctgctgtgttctcatgtaggatgtcagccctccctgcaacttctctttttggccaatgtcttttcactttcctgaccctttagaatcatccccagccagacgcaatcatggaagttgccttattgtcactggttaagaacttggcgagattgaagggcttttgttattgttgttggatatttttgtttcccataaaagcacatcatttcaaccctaaa

SEQ ID NO: 51961 - DNA, 3453 bp, Homo sapiens
agccgctgggcaggaatagtccggggtgcgcgcgagcaggcgctgccaaccccacttctgcccgggattccaatctgaggagcaggaggaccggggcgccggtgtcctgccgcctccttctccttgctctcacctgcgcctattagtccacgcgccttcaaggccaggggctacagcccagacagagaggggacagcagagggagagagagcacctgaggatacagagctggcactggactgccttttcaccccccaggtgatgagtgaggttcgaagaacggaagatttaaaaagcagccggggcctccgtattgaatgaaagacccagtgcaaagacatcaccatgaacactagcattccttatcagcagaatccttacaatccacggggcagctccaatgtcatccagtgctaccgctgtggagacacctgcaaaggggaagtggtccgcgtgcacaacaaccacttccacatcagatgcttcacctgtcaagtatgtggctgtggcctggcccagtcaggcttcttcttcaagaaccaggagtacatctgcacccaggactaccagcaactctatggcacccgctgtgacagctgccgggacttcatcacaggcgaagtcatctcggccctgggccgcacttaccaccccaagtgcttcgtgtgcagcttgtgcaggaagcctttccccattggagacaaggtgaccttcagcggtaaagaatgtgtgtgccaaacgtgctcccagtccatggccagcagtaagcccatcaagattcgtggaccaagccactgtgccgggtgcaaggaggagatcaagcacggccagtcactcctggctctggacaagcagtggcacgtcagctgcttcaagtgccagacctgcagcgtcatcctcaccggggagtatatcagcaaggatggtgttccatactgtgagtccgactaccatgcccagtttggcattaaatgtgagacttgtgaccgatacatcagtggcagagtcttggaggcaggagggaagcactaccacccaacctgtgccaggtgtgtacgctgccaccagatgttcaccgaaggagaggaaatgtacctcacaggttccgaggtttggcaccccatctgcaaacaggcagcccgggcagagaagaagttaaagcatagacggacatctgaaacctccatctcaccccctggatccagcattgggtcacccaaccgagtcatctgcgacatctacgagaacctggacctccggcagagacgggcctccagcccggggtacatagactcccccacctacagccggcagggcatgtcccccaccttctcccgctcacctcaccactactaccgctctggtgatttgtctacagcaaccaagagcaaaacaagtgaagacatcagccagacctccaagtacagtcccatctactcgccagacccctactatgcttcggagtctgagtactggacctaccatgggtcccccaaagtgccccgagccagaaggttctcgtctggaggagaggaggatgattttgaccgcagcatgcacaagctccaaagtggaattggccggctgattctgaaggaagaaatgaaggcccggtcgagctcctatgcagatccctggacccctccccggagctccaccagcagccgggaagccctgcacacagctggctatgagatgtccctcaatggctcccctcggtcgcactacctggctgacagtgatcctctcatctccaaatctgcctccctgcctgcctaccgaagaaatgggctgcacaggacacccagcgcagacctcttccactacgacagcatgaacgcagtcaactggggcatgcgagagtacaagatctacccttatgaactgctgctggtgactacaagaggaagaaaccgactgcccaaggatgtagacaggacccgtttagagcgccacctgtcccaggaagagttctaccaagtctttggcatgaccatctctgagtttgaccggctggccctctggaagaggaatgaactgaagaagcaagcccggctgttctaggcagaggctctataaatatatatgcatttatataaagatatatgtaaaatctctctactgaagctcggtataatcctctcttgtgtaatgggacacactgcctgccatgagacttgcttttctgtactgtcaggcaagcccacgtcatcgagatatttttatgctccttactttctcttttctaagtgctgtgggatctgggaagggatttgaggggactctgtccttttattggggatcctttttatactgaaacatctgtcctaacttgagtgccccaaggtccaactctctttcctaaagaaggtgcctgaagaagtctctcttctctctgcttcgtggcccctttcttaaatttctagggctgatgctgaccatgtggtttccacaccttattggccccagaggggccctcccatgggaagatctgcagcagtctccccaaatcagtgagcacctttgagcgcccacgaagaactttctcaacacccccaattaggagctcagtgctctcttggggcaatgcagttaaaagggtgagcctcaaatctagtcattacaccagtcaacagaagtggacagggcctaggcctctcctcagctccttaaccctcctccttctgccctggattgtaacctctcccttgtccaaatctaggattcctggtaggaaaaggaaaaggcccttcccttccctccaccacttccaactggcccctttgcctgacctggacttggagaaccagaggaaaagagagggagcggaagtgggagatggagcagggcacctgttagaatcagagctgcaggatttcttgggaccctcctctctccctcactgctcccagcacctcctgacccttccctctttcaaggagaagcccatgattgcagcttgtattctttagccttattacaatctatgtgcctgacaactcaacacaccgcagggctaatgttcccaccagagctccaactgaacaaccagaaagtgatcggagaaggaatgagaaagtgtgcgtgatgttaatgaaaagtcatatgcagctagagcagacccaggaaagctttctggaagagattgcatctgaggaaattcaggaaggatctttgtagattggggggagattctaaattgaaggggtgatagggtgaggggccagagggaagtctgctgtgttctcatgtaggatgtcagccctccctgcaacttctctttttggccaatgtcttttcactttcctgaccctttagaatcatccccagccagacgcaatcatggaagttgccttattgtcactggttaagaacttggcgagattgaagggcttttgttattgttgttggatatttttgtttcccataaaagcacatcatttcaaccctaaa

SEQ ID NO: 51962 - DNA, 3750 bp, Homo sapiens
agccgctgggcaggaatagtccggggtgcgcgcgagcaggcgctgccaaccccacttctgcccgggattccaatctgaggagcaggaggaccggggcgccggtgtcctgccgcctccttctccttgctctcacctgcgcctattagtccacgcgccttcaaggccaggggctacagcccagacagagaggggacagcagagggagagagagcacctgaggatacagagctggcactggactgccttttcaccccccaggtgatgagtgaggttcgaagaacggaagatttaaaaagcagccggggcctccgtattgaatgaaagacccagtgcaaagacatcaccatgaacactagcattccttatcagcagaatccttacaatccacggggcagctccaatgtcatccagtgctaccgctgtggagacacctgcaaaggggaagtggtccgcgtgcacaacaaccacttccacatcagatgcttcacctgtcaagtatgtggctgtggcctggcccagtcaggcttcttcttcaagaaccaggagtacatctgcacccaggactaccagcaactctatggcacccgctgtgacagctgccgggacttcatcacaggcgaagtcatctcggccctgggccgcacttaccaccccaagtgcttcgtgtgcagcttgtgcaggaagcctttccccattggagacaaggtgaccttcagcggtaaagaatgtgtgtgccaaacgtgctcccagtccatggccagcagtaagcccatcaagattcgtggaccaagccactgtgccgggtgcaaggaggagatcaagcacggccagtcactcctggctctggacaagcagtggcacgtcagctgcttcaagtgccagacctgcagcgtcatcctcaccggggagtatatcagcaaggatggtgttccatactgtgagtccgactaccatgcccagtttggcattaaatgtgagacttgtgaccgatacatcagtggcagagtcttggaggcaggagggaagcactaccacccaacctgtgccaggtgtgtacgctgccaccagatgttcaccgaaggagaggaaatgtacctcacaggttccgaggtttggcaccccatctgcaaacaggcagcccgggcagagaagaagttaaagcatagacggacatctgaaacctccatctcaccccctggatccagcattgggtcacccaaccgagtcatctgcgacatctacgagaacctggacctccggcagagacgggcctccagcccggggtacatagactcccccacctacagccggcagggcatgtcccccaccttctcccgctcacctcaccactactaccgctctggtgatttgtctacagcaaccaagagcaaaacaagtgaagacatcagccagacctccaagtacagtcccatctactcgccagacccctactatgcttcggagtctgagtactggacctaccatgggtcccccaaagtgccccgagccagaaggttctcgtctggaggagaggaggatgattttgaccgcagcatgcacaagctccaaagtggaattggccggctgattctgaaggaagaaatgaaggcccggtcgagctcctatgcagatccctggacccctccccggagctccaccagcagccgggaagccctgcacacagctggctatgagatgtccctcaatggctcccctcggtcgcactacctggctgacagtgatcctctcatctccaaatctgcctccctgcctgcctaccgaagaaatgggctgcacaggacacccagcgcagacctcttccactacgacagcatgaacgcagtcaactggggcatgcgagagtacaagatctacccttatgaactgctgctggtgactacaagaggaagaaaccgactgcccaaggatgtagacaggacccgtttagagcgccacctgtcccaggaagagttctaccaagtctttggcatgaccatctctgagtttgaccggctggccctctggaagaggaatgaactgaagaagcaagcccggctgttctaggcagaggctctataaatatatatgcatttatataaagatatatgtaaaatctctctactgaagctcggtataatcctctcttgtgtaatgggacacactgcctgccatgagacttgcttttctgtactgtcaggcaagcccacgtcatcgagatatttttatgctccttactttctcttttctaagtgctgtgggatctgggaagggatttgaggggactctgtccttttattggggatcctttttatactgaaacatctgtcctaacttgagtgccccaaggtccaactctctttcctaaagaaggtgcctgaagaagtctctcttctctctgcttcgtggcccctttcttaaatttctagggctgatgctgaccatgtggtttccacaccttattggccccagaggggccctcccatgggaagatctgcagcagtctccccaaatcagtgagcacctttgagcgcccacgaagaactttctcaacacccccaattaggagctcagtgctctcttggggcaatgcagttaaaagggtgagcctcaaatctagtcattacaccagtcaacagaagtggacagggcctaggcctctcctcagctccttaaccctcctccttctgccctggattgtaacctctcccttgtccaaatctaggattcctggtaggaaaaggaaaaggcccttcccttccctccaccacttccaactggcccctttgcctgacctggacttggagaaccagaggaaaagagagggagcggaagtgggagatggagcagggcacctgttagaatcagagctgcaggatttcttgggaccctcctctctccctcactgctcccagcacctcctgacccttccctctttcaaggagaagcccatgattgcagcttgtattctttagccttattacaatctatgtgcctgacaactcaacacaccgcagggctaatgttcccaccagagctccaactgaacaaccagacagacaactctcatcatcctccagagagaaaataggccgtgtctcaaagaaaggttcttggtctatgcctctggtctgtgggctggcagggcaaccataccatactcccgccagtcctcggctcctgctgcaaagttggccatgtttcacagggaaacttttggaagagtggctgcttatgagattccaaaatgaagtgttggccaacaccgctcatggccatcctggattttcccagtggcttcccttcctgctcgcctccctgaacaggggagaaagcttaacctctcttctcctctccaaacctttcaccttgaatgggtaatgtttggtgggggctgttccttcttggagaagccttgagtcggaccattttgagatcatggaggaaggatgaagaagtgaaaatgacaataatgactctcaagaggctggcgatgtgacatggcaaatgtagaactgacttaaattgaacaaaccctcactgagcacctctgatgttgagcacctgctgaatactgagcactgaatgggggagggggaggggagcacggggtgagtcaacctgggactcggtctcagggatatgcctaccaatagcgggtatcgtaaggcatgtacccaaacataacggatgtaaggcagaaagtgatcggagaaggaattcgtcctagagtcatgggtgccgagctctaat

SEQ ID NO: 51963 - DNA, 700 bp, Homo sapiens
taccttgccatgtcacatcgccagcattttgagatcatggaggaaggatgaagaagtgaaaatgacaataatgactctcaagaggctggcgatgtgacatggcaaatgtagaactgacttaaattgaacaaaccctcactgagcacctctgatgttgagcacctgctgaatactgagcactgaatgggggagggggaggggagcacggggtgagtcaacctgggactcggtctcagggatatgcctaccaatagcgggtatcgtaaggcatgtacccaaacataacggatgtaaggcagaaagtgatcggagaaggaatgagaaagtgtgcgtgatgttaatgaaaagtcatatgcagctagagcagacccaggaaagctttctggaagagattgcatctgaggaaattcaggaaggatctttgtagattggggggagattctaaattgaaggggtgatagggtgaggggccagagggaagtctgctgtgttctcatgtaggatgtcagccctccctgcaacttctctttttggccaatgtcttttcactttcctgaccctttagaatcatccccagccagacgcaatcatggaagttgccttattgtcactggttaagaacttggcgagattgaagggcttttgttattgttgttggatatttttgtttcccataaaagcacatcatttcaaccctaaa

SEQ ID NO: 51964 - DNA, 2013 bp, Homo sapiens
agccgctgggcaggaatagtccggggtgcgcgcgagcaggcgctgccaaccccacttctgcccgggattccaatctgaggagcaggaggaccggggcgccggtgtcctgccgcctccttctccttgctctcacctgcgcctattagtccacgcgccttcaaggccaggggctacagcccagacagagaggggacagcagagggagagagagcacctgaggatacagagctggcactggactgccttttcaccccccaggtgatgagtgaggttcgaagaacggaagatttaaaaagcagccggggcctccgtattgaatgaaagacccagtgcaaagacatcaccatgaacactagcattccttatcagcagaatccttacaatccacggggcagctccaatgtcatccagtgctaccgctgtggagacacctgcaaaggggaagtggtccgcgtgcacaacaaccacttccacatcagatgcttcacctgtcaagtatgtggctgtggcctggcccagtcaggcttcttcttcaagaaccaggagtacatctgcacccaggactaccagcaactctatggcacccgctgtgacagctgccgggacttcatcacaggcgaagtcatctcggccctgggccgcacttaccaccccaagtgcttcgtgtgcagcttgtgcaggaagcctttccccattggagacaaggtgaccttcagcggtaaagaatgtgtgtgccaaacgtgctcccagtccatggccagcagtaagcccatcaagattcgtggaccaagccactgtgccgggtgcaaggaggagatcaagcacggccagtcactcctggctctggacaagcagtggcacgtcagctgcttcaagtgccagacctgcagcgtcatcctcaccggggagtatatcagcaaggatggtgttccatactgtgagtccgactaccatgcccagtttggcattaaatgtgagacttgtgaccgatacatcagtggcagagtcttggaggcaggagggaagcactaccacccaacctgtgccaggtgtgtacgctgccaccagatgttcaccgaaggagaggaaatgtacctcacaggttccgaggtttggcaccccatctgcaaacaggcagcccgggcagagaagaagttaaagcatagacggacatctgaaacctccatctcaccccctggatccagcattgggtcacccaaccgagtcatctgcgacatctacgagaacctggacctccggcagagacgggcctccagcccggggtacatagactcccccacctacagccggcagggcatgtcccccaccttctcccgctcacctcaccactactaccgctctggtgatttgtctacagcaaccaagagcaaaacaagtgaagacatcagccagacctccaagtacagtcccatctactcgccagacccctactatgcttcggagtctgagtactggacctaccatgggtcccccaaagtgccccgagccagaaggttctcgtctggaggagaggaggatgattttgaccgcagcatgcacaagctccaaagtggaattggccggctgattctgaaggaagaaatgaaggcccggtcgagctcctatgcagatccctggacccctccccggagctccaccagcagccgggaagccctgcacacagctggctatgagatgtccctcaatggctcccctcggtcgcactacctggctgacagtgatcctctcatctccaaatctgcctccctgcctgcctaccgaagaaatgggctgcacaggacacccagcgcagacctcttccactacgacagcatgaacgcagtcaactggggcatgcgagagtacaagtacaaggtaaaggatgtgcatagaccctgggggtctccaggattcttggagccgctacactggggatcaccaggaggatgacagcactgtctatgtagggaagggaacatagataaataaccccaggggtcctttcaagaccaa

SEQ ID NO: 51965 - DNA, 1979 bp, Homo sapiens
agccgctgggcaggaatagtccggggtgcgcgcgagcaggcgctgccaaccccacttctgcccgggattccaatctgaggagcaggaggaccggggcgccggtgtcctgccgcctccttctccttgctctcacctgcgcctattagtccacgcgccttcaaggccaggggctacagcccagacagagaggggacagcagagggagagagagcacctgaggatacagagctggcactggactgccttttcaccccccaggtgatgagtgaggttcgaagaacggaagatttaaaaagcagccggggcctccgtattgaatgaaagacccagtgcaaagacatcaccatgaacactagcattccttatcagcagaatccttacaatccacggggcagctccaatgtcatccagtgctaccgctgtggagacacctgcaaaggggaagtggtccgcgtgcacaacaaccacttccacatcagatgcttcacctgtcaagtatgtggctgtggcctggcccagtcaggcttcttcttcaagaaccaggagtacatctgcacccaggactaccagcaactctatggcacccgctgtgacagctgccgggacttcatcacaggcgaagtcatctcggccctgggccgcacttaccaccccaagtgcttcgtgtgcagcttgtgcaggaagcctttccccattggagacaaggtgaccttcagcggtaaagaatgtgtgtgccaaacgtgctcccagtccatggccagcagtaagcccatcaagattcgtggaccaagccactgtgccgggtgcaaggaggagatcaagcacggccagtcactcctggctctggacaagcagtggcacgtcagctgcttcaagtgccagacctgcagcgtcatcctcaccggggagtatatcagcaagtgggtccccctgctcctgccccagctgcctgggcctctgcattctgtgaggcctgccccattgagcccatgcctacatctccagcatcatctcccttcctttccgtctgctgctgcattctggccaaacagcatctttcccagcagcctctttcccccgttggaccctcccgggggggtttccctctgcctgagacaccctccctgttccttgcacgcttgctgccccttctctcccttctggtctcggtccccatgccttcccctccggccgtctctcatttactgccccgttttgggccctcagagtaccttgttgtttccttcacacaggctaccaccattggtaattacatatttatccctggtaactttgtaataatgctaataatactatctaccatttattgagctttaattatgtagaaggaactcactactttgtatgaagtatcactttaaatcctcataactgcccctttgaggaatttatccccactgaatactcagacttgagagagtaaataacttgctccagtaatagtgtttaatctctgtacccaccaggagaggggctttgttttaatcactgctatatcccctgccctgagagcaacacctgacccacagtcaataatatagttgctgaatgaatttaatggatatgagaggaggtgatgggtgcatagttatccagaggggccaacctccagtgacccacacactgcagtattagacaagtgtcctcttgttgctgggccccagtgaccacatttatatactcaagtacctaaaagtaattatcagcacagatcctttgtcacagctttgacatcatatgaccccagacccttccaggtgccactctctggcctgatgccaggcagtggcaagcacacagagctgcagcacacatgcttctgctgtcaagaccctgcagtctaatacgggaaacagatatgctgcgttcatgaagaattatgacaccaggaaatgtgtgatcaggagcccagacaagctttattctttaagacctttttgatcctaagtgacagaaaa

SEQ ID NO: 51966 - DNA, 1699 bp, Homo sapiens
  misc_feature (1222)..(1222): n is a, c, g, or t
  misc_feature (1230)..(1230): n is a, c, g, or t
agccgctgggcaggaatagtccggggtgcgcgcgagcaggcgctgccaaccccacttctgcccgggattccaatctgaggagcaggaggaccggggcgccggtgtcctgccgcctccttctccttgctctcacctgcgcctattagtccacgcgccttcaaggccaggggctacagcccagacagagaggggacagcagagggagagagagcacctgaggatacagagctggcactggactgccttttcaccccccaggtgatgagtgaggttcgaagaacggaagatttaaaaagcagccggggcctccgtattgaatgaaagacccagtgcaaagacatcaccatgaacactagcattccttatcagcagaatccttacaatccacggggcagctccaatgtcatccagtgctaccgctgtggagacacctgcaaaggggaagtggtccgcgtgcacaacaaccacttccacatcagatgcttcacctgtcaagtatgtggctgtggcctggcccagtcaggcttcttcttcaagaaccaggagtacatctgcacccaggactaccagcaactctatggcacccgctgtgacagctgccgggacttcatcacaggcgaagtcatctcggccctgggccgcacttaccaccccaagtgcttcgtgtgcagcttgtgcaggaagcctttccccattggagacaaggtgaccttcagcggtaaagaatgtgtgtgccaaacgtgctcccagtccatggccagcagtaagcccatcaagattcgtggaccaagccactgtgccgggtgcaaggaggagatcaagcacggccagtcactcctggctctggacaagcagtggcacgtcagctgcttcaagtgccagacctgcagcgtcatcctcaccggggagtatatcagcaaggatggtgttccatactgtgagtccgactaccatgcccagtttggcattaaatgtgagacttgtgaccgatacatcagtggcagagtcttggaggcaggagggaagcactaccacccaacctgtgccaggtgtgtacgctgccaccagatgttcaccgaaggagaggaaatgtacctcacaggttccgaggtttggcaccccatctgcaaacaggcagcccgggcagagaagaagttaaagcatagacggcatctgaaaattctcatctaccccctggaatcagccttggggtaccccaacngagtcatntgcgctaaagtggataatgagatccttaattacaaagacctggcggctctccccaaggttaagtctatctacgaggtacaacgccccgacctcatttcctatgagcctcattccagatacatgtccgacgagatgctggagagatgtggctatggagagtcgctgggaacattatctccctactcccaggacatctacgagaacctggacctccggcagagacgggcctccagcccggggtacatagactcccccacctacagccggcagggcatgtcccccaccttctcccgctcacctcaccactactaccgctctgccaggaagcaaagtcaagcttgtttctgccaacgtggtgcatgagagcacatgctgcttccgccccggaacctgagcacgctgagacgccccagcccatcccccatctctgctgtcatcacctcaccacttcctaaactgccaccgcgtt

SEQ ID NO: 51967 - DNA, 373 bp, Homo sapiens
aaatattcatcacacattccccaggctcaggcaccatgcaaggcacagggtgcccagagggaacatgcagcacccactgctgcctccagctacccctgcatcttgcatcctcatgctgctctctttctctgtccccccacccccgcctgccctgcctccttcagcgccacctgtcccaggaagagttctaccaagtctttggcatgaccatctctgagtttgaccggctggccctctggaagaggaatgaactgaagaagcaagcccggctgttctaggcagaggctctataaatatatatgcatttatataaagatatatgtaaaatctctctactgaagctcggtataatcctctcttgtgtaatgggaca

SEQ ID NO: 51968 - DNA, 2199 bp, Homo sapiens
  misc_feature (710)..(710): n is a, c, g, or t
agccgctgggcaggaatagtccggggtgcgcgcgagcaggcgctgccaaccccacttctgcccgggattccaatctgaggagcaggaggaccggggcgccggtgtcctgccgcctccttctccttgctctcacctgcgcctattagtccacgcgccttcaaggccaggggctacagcccagacagagaggggacagcagagggagagagagcacctgaggatacagagctggcactggactgccttttcaccccccaggtgatgagtgaggttcgaagaacggaagatttaaaaagcagccggggcctccgtattgaatgaaagacccagtgcaaagacatcaccatgaacactagcattccttatcagcagaatccttacaatccacggggcagctccaatgtcatccagtgctaccgctgtggagacacctgcaaaggggaagtggtccgcgtgcacaacaaccacttccacatcagatgcttcacctgtcaagtatgtggctgtggcctggcccagtcaggcttcttcttcaagaaccaggagtacatctgcacccaggactaccagcaactctatggcacccgctgtgacagctgccgggacttcatcacaggcgaagtcatctcggccctgggccgcacttaccaccccaagtgcttcgtgtgcagcttgtgcaggacatctccagggatggagagctcatcccngcctcctgctttaccttccgcatcaccatcacttgttaattcagcaagtgaagcctttccccattggagacaaggtgaccttcagcggtaaagaatgtgtgtgccaaacgtgctcccagtccatggccagcagtaagcccatcaagattcgtggaccaagccactgtgccgggtgcaaggaggagatcaagcacggccagtcactcctggctctggacaagcagtggcacgtcagctgcttcaagtgccagacctgcagcgtcatcctcaccggggagtatatcagcaaggatggtgttccatactgtgagtccgactaccatgcccagtttggcattaaatgtgagacttgtgaccgatacatcagtggcagagtcttggaggcaggagggaagcactaccacccaacctgtgccaggtgtgtacgctgccaccagatgttcaccgaaggagaggaaatgtacctcacaggttccgaggtttggcaccccatctgcaaacaggcagcccgggcagagaagaagttaaagcatagacggacatctgaaacctccatctcaccccctggatccagcattgggtcacccaaccgagtcatctgcgacatctacgagaacctggacctccggcagagacgggcctccagcccggggtacatagactcccccacctacagccggcagggcatgtcccccaccttctcccgctcacctcaccactactaccgctctggtgatttgtctacagcaaccaagagcaaaacaagtgaagacatcagccagacctccaagtacagtcccatctactcgccagacccctactatgcttcggagtctgagtactggacctaccatgggtcccccaaagtgccccgagccagaaggttctcgtctggaggagaggaggatgattttgaccgcagcatgcacaagctccaaagtggaattggccggctgattctgaaggaagaaatgaaggcccggtcgagctcctatgcagatccctggacccctccccggagctccaccagcagccgggaagccctgcacacagctggctatgagatgtccctcaatggctcccctcggtcgcactacctggctgacagtgatcctctcatctccaaatctgcctccctgcctgcctaccgaagaaatgggctgcacaggacacccagcgcagacctcttccactacgacagcatgaacgcagtcaactggggcatgcgagagtacaagatctacccttatgaactgctgctggtgactacaagaggaagaaaccgactgcccaaggatgtagacaggacccgtttagagcgccacctgtcccaggaagagttctaccaagtctttggcatgaccatctctgagtttgaccggctggccctctggaagaggaatgaactgaagaagcaagcccggctgttctaggcagaggctctataaatatatatgcatttatataaagatatatgtaaaatctctct

SEQ ID NO: 51969 - DNA, 310 bp, Homo sapiens
caccagggttccctgttaatatgtatacgttttccatgatctgatcatgatatcgtatgggcttggccagtgagagctggcgcagtcaactgcagggtgtcctcccagccagtgacagtgtggcttctgcaggtacctcgttccccagtcaggatatgcgtgctgtccagggtccagggacgccgtccctgccccgtccagggtcctggagctggcttgactcctcgccttacatcccccagtccaaatcctctcgtcttccaaggcccattccaaggttggccaagtttctcctcctccacagcggatc

SEQ ID NO: 51970 - DNA, 779 bp, Homo sapiens
  misc_feature (778)..(779): n is a, c, g, or t
tgcaggggagggatctttcagtctgtgccctatgaagagacaatttcatcttttttagcacacctgggcatctgagggacattcagcaccagctgtgtcattctcaaatagaaaagtagtaggacatttaataaaggcaacaattaatattgaagaagtggaatcttttggaaacactccctggagtgctccttgacagagaccgagagtaactactgtgcacagctggcacagatccaggctcagatcggggccctggaggagcagctgcaccaggtcagaaccgagaccgagggccagaagctcgagtatgagcagctccttgacatcaaggtccacctggaaaaagaaattgagacctactgcctcctgatagatggagaagatggctcctgttctaaatcaaaaggctatggaggcccaggaaatcaaacaaaagattcatctaaaaccaccattgtcaaaacagttgttgaagagatagatcctcgtggcaaagttctctcatccagagttcacactgtggaagagaaatccaccaaagtcaacaacaagaatgaacagagggtgtcttcctgaactccagcctctgagacagaatggcccccaaattaaaataccaaaatgaagctagtttcctaaataagggtccccttatttttctgcttttcttccaatgaattaagacaagttatttttagaatagtaccatttctttggctttttctctatggtggtgtttcaataaaagttcttcctgttgcaagtcaaaaaaaann

SEQ ID NO: 51971 - DNA, 482 bp, Homo sapiens
tcaaatgttaatctcttttggcaacaccccacacagacagtacccaggattaatactttgtatccctcaatccaatcaagttgacactcagtattaaccatcacacacttctagaagctttctttcatgatactcttcattttaagttactcatattcagcttgtgagaatgatgagaggcaaagaaagttttatgacctactcaaatcacacaggcaatagccaataaaacatatctcacccttacagctaaaaaagctttaaaatcccttcaaaaaacaattcatcttatctacttttcattagattgcaataaaatgattttcttaaattgagataaaggtacatgttctgcattctaactaatagtataggctgagctcttataactttgattgtctcctctgataaactcaagttctccacttgatgtaacagaccaccagaattatccttagtatttctatagaccacgtattgct

SEQ ID NO: 51972 - DNA, 805 bp, Homo sapiens
  misc_feature (29)..(29): n is a, c, g, or t
gtgtctcaaagaaaatgcatgagagcaangcaatggaaagtgtccagttggggaggggagctattttcactaggatgccaacaaaggcttccctgaagactgggcatttgagctgagacctaaatgtgaagatggctgggagctggtgtatggagcatagggttcgctagaggaaaggcagctgtaaagacccaagtcaggaatcagtgtcttgtgttggaaagccaggaggaagaccagagtggctgaagcattattagctgtagagagagagtagattatgaagtcaggagattggcagacctcaaggcgtgcagagcagggcagggagtgtggatgccgtggtgttttcagttctttcaatcaatattttactgcctgcagcccattttcttttacagcctgtcttcttttccttctgctttgactcgagtcttacctcataatgggcattttaatcctctctgtgatgcaatccaatgcttcttgctgggcaccttgctttattccagctcagggcagcattaaaaaagaacagaggaagtctccagccgagaggggctcaggaaggggtgcaggttgcaatctaagagctttaattaaatcaatgccgtgcacatcctgtccacaaagctgggggcaattgcatgctctttactgacgccatgatatacacttaagagctgtgtgacttcacagaagcaattaaattggcctgtttaatcagtggtaaggccaccatcaataacaattattatttttattgatttgataagtgcacagtagaaataatcacagagaatag

SEQ ID NO: 51973 - DNA, 700 bp, Homo sapiens
agctggagaattcaaaggattcaaaacattaacttgcctgaacgtatcctgtagcacaaagaaaaaaattaaggagtattttaaagatacttgaaaacttctaaatatattttcacatgtttttccacctgaaagaatctgtccaaggctgccctgagatgctttttggccgaattctaaggtagatcattaataaaagaagaagaaaagaaaatgccttagaaccatagtaagtaaggggctttcttgaacactggcgtactgctctttgagaacaaagggaaggggattttactgtgtcccattcaaactggtttgctttcttgtcgagtcacaaagggcctgggatttctgggagctcgtgagatgcgtctgtgcatacacactagcaaaagtgtgccgctcctttcaaagtaactgttccactcattcctgctatgacacagcaaggccttgtgtttcggatttcccaggatatagtacgccagtctacccttcccagtgggggaagatcacaggcctgcaaaacaggttctgaacaaacaataacacagtattactttcataaaacccgaagattactgaaattacaggaatcatcctttccgtttttctcctcctagtttcatgtagagtaggaaaattatgagttttttttttaacctttgtatgccaccaataaaaatcctacagaaaattc

SEQ ID NO: 51974 - DNA, 1192 bp, Homo sapiens
  misc_feature (534)..(534): n is a, c, g, or t
  misc_feature (632)..(632): n is a, c, g, or t
  misc_feature (721)..(721): n is a, c, g, or t
  misc_feature (723)..(723): n is a, c, g, or t
  misc_feature (781)..(781): n is a, c, g, or t
  misc_feature (794)..(794): n is a, c, g, or t
cataaaatcataatccacaaactgttattctctccacttctccccctccctaaataaacccttctagtgtttcatgtgactctcatctgtgttcagcagtccagtcccctttccctcattttcccatcatctccttgccttaccttagttgaaacctatctggtccctgagagaatgtcagggccaggattggaggtaggtgcattccttgctctctcccattgctactttcaaattatttcaccccttccctcctgcaaaaatcaccgttcttttgatgtttatgtcatctggatataccaccctttcttagaccttctcactatcttctgccaacatcctagtcaaatctcttcatttactgaagtcttccattcctggcaaaaggtcttccattctaacccagttccttcctttatccttggtgatttccatacctgactggatgatgcaaaaactctcagcttctcagtttctttacttccatattccaatgacattcacaaatttagggactaaatgctacctgggttnccagggcacacctagacaaacaagggagaagagtgtcagatcagaatcatggagaaatgggcggggtggtgtgggtgatgggactcattgtagaaggnagccttgctcattcttgaggagcattaaggtattcgaaactgccaaggtgctggtgcggatggacactaatgcagccacgattggagananctttgcttcatagtattggagcacatgttactgcttcattttgggagcttgtggagtngatgactttctgntttctggtttgtaaattatttgctaagcatattttctctaggcttttttccttttggggttctaacagtcgtaaaagagataataagattagttggacagtttaaagcttttattcgtcctttgacaaaagtaaatgggagggcattccatccctttcctgaaggggggacactccatgagtgtctgtgagaggcagctatctgcactctaaactgcaaacagaaatcaggtgttttaaagactgaatgttttatttatcaaaatgtagcttttggggagggaggggaaatgtaatactggaataatttgtaaatgattttaattttatattcagtgaaaagattttatttatggaattaaccatttaataaagaaatatttacctaaaaaaaaaacc

SEQ ID NO: 51975 - DNA, 196 bp, Homo sapiens
aaaataagaggccgaaagctacctaacaagaatattaaaacttaaaaataaaagactaaaggaaaacctattcattaggtaaaaaataagaaataacagataccaaaaacaagaatggcaagatgaaagtataaactaaaaatatttttggaagtttgaagaaaaggacgactggttgcagtggatgatgcctgta

SEQ ID NO: 51976 - DNA, 1150 bp, Homo sapiens
  misc_feature (1149)..(1149): n is a, c, g, or t
cggattccgggcgcagccgcggctgagcccggggcgttgaatgcgggtggaatttccagtctgggaaggggcggggccttggaccgccgggaagtttggtcctcagcggcttccgtcctgcagcaagtccggaagaaggtccgggggctggagtcctgggacctagctcgggaccggcctggagatggagttcgactgcgagggcctgagacggctgcttggcaagtacaagttcagggacctaactgtggaagaactaaggaatgtaaatgtatttttcccacatttcaaatattccatggacacctatgtttttaaagatagttctcagaaagacctgctgaattttactggcacaattcctgtgatgtatcagggtaatacatataacataccaattcgtttctggattttggattctcaccctttcgctccccctatttgcttcttgaagccaactgcaaatatgggaatcttagtcggaaaacatgtggatgctcaaggcagaatatatttgccctatctccaaaactggagccatcctaaatctgtcattgttggattaattaaagaaatgattgccaagtttcaagaggaacttcccatgtattctctatcatcatctgatgaggcacggcaggtagacttgctagcctatattgcaaaaatcactgaaggtgtttcagatacaaattcaaagagctgggcaaatcatgagaataaaacagtcaataaaattactgtggttggaggtggagaactcggtattgcctgcacattagcaatttcagcaaaggtggagtctcgctctgttacccaggctggagtgtagtggtacaatcttggctcactacagcctccgcctcctgggttcaagcgattctcctgcctcagcctccagagtagctgggactacaggcatgcgccacgacgcccagctaatttttgtatttttagcagagacagggttttgccatgttggccaggctggtctcgaacttctgacctcaagtgatccacctgccctggcctcccaaagtgctgggattacaagtgtgagccaccgtacctggcctgctattacctcttaattagaatttgagttgtattcagtcttttgtcactaaataaatgcttctataaacattnc

SEQ ID NO: 51977 - DNA, 753 bp, Homo sapiens
cggattccgggcgcagccgcggctgagcccggggcgttgaatgcgggtggaatttccagtctgggaaggggcggggccttggaccgccgggaagtttggtcctcagcggcttccgtcctgcagcaagtccggaagaaggtccgggggctggagtcctgggacctagctcgggaccggcctggagatggagttcgactgcgagggcctgagacggctgcttggcaagtacaagttcagggacctaactgtggaagaactaaggaatgtaaatgtatttttcccacatttcaaatattccatggacacctatgtgtcttactccgtaacccaggctggagtgcagtgacacaatcatggcttactgcaaacttcacctgccaggctcaagtcatctgcccatctcagcctccccagtaactgggactataggtaatacatataacataccaattcgtttctggattttggattctcaccctttcgctccccctatttgcttcttgaagccaactgcaaatatgggaatcttagtcggaaaacatgtggatgctcaaggcagaatatatttgccctatctccaaaactggagccatcctaaatctgtcattgttggattaattaaagaaatgattgccaagtttcaagaggaacttcccatgtattctctatcatcatctgatgaggcacggcaggtagacttgctagcctatattgcaaaaatcactgaaggtttgtatatttgtcaggcagatt

SEQ ID NO: 51978 - DNA, 446 bp, Homo sapiens
gtcactggcaaaacataattaattcttcatctaattttagtgctcacatggagtggccaagaagaagtagtgagtcatacctctcaagtgcagctgtccaacaggtaacactgactggaaatttgcatttatccaacgaaaaatcatttacttcatagctaacagctatttatacagtatgtacttaaccaggcttctggaaacaaaactaatatggacaaacccaaaagtataaaggagcagtgttttatattctttgatttcttatctgaaggtagatctaagagtgctttgcaagctttttcagataacacagttgacatttaaatggtaaaacatgttatttgtagacagtgatttactgcttctctacctaaacattgagcagagatcgcgccactgcactccagcctgggcgacagagcaagactccgtctcaaaaaaaa

SEQ ID NO: 51979 - DNA, 3111 bp, Homo sapiens
caagtgaatgagccgtgccaaaaagacggttggatcctgcatagtggtgagaggggtgatccattctgcctcatcatttaagctgtctggagtacaagttcagggacctaactgtggaagaactaaggaatgtaaatgtatttttcccacatttcaaatattccatggacacctatgtttttaaagatagttctcagaaagacctgctgaattttactggcacaattcctgtgatgtatcagggtaatacatataacataccaattcgtttctggattttggattctcaccctttcgctccccctatttgcttcttgaagccaactgcaaatatgggaatcttagtcggaaaacatgtggatgctcaaggcagaatatatttgccctatctccaaaactggagccatcctaaatctgtcattgttggattaattaaagaaatgattgccaagtttcaagaggaacttcccatgtattctctatcatcatctgatgaggcacggcaggtagacttgctagcctatattgcaaaaatcactgaaggtgtttcagatacaaattcaaagagctgggcaaatcatgagaataaaacagtcaataaaattactgtggttggaggtggagaactcggtattgcctgcacattagcaatttcagcaaagggtattgcagacaggcttgtcctcttagacctctcagaagggactaaaggagccacgatggaccttgaaatcttcaaccttcctaatgtggagatcagcaaagatttgtctgcctctgctcattccaaggtggtgatcttcacagtcaactctttgggtagttctcagtcgtaccttgatgtggtacagagcaatgtggatatgttcagagcccttgtcccagctctgggacattatagtcaacacagtgtcctgctcgttgcatctcaaccagtggaaatcatgacctatgtaacatggaaactgagtacatttcctgcaaatcgagtgatcggaattggatgtaatctggattcacagagattacagtatattattacaaatgttttgaaggcacagacttcaggcaaagaagtatgggttattggcgagcaaggagaagacaaagtgctcacatggagtggccaagaagaagtagtgagtcatacctctcaagtgcagctgtccaacagggatattatgatataaatagtgaagtgtttttaagtttgccttgcatccttggaaccaatggagtatctgaagttatcaaaaccacactgaaagaagatacagttactgagaaactccaaagcagtgcatcctcaatccacagtctccaacaacagttaaaactttgattctcaaatgcaatttgagaggctggacttctacctaaagggaaaagtcatttaattttacctatatataggtttgaggatttctgtatcctgctacttacttttacaaactgcttggttaaagtagagggtttcttgattagctttgtgatgtaaatccttaaggagttatacaaggaggggaaaaattaattttatttggggttcttgagatatctatgctgttctttaaatctacagcaggggtaaacattcatctgcagtgtgcatcaatttaaatcatatatcctaaactaaaagcacaattcatacttcgggaatattttataagtaatatatctttaaaagaaaattaccctttgacttttataatcaacataagttccaggcccagtatggatttacaaaatctgtgtcagttgtacattcacaggatccacagcttaagttactaatgtttcttgtgtaaaatcctgttggtagtaatagtaaagcattgtatttcccttcttcaaattaattacctaccaaaaaatggaaaagaattttacatgcactttaaaatagtaaaatggaaagtgaatttttaaaatatatgcattaaaagtttactttaatttccagtgggacttcctttatgaaattttccataacctcttcctggagtattacaagatctccaacatctcataaactaattgtgatattagtggaaccataagcaaatgtatatttttagtggaaatagattatgaatgaaagccaagcaccttactttaaagccaaaatatgagattttcattaaaaacattggtcataatagggagaggttttttatttgttctgagcaaatcctttaacctctcctgatgatacagttcagagtacacacactttggtgatggatcaagagcaatattttcttatgtgaaagatagcttattattactattgtgacatacaactaatagtaacagttaacatcaacacttcatatataccaggcagcatgataagcactttattattttactgaatcctcacaacagaccactgaggtagggactattgccatcatcattttataaaaggaaattgaggtttagtcctcaagaagtcttggctattaaggggcacttatccatacaacctctactttttctaggcactaaaagggggaaaaggcttaatagccaaaatagttatcaaaagaccctaaagctggggtcctgtacaccatgaaaggattactttcattctcatgtaagggcatgcttttataaaaaacaaacatgggctaggcgtgagccactgcgcccggccacattcagttcttatcaaagaaataacccagacttaatcttgaatgatacgattatgcccaatattaagtaaaaaatataagaaaaggttatcttaaatagatcttaggcaaaataccagctgatgaaggcatctgatgccttcatctgttcagtcatctccaaaaacagtaaaaataaccactttttgttgggcaatatgaaatttttaaaggagtagaataccaaatgatagaaacagactgcctgaattgagaattttgattttttaaagtgtgtttctttctaaattgctgttccttaatttgattaatttaattcatgtattatgattaaatctgaggcagatgagcttacaagtattgaaataattactaattaatcacaaatgtgaagttatgcatgatgtaaaaaatacaaacattctaattaaaggctttgcaacac

SEQ ID NO: 51980 - DNA, 3369 bp, Homo sapiens
cggattccgggcgcagccgcggctgagcccggggcgttgaatgcgggtggaatttccagtctgggaaggggcggggccttggaccgccgggaagtttggtcctcagcggcttccgtcctgcagcaagtccggaagaaggtccgggggctggagtcctgggacctagctcgggaccggcctggagatggagttcgactgcgagggcctgagacggctgcttggcaagtacaagttcagggacctaactgtggaagaactaaggaatgtaaatgtatttttcccacatttcaaatattccatggacacctatgtttttaaagatagttctcagaaagacctgctgaattttactggcacaattcctgtgatgtatcagggtaatacatataacataccaattcgtttctggattttggattctcaccctttcgctccccctatttgcttcttgaagccaactgcaaatatgggaatcttagtcggaaaacatgtggatgctcaaggcagaatatatttgccctatctccaaaactggagccatcctaaatctgtcattgttggattaattaaagaaatgattgccaagtttcaagaggaacttcccatgtattctctatcatcatctgatgaggcacggcaggtagacttgctagcctatattgcaaaaatcactgaaggtgtttcagatacaaattcaaagagctgggcaaatcatgagaataaaacagtcaataaaattactgtggttggaggtggagaactcggtattgcctgcacattagcaatttcagcaaagggtattgcagacaggcttgtcctcttagacctctcagaagggactaaaggagccacgatggaccttgaaatcttcaaccttcctaatgtggagatcagcaaagatttgtctgcctctgctcattccaaggtggtgatcttcacagtcaactctttgggtagttctcagtcgtaccttgatgtggtacagagcaatgtggatatgttcagagcccttgtcccagctctgggacattatagtcaacacagtgtcctgctcgttgcatctcaaccagtggaaatcatgacctatgtaacatggaaactgagtacatttcctgcaaatcgagtgatcggaattggatgtaatctggattcacagagattacagtatattattacaaatgttttgaaggcacagacttcaggcaaagaagtatgggttattggcgagcaaggagaagacaaagtgctcacatggagtggccaagaagaagtagtgagtcatacctctcaagtgcagctgtccaacagagccatggaactgctaagagtaaaaggtcaaagatcctggtctgttggactatcagtagctgacatggttgacagtattgtaaacaataagaagaaagtgcattctgtatcagctttagcaaagggatattatgatataaatagtgaagtgtttttaagtttgccttgcatccttggaaccaatggagtatctgaagttatcaaaaccacactgaaagaagatacagttactgagaaactccaaagcagtgcatcctcaatccacagtctccaacaacagttaaaactttgattctcaaatgcaatttgagaggctggacttctacctaaagggaaaagtcatttaattttacctatatataggtttgaggatttctgtatcctgctacttacttttacaaactgcttggttaaagtagagggtttcttgattagctttgtgatgtaaatccttaaggagttatacaaggaggggaaaaattaattttatttggggttcttgagatatctatgctgttctttaaatctacagcaggggtaaacattcatctgcagtgtgcatcaatttaaatcatatatcctaaactaaaagcacaattcatacttcgggaatattttataagtaatatatctttaaaagaaaattaccctttgacttttataatcaacataagttccaggcccagtatggatttacaaaatctgtgtcagttgtacattcacaggatccacagcttaagttactaatgtttcttgtgtaaaatcctgttggtagtaatagtaaagcattgtatttcccttcttcaaattaattacctaccaaaaaatggaaaagaattttacatgcactttaaaatagtaaaatggaaagtgaatttttaaaatatatgcattaaaagtttactttaatttccagtgggacttcctttatgaaattttccataacctcttcctggagtattacaagatctccaacatctcataaactaattgtgatattagtggaaccataagcaaatgtatatttttagtggaaatagattatgaatgaaagccaagcaccttactttaaagccaaaatatgagattttcattaaaaacattggtcataatagggagaggttttttatttgttctgagcaaatcctttaacctctcctgatgatacagttcagagtacacacactttggtgatggatcaagagcaatattttcttatgtgaaagatagcttattattactattgtgacatacaactaatagtaacagttaacatcaacacttcatatataccaggcagcatgataagcactttattattttactgaatcctcacaacagaccactgaggtagggactattgccatcatcattttataaaaggaaattgaggtttagtcctcaagaagtcttggctattaaggggcacttatccatacaacctctactttttctaggcactaaaagggggaaaaggcttaatagccaaaatagttatcaaaagaccctaaagctggggtcctgtacaccatgaaaggattactttcattctcatgtaagggcatgcttttataaaaaacaaacatgggctaggcgtgagccactgcgcccggccacattcagttcttatcaaagaaataacccagacttaatcttgaatgatacgattatgcccaatattaagtaaaaaatataagaaaaggttatcttaaatagatcttaggcaaaataccagctgatgaaggcatctgatgccttcatctgttcagtcatctccaaaaacagtaaaaataaccactttttgttgggcaatatgaaatttttaaaggagtagaataccaaatgatagaaacagactgcctgaattgagaattttgattttttaaagtgtgtttctttctaaattgctgttccttaatttgattaatttaattcatgtattatgattaaatctgaggcagatgagcttacaagtattgaaataattactaattaatcacaaatgtgaagttatgcatgatgtaaaaaatacaaacattctaattaaaggctttgcaacac

SEQ ID NO: 51981 - DNA, 1383 bp, Homo sapiens
aagcagtggtatcaagcgcagagtgcccattacggccgggagttaaaggttatgaaaatgaatgatacaggcatcaacaaagaaattttctttggagaagttatataaagagcccagcatttctagtatacaaatggtggactgtgtaagagacttctagaacaatcactgccttacctacatgggatgcacctctgcatttcacatttttactctgttatgcaagatggagacctttgtattccttggaattggaagaatggagaagccattaagtaacacagaaatctgtttatttttttaagagataagaaaggaacttaaattaaaaatatttaaatccacaatttggatataacagtattatttacataagaacaaagtttctaactgctgctttaaaagtagacttttttaaaaaaattaatttctgctagggagaggttttttatttgttctgagcaaatcctttaacctctcctgatgatacagttcagagtacacacactttggtgatggatcaagagcaatattttcttatgtgaaagatagcttattattactattgtgacatacaactaatagtaacagttaacatcaacacttcatatataccaggcagcatgataagcactttattattttactgaatcctcacaacagaccactgaggtagggactattgccatcatcattttataaaaggaaattgaggtttagtcctcaagaagtcttggctattaaggggcacttatccatacaacctctactttttctaggcactaaaagggggaaaaggcttaatagccaaaatagttatcaaaagaccctaaagctggggtcctgtacaccatgaaaggattactttcattctcatgtaagggcatgcttttataaaaaacaaacatgggctaggcgtgagccactgcgcccggccacattcagttcttatcaaagaaataacccagacttaatcttgaatgatacgattatgcccaatattaagtaaaaaatataagaaaaggttatcttaaatagatcttaggcaaaataccagctgatgaaggcatctgatgccttcatctgttcagtcatctccaaaaacagtaaaaataaccactttttgttgggcaatatgaaatttttaaaggagtagaataccaaatgatagaaacagactgcctgaattgagaattttgattttttaaagtgtgtttctttctaaattgctgttccttaatttgattaatttaattcatgtattatgattaaatctgaggcagatgagcttacaagtattgaaataattactaattaatcacaaatgtgaagttatgcatgatgtaaaaaatacaaacattctaattaaaggctttgcaacac

SEQ ID NO: 51982 - DNA, 1062 bp, Homo sapiens
ctggatgatgaatacccttgatacccccctgggggccccaaaaatgaaggcaggtgtcggttcatctggggtaagacccaagggttcattgcctcatgcccaaggaaatgaagacagtgtccgttcatctggggttatacccaagggttcactgcgtcatgccaaggaagtcaaggacacgaacacatgtgaagtgaggttaagagcaatattttcttatgtgaaagatagcttattattactattgtgacatacaactaatagtaacagttaacatcaacacttcatatataccaggcagcatgataagcactttattattttactgaatcctcacaacagaccactgaggtagggactattgccatcatcattttataaaaggaaattgaggtttagtcctcaagaagtcttggctattaaggggcacttatccatacaacctctactttttctaggcactaaaagggggaaaaggcttaatagccaaaatagttatcaaaagaccctaaagctggggtcctgtacaccatgaaaggattactttcattctcatgtaagggcatgcttttataaaaaacaaacatgggctaggcgtgagccactgcgcccggccacattcagttcttatcaaagaaataacccagacttaatcttgaatgatacgattatgcccaatattaagtaaaaaatataagaaaaggttatcttaaatagatcttaggcaaaataccagctgatgaaggcatctgatgccttcatctgttcagtcatctccaaaaacagtaaaaataaccactttttgttgggcaatatgaaatttttaaaggagtagaataccaaatgatagaaacagactgcctgaattgagaattttgattttttaaagtgtgtttctttctaaattgctgttccttaatttgattaatttaattcatgtattatgattaaatctgaggcagatgagcttacaagtattgaaataattactaattaatcacaaatgtgaagttatgcatgatgtaaaaaatacaaacattctaattaaaggctttgcaacac

SEQ ID NO: 51983 - DNA, 567 bp, Homo sapiens
tccgtctcaaaaaaaaaaagttaactgcaattgttcttttgcttacagctttattcttactccatgcttatttttctcttttcagtacaagttcagggacctaactgtggaagaactaaggaatgtaaatgtatttttcccacatttcaaatattccatggacacctatggtaagaatcatatcctctagtttaaatgctgcattatttgaactactaatttttggtcctaaagagctgcaaaattgtaatttctctttttctcttttatcctctgattttcagctatactttatgacctgcaatttctgagaaagcttaaattaatacaatgtatcttgtattagttttctattgctgctgtaacaaactaccacaaacttagtggctttaaaaaacacacgtttactgtgttataattctgtaggcaagaagtccaccacaaatttctatagcttagaaagtaaactagaggtttgacttggctaaaatccaggtgtcaactgcctttgtttctggaggctctgggagataatgtttccttgcctttttcagtttctagaggtca

SEQ ID NO: 51984 - DNA, 413 bp, Homo sapiens
ggcactaaaagggggaaaaggcttaatagccaaaatagttatcaaaagaccctaaagctggggtcctgtacaccatgaaaggattactttcattctcatgtaagggcatgcttttataaaaaacaaacatgggctaggcgcagtgactcacgcctgtaatcccagcaccttgggaggctgaggcgggcagatcacgaggtcaggagattgagatcatcctggctaacatggtgaaaccctgtctctactaaaaatacaaaaagttagccaggcgtggtggcaggtgcctgtagtcccagctactcggaaggctgaggcaagagaatggcgtgaacccggtaggtggagcttgcagtgagcagagatcgcgccactgcactccagcctgggcgacagagcaagactccgtctca

SEQ ID NO: 51985 - DNA, 935 bp, Homo sapiens
gtgctgaggatgaagcattaatctcaatgtgaataaagctagaagtgaacagtgctgtgtagtccttgaggctctgagtggatctggttcctcctgtggtctctgctgagaatgcagcttcctgtgggagatgtcgatcttgtaactgaatgatagagacaatcagataaaaatgatccatgttgtatttgttggatgtgatcttgttctccagtgtgtacttttggtaaaagacatggtaataataggtctgcaggtgacactattcacctgctcttcctaagggatgctgggtcttgaggaaccggcagtagagacactgaactgcttatagactcacatctggtatcatcaggttggacctgggatactgtctggctaactaacacttcctggcccccatgactgcagagttccaggttctacatcagtacccggttctctgaaatatgtactcattggggtctcatgaatatggaattgaaatccattttactgttgtactcacttagagggaacatagcctttgtttccttacttaaccatgtgagccacagagtaagaagaaaaccgtctctttaaaagctgctatttaggtagctgccttcatggcagataaatcttttccacaggtttggaaaatatcaaagatgcatctgtttcataattacatggtggctttctacctaatgaatgcctgtgtaggctgctacgttaagcatacaaagaggataggagaagaaagttacttcgtatttatttttcaggcttttcctgtctgtgttctcacttcgttattgtggggtttctgcagactgagtccctgtggaagagaggttgtgtcctgctcattgtggtacagcagtggcttaagggagaactggagccctgacttcacccccaccccactccctttatttgacctgggattaaaa

SEQ ID NO: 51986 - DNA, 458 bp, Homo sapiens
gatggtcgtaccctgtctgactacaacatccagaaagagtctaccctgcacctagcccaacgtgaaaacagacacatcttgccatgatctctgactggaggaagcgaggaggcggccggccgcactgggagcagcgcgggatttctctttctctctcactctctttcctttcattctagtattcttaattatttatttttctctctctctcgttcgctcgctctctcgtactctctctcttttcctcctttcctttttctttccctttcccctttttctttcccttctttttccctttcctttcctttcattttctttcctttccccttcccttcccttcccttccatctcttcctttcctttccctttcttttcttttgctttcctttcctttttttcccttttctttccttttcataagaggttctaacttctgttgacaaaggaaacacatactc

SEQ ID NO: 51987 - DNA, 1482 bp, Homo sapiens
acattataactagtaggggatcctcaccgaccatggccacagctgcctcgaatccctacagcattctcagttccacctccctagtccatgcggactctgcgggcatgcagcaggggagtcctttccgcaaccctcagaaacttctccaaagtgattacttgcagggagttcccagcaatgggcatcccctcgggcatcactgggtgaccagtctgagcgacgggggcccatggtcctccacactggccaccagccccctggaccagcaggacgtgaagcccgggcgcgaagacctgcaactgggtgcgatcatccatcaccgctcgccacacgtagcccaccactcaccgcacactaaccaccccaacgcctggggggccagcccggcaccgaacccgtctatcacgtcaagcggccaacccctcaacgtgtactcgcagcctggcttcaccgtgagcggcatgctggaacacgggggactcaccccacctccagctgccgcctctgcacagagcctgcacccggtgctccgagagcccccggatcacggcgaactgggctcgcaccattgccaggatcactccgacgaggagacgccaacctctgatgagttggaacagttcgccaaacaattcaaacaaagaagaatcaagttgggcttcacgcaggccgacgtggggttggcgctgggcacactgtatggtaacgtgttctcgcagaccaccatctgcaggttcgaggccttgcagctgagcttcaaaaatatgtgcaagctgaagcccctgctgaacaagtggctggaggaggcggattcgtccacagggagcccgaccagcattgacaagatcgctgcacagggccgcaagcgcaagaagcggacctccatcgaggtgagtgtcaagggcgtactggagacgcatttcctcaagtgtcccaagcctgccgcgcaggagatctcctcgctggcagacagcctccagttggagaaggaagtggtgcgtgtctggttctgtaatcgaagacaaaaagagaaaagaatgactccgccaggggatcagcagccgcatgaggtttattcgcacaccgtgaaaacagacacatcttgccatgatctctgactggaggaagcgaggaggcggccggccgcactgggagcagcgcgggatttctctttctctctcactctctttcctttcattctagtattcttaattatttatttttctctctctctcgttcgctcgctctctcgtactctctctcttttcctcctttcctttttctttccctttcccctttttctttcccttctttttccctttcctttcctttcattttctttcctttccccttcccttcccttcccttccatctcttcctttcctttccctttcttttcttttgctttcctttcctttttttcccttttctttccttttcataagaggttctaacttctgttgacaaaggaaacacatactc

SEQ ID NO: 51988 - DNA, 420 bp, Homo sapiens
aaacgtttggcaactcctggtggatatgattgcctctgacaagagagtgtgagttcctggaggatgcagattacgtggtttatttatcgataaatgggtttttaataatgcaataaattacataaataaatgcgataaatcacatgaatgattaatttttgatagatgtcacctataagtaaaaaaaaaatgaatgagccattgaataaatgaatgtcagaaggcctgagttcagtcctttgtaacttcagagaaattgtggaggctgtattttttcctctgataaaaggagaaggttatctagagctctgttatcattgtgaacattgcaaatgtggctattcctggaaaagagagaatgaagagtgtggtaagcaaagagactgcttcccaacttaaaaagggcaaagaatttgtgag

SEQ ID NO: 51989 - DNA, 267 bp, Homo sapiens
attactgcaggtgctgatagaaagcagagcttaattgtacaaataataacttttttttgttttgacattcacatcacaaagaattctaacaatttcaagttataagtgcttgaaaattatatgttccttttttagtatcaaacttactctttttttctcatttggtgcacatttgtgtgcacattcttgacttgtgctttttaaaatttagtttaaaccttccttggtggtttgttgcttatttttcctggataactgcctccttgt

SEQ ID NO: 51990 - DNA, 588 bp, Homo sapiens
ctcagctggcagccccagggaaatggcctcagttgcagagagccacctcagctgggtaataaacacctggccctctttgattcagggcacttctgaagggtcatataatcttcagaccttctgtaaggttggctgaagcttcctctcagacttcatcacagctcaatgtcatccttctctgaccagttccaccttgccttccctcatgttgatgtcaagagcgttccctagcaaactccccaaatgccaatctccagcttagattctgctttctggggaaactgaactgtgacagttactaatacaaagaatcaatatttttatgtcacattatacttagatagcttgaaatatatatgcatctagttacttaatacattattaaaaaactttttactatatcgaaaattactttttaaacattttagtaactgtatttcaagataattttctgtgttatcctatgccttttattttatgcatcttaaaacatcattctgagaaggagcctataggctttatcactgccaaaggagtccatggcaaaaaaaaaaaaaaaaaaaaaagttggaggagtcaagaacccct

SEQ ID NO: 51991 - DNA, 619 bp, Homo sapiens
ctcagctggcagccccagggaaatggcctcagttgcagagagccacctcagctgggtaataaacacctggccctctttgattcagggcacttctgaagggtcatataatcttcagaccttctgtaaggttggctgaagcttcctctcagacttcatcacagctcaatgtcatccttctctgaccagttccaccttgccttccctcatgttgatgtcaagagcgttccctagcaaactccccaaatgccaatctccagcttagattctgctttctggggaaactgaactgtgacagttactaatacaaagaatcaatatttttatgtcacattatacttagatagcttgaaatatatatgctcatccccacctcaatatttcagccttctgcatctagttacttaatacattattaaaaaactttttactatatcgaaaattactttttaaacattttagtaactgtatttcaagataattttctgtgttatcctatgccttttattttatgcatcttaaaacatcattctgagaaggagcctataggctttatcactgccaaaggagtccatggcaaaaaaaaaaaaaaaaaaaaaagttggaggagtcaagaacccct

SEQ ID NO: 51992 - DNA, 975 bp, Homo sapiens
gtagaatcccaaaatgaatactagaataacaatgttctttctcaaagtactacgtgttatgaatgaaaaaaaaaatgattagaacatagttcagattttgccagccagacaaaggcatttgtgctgtaatctgaggtatgccttcctgcactaagaggaacagggtttatgggaaaactaggattaggagcagaccatttgaaatctgtgcatctttgtaatttaagcactaatgtaaacctaataaaaagatagtagtgtgcttaaagataagttaaaatttttaaacaaataatttggtaaatttagaactttccctttaaaaacagtaaaggtgaccagaagtggtggcactactcagggctagctgtatttaactgttgttacctgcaaatgcaaaaactaaataacattttaggaaaaattggaaatgaaccaatgtgatttctgaatgtactgacataattcccttatttactgattgcatatgagctaatgtatgtgttgtagtagaatagttccagtagttctttaccttttctgtgcttatcatgcctccttcctttctactgttaatgttcaagttttaatcttccagacttctcatttgttctgtaacagtatcttctagccacgtgtgcccttctaatctctcttgtggaatttgttcttcacaatactacaagaattctattgcattgaaaaccccaaatcttattaagccagcctccatcattagagcatgtttctcaaactcttggtgtgtgcaaatcattcttattctgtgatttctattttcatgctttttcagtttgcttcatttgccatatgatagaggttttcttcagaccatattttggaaagtatgctcttagttttaaattctactatgggttatttccaagacccatagtagaatttaacaaattctttcaaataaaaaattttaaagccttcgcttattatcaactagcc

SEQ ID NO: 51993 - DNA, 319 bp, Homo sapiens
cgaatgtggaatgtggaggttacacagcgatgcctagactgtctgtccttagaccgaagggcagcagaaaggctcagggggcttgctctatattccttagacatctccggagattttctcagcatcagaatcagatcctcccatggcctgcggctacttttaagaaagtttggcaaccttttggatatgtcctcttctcttttttgactttccaggctgtaaaccttcagaagcttccacatgtggtgccagtgggctcctggtggtgaaggaaggtggcagtgtggtttagtggaaaagaatatctgctctggagttg

SEQ ID NO: 51994 - DNA, 306 bp, Homo sapiens
gaggtttagtagatttcattagagtcttcatctgttatcggaggggaagttggttttcccacttatgcttgggcatgacacataatgtgtaaataaccatgatagaggatcatgggcagagagcattggatgaacattaataggattcatcaaatcaaggagggtcagaggccccattttacaaggtgtgataggaaagcagtgtggggtcttgtttttcagtttttgaggtgaaggaaggttgtaaccatggccttctaagtctgaaagtgtattcattggcctgggcttcgtgagacttttttt

SEQ ID NO: 51995 - DNA, 350 bp, Homo sapiens
tgataaaagagagggcttgaatcagcagtggaagttgtccactccaacaagaaatggcacatgcctcgaggcagaggatgaacagatggcatgtaacttggactatcagcctgttgaggcagctgccctcacgcaggtcctcagatcctcatacagggaaaaggggatttgcattatggctccaggaagtaagagaaatgggattgctctcctaggtagaattttgatacataaacaagaaaataaggagaatgtttttctgttattgctctctcttgtgcttactcatttttcagaagcagtcagtttatgtggaaagatttgacaattcaataaattcagcaaacttt

SEQ ID NO: 51996 - DNA, 872 bp, Homo sapiens
  misc_feature (14)..(14): n is a, c, g, or t
  misc_feature (26)..(26): n is a, c, g, or t
cttgaacacttttnctgatgaacttnacttctgccttcaaagcgattttaacgagaggaggtgcggaagacctacttaaaacctgagagtctcgaataggagaggcgctttcagatcagcccgagtcttctgcagcgcacaggagctagtcgtactgaaaagaatgaagttggacttgtccaggcgagtttcggacagtgctgggctgccctgctctgatctcctgggtgtcttcacctcctctggttcctaagtcggctgctgcaccagcacccatcaaactctcctggaagaggaagtgacagctcaccggtagcctagaaggcccctgtgggcagaagcatggacttactcctcctcatggagatgcggctgagccatatttccttggcacctctctggaaccttcgacaaccaccacctcagacactaaccagactttaggtccattcctttcatggctaaaatgagacagtccacaatgttgattttatttgtaggggatgtcaggattccagaaaagcagacttggaaagcaacaaaacgttaacttgcagctcactgaggcccttacacttgttctgggcacctctgtatgttaaaagaagtccaatatctttagctgctggttataggtggccatatgtttctgcacagaaatggggctccccttgctagactaattttctaatttttcctcaagcttcattgattcatattcttctacttgaccctgactgtcaggaccaacaacaccaaataacaccaaagtctcttgctcctgtcctcagaacctctcagaggcatcctctgccctgttggagccattttatttcaggttgatccttaattaaattcagcgagatgcagga

SEQ ID NO: 51997 - DNA, 316 bp, Homo sapiens
cccctactatccattagcatcccagaaattgaataattgatagggtcattaaaaataaatgtcagcgggtagctgggttttaagagattttccccatttttctcattcacgagccactctttgacaacagcgcaggtaagtgatgggaagcgaggtctcctcagagctccaggtggcgttttcagccgctccgtcctacctcggcggcgtcaggcctgaagatggattgttattctgtgtggcccaggcctgtggcgagcccaggaggcagctctatcagccgcgtccagcggtgatcacaggacgggtgggatgg

SEQ ID NO: 51998 - DNA, 655 bp, Homo sapiens
  misc_feature (482)..(482): n is a, c, g, or t
ttcagggatagttgctgttctcttctgtggagtcacacaagcacattatacctacaacaatctgtcttcggattccaaaataagaactaaacagttgtttgaatttatgaactttttgggcggagaacgtcatcttctgttacatgggcctggcactgttcacgttccagaatcatatctttaatgctctttttatacttggagcctttctagcaattttggttgccagagcctgcaacatatatcccctctccttcctcctgaatctaggccgaaaacagaagatcccctggaactttcagcacatgatgatgttttcaggtttgcgaggagcgatcgcatttgccttagctattcggaacacagaatctcagcccaaacaaatgatgtttaccactacgctgctcctcgtgttcttcactgtctgggtatttggaggaggaacaacccccatgttgacttggcttcagatcagagttggngtggacctggatgaacatctgaaggaggacccctcctcacaaaaccaggaagcacataacttggctcaaaacatgacgaaagccgagagtgctcggatcctcagaatgtggtatagctttgaccacaagtatctgaaaccaatttaacccattcggtcctcgatgactacact

SEQ ID NO: 51999 - DNA, 754 bp, Homo sapiens
ttcagggatagttgctgttctcttctgtggagtcacacaagcacattatacctacaacaatctgtcttcggattccaaaataagaactaaacagttgtttgaatttatgaactttttgggcggagaacgtcatcttctgttacatgggcctggcactgttcacgttccagaatcatatctttaatgctctttttatacttggagcctttctagcaattttggttgccagagcctgcaacatatatcccctctccttcctcctgaatctaggccgaaaacagaagatcccctggaactttcagcacatgatgatgttttcaggtttgcgaggagcgatcgcatttgccttagctattcggaacacagaatctcagcccaaacaaatgatgtttaccactacgctgctcctcgtgttcttcactgtctgggtatttggaggaggaacaacccccatgttgacttggcttcagatcagactcttctccaaaaacaccacgaagtaagtaaattggagctttaataaaatcacacaaatggagaaacccaagagacacgaagacaaacgtgatattgaatgaacccaaacaccctcaattggaatgtgatttgtttatctactttacgtggccttcccttcttgagtctatatttttttctctgaaattatttgatatgtacttgaattagtttttttaatccccataaaatttgccatccagctgcaaactaccacagtaggatgcaaagaaaatgt

SEQ ID NO: 52000 - DNA, 479 bp, Homo sapiens
aagacaattttctcctggaagggagattttaataagctgtaagattcaggtggtgactcaagagaccgtggtttagcccccacctgccagtcccctcccagccgtccagccctgctgcctcttcccgggccttcttcccctgccacctccacctgcctgcagatctcagcatctgctggccgccctgggctcaggaagtcagcctgttggagtgactcgccagtagtcggacccgagagtgggagagatgggacctggggaggcctctggggctgttgcatccagaaactgctgctctctcatcttccctctcaggccagtgagtgaggtgtgcacacctctcagtcgtccacatggccacgagtgttttcagggctcctaagcgctggcaaagaccgcagctgcccctctggatccatcacattccagcaatgttcctgcctggcctccgatggccctgtctgggaatccaggtgcac

SEQ ID NO: 52001 - DNA, 485 bp, Homo sapiens
gaactagtgagtagtagaggtggaatttgagtctggatgtggctgattccagaatccaagcatttgggccctctacttgttagtcttcaatgatgttgcttatgccatatcctatttcttggtattggtttgtgcatttgttaaagaagattagcatagaataatgggtctcactgtgtgactttgttcccccacaacatgtgacaatgtctacagacatttttggttgtcacaacatgggaggaggtgtgtgcatgctgctggcatctagagggtagaggcagggatgctactagatattccataacacacaagtcagtctcctgacaaagaagtattcagcctcaaatgtcagtagtgctaagtgccaccagtagacaccccagtgtagaccatctgaaacctcttccaaccttgaaagttcatggcactcttccagagctcccccgtcagtgacatcagtgttaagtgcaggaaggtgtctc

SEQ ID NO: 52002 - DNA, 296 bp, Homo sapiens
gtttcaccatgttggccaggctggtctcgaactcctgaccttgggtgatccacctgcctctgcctcccaaagcgctgggattacaggcaaatatcacttttatttttgattgggctgacacttgaaaggttaagggactcacccagatcacacaggagagctgtgaacccaggtctgggtgacccgctcctaaccatggaccatggcccatcctgcagcatccccggctcatgctacccttcagggcagtgagtgcagagaggctgaggagaggcctggaaggttgagtgacatgt

SEQ ID NO: 52003 - DNA, 416 bp, Homo sapiens
ctgggctggctcatgcattctgtgggcaggtgctgagtcagatgggtacaggataggctagggcagcccctgctgggatgtcattgtggtttcttgttcttcatcaggctagcctgggcttcttcacattgtaggttgcagcaaaaggaagcgtgcaaatcctgttgatgtctaggctgaaactgaaacaatgtcactcctgatccattctatttgtcccagaaaatcacaaggttagcccagattcaaatatactctatctctggatgaaaggagccacaaggctgcattgcagatgaacttatacacagtgaagtgaataatggcaaccatttttgcaaatatttggctacactttctatgtctgtgagtttgatgtgtcaacttgggtaggctgttgcacccagctatttaat

SEQ ID NO: 52004 - DNA, 306 bp, Homo sapiens
aggcagtgttgaaagtaaggaagattggaacctgtctcagtaagaagctgagaggcttagagaaagttcctcaacacagcaaaacccaacattttaaaaacagaagcagaaacagttttataaaggcattgccacccccaccattgcacacaggctttgtttgttgttgtcagtaacattataagcactccatctttgggccttagttaatgctactactccaggttcctgcgttacccaagaaagttcctcccaaattgggagctgtaaccatctgttgatactcaaggctctccgaacagctat

SEQ ID NO: 52005 - DNA, 481 bp, Homo sapiens
gagcctgtgtcctggtctgaaattgagttccttcctcagggacctgaactcagtcagggatgtggtcattgagggacccctatcaggggcagtggttgtggaaggaggaaccctccttgagctgaggactccgctgtcccacatggtagtgtttctctccagaatgtcgggggagaggagcccaaattctagtccagaattctgtgaaattgagcagatgagaactcccaccattgaggtagatcctatccagaccatgcaccttccacccaagggacaatgaaatgcatgggtcccacgggtcagcaaacatctgttgggtgcctgcctgcaggggaatggatctggctcagggcatcagagacagcggggaccaagtggacccagacctgctctcatggggtcacagaaaataaggaaacataacaaggacaaggcatggtggttcacacctgcaatcccagccctttgggaggcagag

SEQ ID NO: 52006 - DNA, 337 bp, Homo sapiens
cagcacctggcctataaggtatctttaaacagaaacacacataaacaaaggttatgcattgatctgccaggcagaaggtggggttagaaaaagatgtttctggcagaaaggtcagcatgtacagagatagccaagagcttggcaaggccaggggactcaaggagagccagtgggcagggagtgtggtggtgaaagggagagaggctggggccaggcggctcagtgtcttgtgggcagctctcatttcatccgattagcacggtaatcctggcaggttggacaggatcatttccgcctttgagagatgatgaaattgacgttccatgctgttaaatga

SEQ ID NO: 52007 - DNA, 2004 bp, Homo sapiens
aaaaaaaaaaagtttcaggtgtattcaggagtggtcatattaagcttgtcacctgatcctggttatgaggttaacagcaaaatgaaataaaatatttttctgagccatttgtttctcctctcatggaagacactaattctgtttatttctatattcggccttgtgttgaaacagactgtaaaatcatgttttaaaaaagcttcacccatccttgtggagggtggtggtttgcaaaagcaccaccccacttaagcatttatattgagaagatatttatggcattcttccattcatgaaaatgggtatgctttgttctggagttcttaccttgatttatctactaacactaaagttcctcacttccaatttcttatacctctaacccaacagcttataaactgcatgtagtatagtatttgcttgaaatatgtgaaagtagttattttccctaactaatagggatatttctgtggtggttgtagttactttgcaacctgttcagcaaatattatagggcgtttttgatggtatctttaaattttggacatagagaaccatcttggataacctctttccccccagtctcagtcatccctttggaggtagtgtctcatttttaatctgtgacttgtggaagttaaggcatttgagtagcttatttaaagtattaataatctgatttctggagatctgaggaatagcagacacccttttctgtattaaattggggaaatttattttataggcaaaaagatgaataaaatggtcctagtagacagcccctaatatttctggtctcgggtaaaggtcttaaggaagagggaaggtagtatcagaattttccaggtgtttttttttgttgtttgtttgtttgtttgttttgggtggacaggaagtagaatttattggtgagtattaagagggggcagcacagtggaagccctcatgagtgcagggcccgccacttgtccacagggccacgattggaaatgtacttgacccgacagccatctgggatgagccgcttctcagtcaccatgtcttcaaactcattggcattgaacttggtgaagccccacttctttgagatgtggatcttctggcggccagaaaacttgaacttggccctgcgcagggcctcaatcacatgctccttgttctgcagcttggtgtgaatggagatgataacttggccagtgtgaaccctggccacagtgccctggggcttcccaaaggcacctcgcatgcctgtttggaacctacactggggtagtgcaaggtcagaaacatgaacatccatctgaaaggactgtctccagggtcccttagagcaacccatacaatacaacacacaggctgcatacactaccaaggaagctgctgtttgcagccattgcacactgggcccccccatgaggaaaggaactcagttggcttaataggctgcagcagggtgttttttaaaacacacaaatatacccaatccctactagaatgagagattttactaataatagtgttaggagtataaatggtttggtagccaaccactactttaaaattgattaggtctcccgggcttctgggccttcacatttaaatttgacctgaccttgaaacttcacctctcgttattcccagcgtgacttttgttttacccacttttcgaaataccccatgtgtagctccttacttcacgtcatgctggaatgtgacccataccagccaaactacatctaacagaaacataatacctaactaaaagcgtcttttatcatatagatagatgtacagggtatgttaatttatctttagagagactccccagtatactgaaaaaacagacctaagttttggtagatagccttgctttatagaaaatgaaaatgggccagacagtggtgactcattcctgaaatcccaacactttgggaggccaaggcaggaggatcacttttgaggccaggagtttgagaccagcctgggcaacatagcaagaccctg

SEQ ID NO: 52008 - DNA, 928 bp, Homo sapiens
atctagagatagtaaatggtagaagttcaatgaagctatatgaccctgagttagttcaaaaccttgttctgccactagctatataaccctgggtaggttaacttactactctaatctcagtttgcaacctgcgaataggcctgatagtgaatagtatcagcctcataggcagttttgagcattaagtacgttcatatctgtgaattgcttggctctttctgtgtcttgcccataagttcttagaaaacatgaaagcatattgcttttattcccaagttactaaggtgtatgtcagaaacatttttcctatatatgattattttcaactttttaggttttaggcagatttagttataaatactgttttaaggtcaagtttcctgggaaacaggctacgaggcagagatttgcagttgaagtttattatggagtgtaatttggatcaacagtagtagcagagagtgaaagaatcaggaaccagcagaaggagagcctgagctgtcacaatatctcacaatcccttgatctgatgggttggaatggctcttaaggttgtcccagtttagacagaggggatcaggtctttttacacccctcacattgatgagtccttgaatgcaagatgcagctctggatgggaaggggaataatcttgggccaggtggctcttttgggctgagggtgctgcccagatggtgactcatctggcagctgacattcaccaaaacgatcaagagctggaagagtgagtgtccagtcccaaacagggcacctagtgatgcaccagtgtaccatcacatgtgcatatataatattatttgcattcattatgaatgtctcgatttgttttgtaatagatctcccaggctcagattgagaaaaacataaaacaatttttattacaataccaaaattaactggctaatta

SEQ ID NO: 52009 - DNA, 465 bp, Homo sapiens
cagctaggctgcccttagtccccagcaagagggtcccttcccaaccccacgttagagggctctgcatattccaaacacacacaaataactgaactgaagaattcatggttgcctctgtgtcttgagttcctgcatcaggtctgcacagcatgggctgtgaccctaaacttctgctcttctggttaacacagaatgggccccaggaaagtgctctgacatacctcttggcctgtatcctcaaaacaaaagacaactgcatctgagtgccattaagtgttttgggttgtgttgctgctgatgttgggggtggattctgctttgatgtgctgagaggatctgaaggtagaagcacttagacacaaaagaggacaaaatggattaacttgttcaatcttttctcccagacagcatgtgtttcagtagatttttgaataagggaagtataatttcccagaagggcataag

SEQ ID NO: 52010 - DNA, 472 bp, Homo sapiens
ctcccaaaaaaactgtcatgtttcatttattagatgtttattttttcaacttcgctttttagtagtcatttagttaggttcattctaaagtgtgaagtaatgagatttaatacagagaagtctctgaaaatgtttggtccattgtatattagtcttgaataaatggaattctttttcacacttacccttgaaaatgtcatctgtagaaagctgggggagaggaatacctattctttaatgatggggaaataataccaaaatttatatttttattgactaaagtgttttttggggaagatttgttattggctaaccttaatgtctcattagttttaaatagttaaaaaaagtgggctgggtgcggtggctcacgcttgtaatatagcactttgggaggctgaggtgggcagattgaacccaggagttccagaccagcctgggcaacatgatgagatcctgtctctacaaaaaa

SEQ ID NO: 52011 - DNA, 1452 bp, Homo sapiens
atagtggcaggtgcctgtagtctcagctacttgggagactgaggcaggagaatcacttgaacctgggaggcagaggtttcggtgagccgagatggcgccactgcactccagcctgggcgacagactgagacacggtctcaaaaaaaaaaaaaaaaaaaaaaagaggaagaagattcttcccttaccctgcaatagtagaccagaaaaattaggaatatcttgaatttgaaagggacctaatgcctggcacagtggctcacgcatgtaatctcagaactctgggaggcagaggtgggcggatcgcctgaactcaggatttgagaccagcctggccaacatggtgaaaccctgtctctaaaaaaaaaaaaaaaattagccaggcgtgatggcatgcacttgtggtcccagctactcaggaagctgaggtcagaggatcacctgaacctgggaagcagaggttgcagtgaactgagatcacgccactgtactggctgacaaagtgagacccctgtctaaaaaaaagataaagagagttacctgaatctggaatccttaatcttgggttttccttaaactttctataagtccagcatctgaaatattttgtcaattatcacattaatgtgttcattttgtaagtaagagtactcaatttaaaatgatcttactttaaaagtggcctagtttgcagtgcccagcaggacactgacagtcacagctgtgtgactttttgtgggttacttaatttttttgagcctccttttctcttctattcaatgaggataatagggcctacctcataggattattatgcattcccctctgttaatgcacgtaaagtttttacttggaaaactaactcaccatttaacaaccattctaagcaccatagaatatattttgtttcacaaatttggtattcattcagaataagtatttgaaaagtgagtaaattctatgcaattatagttattaaatgacttataaactgtgtttctcttccacttcttgctacatttaatcttctaggtgttcagatatctttggagattataggcagcaataaagctaaggcagctaacctttcaacattcttgtgtcaggctaatattttggtgaaaggaattcttgtgtttctcaaagaactagagctgaagcagaaataagttccaatgagcaagtgtccaattggaccattgaatgaaatctagtgttttaaacaattctgatgtttcaatgttttgttctgttttcttttgatcttgtgagcagtaagacatattttatgtgggtggtaaaggaagaaatcaagtaacagaatgaggaattgttcccaggaagagttagagttgggacaaatgggttgttaactttgatttttagatcttctctgaagacattaaacatggaatggtcatctttagaaaaataaaagactatgcaactccacca

SEQ ID NO: 52012 - DNA, 3377 bp, Homo sapiens
ggcccctggccctaaactctgggactggcgggcggtcaggcggcacagggggaatcccgggggcctaaggaggttgtcccagtttttgtcagcatctccaccccgaggtggtttgaactttgagccttttgtagtcctgatgaataatttcattttcctcaagtttatgacactcggaacgtcaagaactggaggtttgtgcaatttgagaccggtcggcactgtgcagagatcagagtactaagagacagagattaaaatggcttccagaggaaagacagagacaagcaaattaaagcagaatttagaagaacagttggatagactcatgcaacaattacaagatctggaggaatgcagagaggaacttgatacagatgaatatgaagaaaccaaaaaggaaactctggagcaactaagtgaatttaatgattcactaaagaaaattatgtctggaaatatgactttggtagatgaactaagtggaatgcagctggctattcaggcagctatcagccaggcctttaaaaccccagaggtcatcagattgtttgcaaagaaacaaccaggtcagcttcggacaaggttagcagagatggatagagatctgatggtaggaaagctggaaagagacctgtacactcaacagaaagtggagatactaacagctcttaggaaacttggagagaagctgactgcagatgatgaggccttcttgtcagcaaatgcaggtgctatactcagccagtttgagaaagtctctacagaccttggctctggagacaaaattcttgctctggcaagttttgaggttgaaaaaacaaaaaaatgacatggtgcagaagcttgtaacattgatcacattcttaatgtaaatggtgtctttcttctggggttttcagttattgcaaagaaatgaagagattctggaaatgcatcaataacctaagaaaaagcgacataaaaatatacttatggcttgtgtttatgctcttcatcattgtgcgttgtgtgcggttacctgcttgagtgatcctgaacttgttgcgacagagggactcactggactctgttcgttatgatttgtctgtttaagagagaaaacaaagtggacttgatttttattaaggctgtttgtttttaagtgttgatagtgaacgaaaagatgtgaagtaatgatatttttctgcttacaacttatccccactcattggagtgaacagtgacgcaagctcaatagacttcataagtgttcatagaattttacaattctgagtgatcttagaaatcatttctgtttttacaaacaaggaaactgaggtccagaaagagcaagcgactttgcttaaagtcgcatcagagagctgagggtaagactcaggtgtcctgactcccagtttagtatcttttgaattttatttctgtaccatttaaaaaaaataattaacactatttgtgcaagtcagtgtttttgaaaattcagtgtcccaataaaaagtggactgcacactaagggaccatcccccagcctgtaagctgtctgtattaatggggcccgttgtatctcggaattttgaggttggaacaatgggagccctgttgagcgtttcctaaagtgacttagccgcctgcgttgtttgaccagggaagcaacaggaaatggcagctagaggccctccctgtgcgtgacctcttgtcacactcagaggggggtaactgtcagctgttatctactcttcaggttttggagaaacacaaaataagttatgaggaaaagcaaatttctctcctgagtatttacatgtctctgtatgctcaaatatgcagatgtgtccctatgcgtgtatattagcttattttttaggctctagccattttatattctttcatgtgcttctcaatattctttttctttgcactttatacaaattaaaagcatttttaaagcttcttctgtactgtaaactactaggtgctttgccaaccagacagattagaggacctccgctacactgatgccttatttggaacttaaaagaggtgaaattcatatatcataaaattcaccattttaaagtgtaccattcgttggcagaacatttacagtggtgtgcaaccatcactactctctagttgcagaacattcttatcacccccaaaggaggccctatacctattaagcagttagtccccattcccttctcctccgactgctaacaatagccactaatctgcaccctgtctctgtggatttacctattctggatatttcatataaatggaatcatatgatatgtgacctttttatgtatctggcttacttgtggtcccagctactcaggaagctgaggtcagaggatcacctgaacctgggaagcagaggttgcagtgaactgagatcacgccactgtactggctgacaaagtgagacccctgtctaaaaaaaagataaagagagttacctgaatctggaatccttaatcttgggttttccttaaactttctataagtccagcatctgaaatattttgtcaattatcacattaatgtgttcattttgtaagtaagagtactcaatttaaaatgatcttactttaaaagtggcctagtttgcagtgcccagcaggacactgacagtcacagctgtgtgactttttgtgggttacttaatttttttgagcctccttttctcttctattcaatgaggataatagggcctacctcataggattattatgcattcccctctgttaatgcacgtaaagtttttacttggaaaactaactcaccatttaacaaccattctaagcaccatagaatatattttgtttcacaaatttggtattcattcagaataagtatttgaaaagtgagtaaattctatgcaattatagttattaaatgacttataaactgtgtttctcttccacttcttgctacatttaatcttctaggtgttcagatatctttggagattataggcagcaataaagctaaggcagctaacctttcaacattcttgtgtcaggctaatattttggtgaaaggaattcttgtgtttctcaaagaactagagctgaagcagaaataagttccaatgagcaagtgtccaattggaccattgaatgaaatctagtgttttaaacaattctgatgtttcaatgttttgttctgttttcttttgatcttgtgagcagtaagacatattttatgtgggtggtaaaggaagaaatcaagtaacagaatgaggaattgttcccaggaagagttagagttgggacaaatgggttgttaactttgatttttagatcttctctgaagacattaaacatggaatggtcatctttagaaaaataaaagactatgcaactccacca

SEQ ID NO: 52013 - DNA, 3344 bp, Homo sapiens
agtgcgtgcgtccagcggaagtgctcccccggcgcggtccgccaggccagtgccctcagcatctccaccccgaggtggtttgaactttgagccttttgtagtcctgatgaataatttcattttcctcaagtttatgacactcggaacgtcaagaactggaggtttgtgcaatttgagaccggtcggcactgtgcagagatcagagtactaagagacagagattaaaatggcttccagaggaaagacagagacaagcaaattaaagcagaatttagaagaacagttggatagactcatgcaacaattacaagatctggaggaatgcagagaggaacttgatacagatgaatatgaagaaaccaaaaaggaaactctggagcaactaagtgaatttaatgattcactaaagaaaattatgtctggaaatatgactttggtagatgaactaagtggaatgcagctggctattcaggcagctatcagccaggcctttaaaaccccagaggtcatcagattgtttgcaaagaaacaaccaggtcagcttcggacaaggttagcagagatggatagagatctgatggtaggaaagctggaaagagacctgtacactcaacagaaagtggagatactaacagctcttaggaaacttggagagaagctgactgcagatgatgaggccttcttgtcagcaaatgcaggtgctatactcagccagtttgagaaagtctctacagaccttggctctggagacaaaattcttgctctggcaagttttgaggttgaaaaaacaaaaaaatgacatggtgcagaagcttgtaacattgatcacattcttaatgtaaatggtgtctttcttctggggttttcagttattgcaaagaaatgaagagattctggaaatgcatcaataacctaagaaaaagcgacataaaaatatacttatggcttgtgtttatgctcttcatcattgtgcgttgtgtgcggttacctgcttgagtgatcctgaacttgttgcgacagagggactcactggactctgttcgttatgatttgtctgtttaagagagaaaacaaagtggacttgatttttattaaggctgtttgtttttaagtgttgatagtgaacgaaaagatgtgaagtaatgatatttttctgcttacaacttatccccactcattggagtgaacagtgacgcaagctcaatagacttcataagtgttcatagaattttacaattctgagtgatcttagaaatcatttctgtttttacaaacaaggaaactgaggtccagaaagagcaagcgactttgcttaaagtcgcatcagagagctgagggtaagactcaggtgtcctgactcccagtttagtatcttttgaattttatttctgtaccatttaaaaaaaataattaacactatttgtgcaagtcagtgtttttgaaaattcagtgtcccaataaaaagtggactgcacactaagggaccatcccccagcctgtaagctgtctgtattaatggggcccgttgtatctcggaattttgaggttggaacaatgggagccctgttgagcgtttcctaaagtgacttagccgcctgcgttgtttgaccagggaagcaacaggaaatggcagctagaggccctccctgtgcgtgacctcttgtcacactcagaggggggtaactgtcagctgttatctactcttcaggttttggagaaacacaaaataagttatgaggaaaagcaaatttctctcctgagtatttacatgtctctgtatgctcaaatatgcagatgtgtccctatgcgtgtatattagcttattttttaggctctagccattttatattctttcatgtgcttctcaatattctttttctttgcactttatacaaattaaaagcatttttaaagcttcttctgtactgtaaactactaggtgctttgccaaccagacagattagaggacctccgctacactgatgccttatttggaacttaaaagaggtgaaattcatatatcataaaattcaccattttaaagtgtaccattcgttggcagaacatttacagtggtgtgcaaccatcactactctctagttgcagaacattcttatcacccccaaaggaggccctatacctattaagcagttagtccccattcccttctcctccgactgctaacaatagccactaatctgcaccctgtctctgtggatttacctattctggatatttcatataaatggaatcatatgatatgtgacctttttatgtatctggcttacttgtggtcccagctactcaggaagctgaggtcagaggatcacctgaacctgggaagcagaggttgcagtgaactgagatcacgccactgtactggctgacaaagtgagacccctgtctaaaaaaaagataaagagagttacctgaatctggaatccttaatcttgggttttccttaaactttctataagtccagcatctgaaatattttgtcaattatcacattaatgtgttcattttgtaagtaagagtactcaatttaaaatgatcttactttaaaagtggcctagtttgcagtgcccagcaggacactgacagtcacagctgtgtgactttttgtgggttacttaatttttttgagcctccttttctcttctattcaatgaggataatagggcctacctcataggattattatgcattcccctctgttaatgcacgtaaagtttttacttggaaaactaactcaccatttaacaaccattctaagcaccatagaatatattttgtttcacaaatttggtattcattcagaataagtatttgaaaagtgagtaaattctatgcaattatagttattaaatgacttataaactgtgtttctcttccacttcttgctacatttaatcttctaggtgttcagatatctttggagattataggcagcaataaagctaaggcagctaacctttcaacattcttgtgtcaggctaatattttggtgaaaggaattcttgtgtttctcaaagaactagagctgaagcagaaataagttccaatgagcaagtgtccaattggaccattgaatgaaatctagtgttttaaacaattctgatgtttcaatgttttgttctgttttcttttgatcttgtgagcagtaagacatattttatgtgggtggtaaaggaagaaatcaagtaacagaatgaggaattgttcccaggaagagttagagttgggacaaatgggttgttaactttgatttttagatcttctctgaagacattaaacatggaatggtcatctttagaaaaataaaagactatgcaactccacca

SEQ ID NO: 52014 - DNA, 3472 bp, Homo sapiens
ggcccctggccctaaactctgggactggcgggcggtcaggcggcacagggggaatcccgggggcctaaggaggttgtcccagtttttgtcagcatctccaccccgaggtggtttgaactttgagccttttgtagtcctgatgaataatttcattttcctcaagtttatgacactcggaacgtcaagaactggaggtttgtgcaatttgagaccggtcggcactgtgcagagatcagagtactaagagacagagattaaaatggcttccagaggaaagacagagacaagcaaattaaagcagaatttagaagaacagttggatagactcatgcaacaattacaagatctggaggaatgcagagaggaacttgatacagatgaatatgaagaaaccaaaaaggaaactctggagcaactaagtgaatttaatgattcactaaagaaaattatgtctggaaatatgactttggtagatgaactaagtggaatgcagctggctattcaggcagctatcagccaggcctttaaaaccccagaggtcatcagattgtttgcaaagaaacaaccaggtcagcttcggacaaggttagcagagatggatagagatctgatggtaggaaagctggaaagagacctgtacactcaacagaaagtggagatactaacagctcttaggaaacttggagagaagctgactgcagatgatgaggccttcttgtcagcaaatgcaggtgctatactcagccagtttgagaaagtctctacagaccttggctctggagacaaaattcttgctctggcaagttttgaggttgaaaaaacaaaaaaatgacatggtgcagaagcttgtaacattgatcacattcttaatgtaaatggtgtctttcttctggggttttcagttattgcaaagaaatgaagagattctggaaatgcatcaataacctaagaaaaagcgacataaaaatatacttatggcttgtgtttatgctcttcatcattgtgcgttgtgtgcggttacctgcttgagtgatcctgaacttgttgcgacagagggactcactggactctgttcgttatgatttgtctgtttaagagagaaaacaaagtggacttgatttttattaaggctgtttgtttttaagtgttgatagtgaacgaaaagatgtgaagtaatgatatttttctgcttacaacttatccccactcattggagtgaacagtgacgcaagctcaatagacttcataagtgttcatagaattttacaattctgagtgatcttagaaatcatttctgtttttacaaacaaggaaactgaggtccagaaagagcaagcgactttgcttaaagtcgcatcagagagctgagggtaagactcaggtgtcctgactcccagtttagtatcttttgaattttatttctgtaccatttaaaaaaaataattaacactatttgtgcaagtcagtgtttttgaaaattcagtgtcccaataaaaagtggactgcacactaagggaccatcccccagcctgtaagctgtctgtattaatggggcccgttgtatctcggaattttgaggttggaacaatgggagccctgttgagcgtttcctaaagtgacttagccgcctgcgttgtttgaccagggaagcaacaggaaatggcagctagaggccctccctgtgcgtgacctcttgtcacactcagaggggggtaactgtcagctgttatctactcttcaggttttggagaaacacaaaataagttatgaggaaaagcaaatttctctcctgagtatttacatgtctctgtatgctcaaatatgcagatgtgtccctatgcgtgtatattagcttattttttaggctctagccattttatattctttcatgtgcttctcaatattctttttctttgcactttatacaaattaaaagcatttttaaagcttcttctgtactgtaaactactaggtgctttgccaaccagacagattagaggacctccgctacactgatgccttatttggaacttaaaagaggtgaaattcatatatcataaaattcaccattttaaagtgtaccattcgttggcagaacatttacagtggtgtgcaaccatcactactctctagttgcagaacattcttatcacccccaaaggaggccctatacctattaagcagttagtccccattcccttctcctccgactgctaacaatagccactaatctgcaccctgtctctgtggatttacctattctggatatttcatataaatggaatcatatgatatgtgacctttttatgtatctggcttacttgtggtcccagctactcaggaagctgaggtcagaggatcacctgaacctgggaagcagaggttgcagtgaactgagatcacgccactgtactggctgacaaagtgagacccctgtctaaaaaaaagataaagagagttacctgaatctggaatccttaatcttgggttttccttaaactttctataagtccagcatctgaaatattttgtcaattatcacattaatgtgttcattttgtaagtaagagtactcaatttaaaatgatcttactttaaaagtggcctagtttgcagtgcccagcaggacactgacagtcacagctgtgtgactttttgtgggttacttaatttttttgagcctccttttctcttctattcaatgaggataatagggcctacctcataggattattatgcattcccctctgttaatgcacgtaaagtttttacttggaaaactaactcaccatttaacaaccattctaagcaccatagaatatattttgtttcacaaatttggtattcattcagaataagtatttgaaaagtgagtaaattctatgcaattatagttattaaatgacttataaactgtgtttctcttccacttcttgctacatttaatcttctaggtgttcagatatctttggagattataggcagcaataaagctaaggcagctaacctttcaacattcttgtgtcaggctaatattttggtgaaaggaattcttgtgtttctcaaagaactagagctgaagcagaaataagttccaatgagcaagtgtccaattggaccattgaatgaaatctagtgttttaaacaattctgatgtttcaatgttttgttctgttttcttttgatcttgtgagcagtaagacatattttatgtgggtggtaaaggaagaaatcaagtaacagaatgaggaattgttcccaggaagagttagagttgggacaaatgggttgttaactttgatttttagatcttctctgaagacattaaacatggaatggtcatctttagaaaaataaaagactatgcaactccaccactgaaatggtatcttattacagtgaatgatggataatctgaaattactatagaaaaaaataaacccagaccattttgcctagagcctttcaacca

SEQ ID NO: 52015 - DNA, 2319 bp, Homo sapiens
ggcccctggccctaaactctgggactggcgggcggtcaggcggcacagggggaatcccgggggcctaaggaggttgtcccagtttttgtcagcatctccaccccgaggtggtttgaactttgagccttttgtagtcctgatgaataatttcattttcctcaagtttatgacactcggaacgtcaagaactggaggtttgtgcaatttgagaccggtcggcactgtgcagagatcagagtactaagagacagagattaaaatggcttccagaggaaagacagagacaagcaaattaaagcagaatttagaagaacagttggatagactcatgcaacaattacaagatctggaggaatgcagagaggaacttgatacagatgaatatgaagaaaccaaaaaggaaactctggagcaactaagtgaatttaatgattcactaaagaaaattatgtctggaaatatgactttggtagatgaactaagtggaatgcagctggctattcaggcagctatcagccaggcctttaaaaccccagaggtcatcagattgtttgcaaagaaacaaccaggtcagcttcggacaaggttagcagagatggatagagatctgatggtaggaaagctggaaagagacctgtacactcaacagaaagtggagatactaacagctcttaggaaacttggagagaagctgactgcagatgatgaggccttcttgtcagcaaatgcaggtgctatactcagccagtttgagaaagtctctacagaccttggctctggagacaaaattcttgctctggcaagttttgaggttgaaaaaacaaaaaaatgacatggtgcagaagcttgtaacattgatcacattcttaatgtaaatggtgtctttcttctggggttttcagttattgcaaagaaatgaagagattctggaaatgcatcaataacctaagaaaaagcgacataaaaatatacttatggcttgtgtttatgctcttcatcattgtgcgttgtgtgcggttacctgcttgagtgatcctgaacttgttgcgacagagggactcactggactctgttcgttatgatttgtctgtttaagagagaaaacaaagtggacttgatttttattaaggctgtttgtttttaagtgttgatagtgaacgaaaagatgtgaagtaatgatatttttctgcttacaacttatccccactcattggagtgaacagtgacgcaagctcaatagacttcataagtgttcatagaattttacaattctgagtgatcttagaaatcatttctgtttttacaaacaaggaaactgaggtccagaaagagcaagcgactttgcttaaagtcgcatcagagagctgagggtaagactcaggtgtcctgactcccagtttagtatcttttgaattttatttctgtaccatttaaaaaaaataattaacactatttgtgcaagtcagtgtttttgaaaattcagtgtcccaataaaaagtggactgcacactaagggaccatcccccagcctgtaagctgtctgtattaatggggcccgttgtatctcggaattttgaggttggaacaatgggagccctgttgagcgtttcctaaagtgacttagccgcctgcgttgtttgaccagggaagcaacaggaaatggcagctagaggccctccctgtgcgtgacctcttgtcacactcagaggggggtaactgtcagctgttatctactcttcaggttttggagaaacacaaaataagttatgaggaaaagcaaatttctctcctgagtatttacatgtctctgtatgctcaaatatgcagatgtgtccctatgcgtgtatattagcttattttttaggctctagccattttatattctttcatgtgcttctcaatattctttttctttgcactttatacaaattaaaagcatttttaaagcttcttctgtactgtaaactactaggtgctttgccaaccagacagattagaggacctccgctacactgatgccttatttggaacttaaaagaggtgaaattcatatatcataaaattcaccattttaaagtgtaccattcgttggcagaacatttacagtggtgtgcaaccatcactactctctagttgcagaacattcttatcacccccaaaggaggccctatacctattaagcagttagtccccattcccttctcctccgactgctaacaatagccactaatctgcaccctgtctctgtggatttacctattctggatatttcatataaatggaatcatatgatatgtgacctttttatgtatctggctt

SEQ ID NO: 52016 - DNA, 3248 bp, Homo sapiens
ggcccctggccctaaactctgggactggcgggcggtcaggcggcacagggggaatcccgggggcctaaggaggttgtcccagtttttgtcagcatctccaccccgaggtggtttgaactttgagccttttgtagtcctgatgaataatttcattttcctcaagtttatgacactcggaacgtcaagaactggaggtttgtgcaatttgagaccggtcggcactgtgcagagatcagagtactaagagacagagattaaaatggcttccagaggaaagacagagacaagcaaattaaagcagaatttagaagaacagttggatagactcatgcaacaattacaagatctggaggaatgcagagaggaacttgatacagatgaatatgaagaaaccaaaaaggaaactctggagcaactaagtgaatttaatgattcactaaagaaaattatgtctggaaatatgactttggtagatgaactaagtggaatgcagctggctattcaggcagctatcagccaggcctttaaaaccccagaggtcatcagattgtttgcaaagaaacaaccaggtcagcttcggacaaggttagcagagatggatagagatctgatggtaggaaagctggaaagagacctgtacactcaacagaaagtggagatactaacagctcttaggaaacttggagagaagctgactgcagatgatgaggccttcttgtcagcaaatgcaggtgctatactcagccagtttgagaaagtctctacagaccttgttattgcaaagaaatgaagagattctggaaatgcatcaataacctaagaaaaagcgacataaaaatatacttatggcttgtgtttatgctcttcatcattgtgcgttgtgtgcggttacctgcttgagtgatcctgaacttgttgcgacagagggactcactggactctgttcgttatgatttgtctgtttaagagagaaaacaaagtggacttgatttttattaaggctgtttgtttttaagtgttgatagtgaacgaaaagatgtgaagtaatgatatttttctgcttacaacttatccccactcattggagtgaacagtgacgcaagctcaatagacttcataagtgttcatagaattttacaattctgagtgatcttagaaatcatttctgtttttacaaacaaggaaactgaggtccagaaagagcaagcgactttgcttaaagtcgcatcagagagctgagggtaagactcaggtgtcctgactcccagtttagtatcttttgaattttatttctgtaccatttaaaaaaaataattaacactatttgtgcaagtcagtgtttttgaaaattcagtgtcccaataaaaagtggactgcacactaagggaccatcccccagcctgtaagctgtctgtattaatggggcccgttgtatctcggaattttgaggttggaacaatgggagccctgttgagcgtttcctaaagtgacttagccgcctgcgttgtttgaccagggaagcaacaggaaatggcagctagaggccctccctgtgcgtgacctcttgtcacactcagaggggggtaactgtcagctgttatctactcttcaggttttggagaaacacaaaataagttatgaggaaaagcaaatttctctcctgagtatttacatgtctctgtatgctcaaatatgcagatgtgtccctatgcgtgtatattagcttattttttaggctctagccattttatattctttcatgtgcttctcaatattctttttctttgcactttatacaaattaaaagcatttttaaagcttcttctgtactgtaaactactaggtgctttgccaaccagacagattagaggacctccgctacactgatgccttatttggaacttaaaagaggtgaaattcatatatcataaaattcaccattttaaagtgtaccattcgttggcagaacatttacagtggtgtgcaaccatcactactctctagttgcagaacattcttatcacccccaaaggaggccctatacctattaagcagttagtccccattcccttctcctccgactgctaacaatagccactaatctgcaccctgtctctgtggatttacctattctggatatttcatataaatggaatcatatgatatgtgacctttttatgtatctggcttacttgtggtcccagctactcaggaagctgaggtcagaggatcacctgaacctgggaagcagaggttgcagtgaactgagatcacgccactgtactggctgacaaagtgagacccctgtctaaaaaaaagataaagagagttacctgaatctggaatccttaatcttgggttttccttaaactttctataagtccagcatctgaaatattttgtcaattatcacattaatgtgttcattttgtaagtaagagtactcaatttaaaatgatcttactttaaaagtggcctagtttgcagtgcccagcaggacactgacagtcacagctgtgtgactttttgtgggttacttaatttttttgagcctccttttctcttctattcaatgaggataatagggcctacctcataggattattatgcattcccctctgttaatgcacgtaaagtttttacttggaaaactaactcaccatttaacaaccattctaagcaccatagaatatattttgtttcacaaatttggtattcattcagaataagtatttgaaaagtgagtaaattctatgcaattatagttattaaatgacttataaactgtgtttctcttccacttcttgctacatttaatcttctaggtgttcagatatctttggagattataggcagcaataaagctaaggcagctaacctttcaacattcttgtgtcaggctaatattttggtgaaaggaattcttgtgtttctcaaagaactagagctgaagcagaaataagttccaatgagcaagtgtccaattggaccattgaatgaaatctagtgttttaaacaattctgatgtttcaatgttttgttctgttttcttttgatcttgtgagcagtaagacatattttatgtgggtggtaaaggaagaaatcaagtaacagaatgaggaattgttcccaggaagagttagagttgggacaaatgggttgttaactttgatttttagatcttctctgaagacattaaacatggaatggtcatctttagaaaaataaaagactatgcaactccacca

SEQ ID NO: 52017 - DNA, 2352 bp, Homo sapiens
ggcccctggccctaaactctgggactggcgggcggtcaggcggcacagggggaatcccgggggcctaaggaggttgtcccagtttttgtcagcatctccaccccgaggtggtttgaactttgagccttttgtagtcctgatgaataatttcattttcctcaagtttatgacactcggaacgtcaagaactggaggtttgtgcaatttgagaccggtcggcactgtgcagagatcagagtactaagagacagagattaaaatggcttccagaggaaagacagagacaagcaaattaaagcagaatttagaagaacagttggatagactcatgcaacaattacaagatctggaggaatgcagagaggaacttgatacagatgaatatgaagaaaccaaaaaggaaactctggagcaactaagtgaatttaatgattcactaaagaaaattatgtctggaaatatgactttggtagatgaactaagtggaatgcagctggctattcaggcagctatcagccaggcctttaaaaccccagaggtcatcagattgtttgcaaagaaacaaccaggtcagcttcggacaaggttagcagagatggatagagatctgatggtaggaaagctggaaagagacctgtacactcaacagaaagtggagatactaacagctcttaggaaacttggagagaagctgactgcagatgatgaggccttcttgtcagcaaatgcaggtgctatactcagccagtttgagaaagtctctacagaccttggctctggagacaaaattcttgctctggcaagttttgaggttgaaaaaacaaaaaaatgacatggtgcagaagcttgtaacattgatcacattcttaatgtaaatggtgtctttcttctggggttttcagttattgcaaagaaatgaagagattctggaaatgcatcaataacctaagaaaaagcgacataaaaatatacttatggcttgtgtttatgctcttcatcattgtgcgttgtgtgcggttacctgcttgagtgatcctgaacttgttgcgacagagggactcactggactctgttcgttatgatttgtctgtttaagagagaaaacaaagtggacttgatttttattaaggctgtttgtttttaagtgttgatagtgaacgaaaagatgtgaagtaatgatatttttctgcttacaacttatccccactcattggagtgaacagtgacgcaagctcaatagacttcataagtgttcatagaattttacaattctgagtgatcttagaaatcatttctgtttttacaaacaaggaaactgaggtccagaaagagcaagcgactttgcttaaagtcgcatcagagagctgagggtaagactcaggtgtcctgactcccagtttagtatcttttgaattttatttctgtaccatttaaaaaaaataattaacactatttgtgcaagtcagtgtttttgaaaattcagtgtcccaataaaaagtggactgcacactaagggaccatcccccagcctgtaagctgtctgtattaatggggcccgttgtatctcggaattttgaggttggaacaatgggagccctgttgagcgtttcctaaagtgacttagccgcctgcgttgtttgaccagggaagcaacaggaaatggcagctagaggccctccctgtgcgtgacctcttgtcacactcagaggggggtaactgtcagctgttatctactcttcaggttttggagaaacacaaaataagttatgaggaaaagcaaatttctctcctgagtatttacatgtctctgtatgctcaaatatgcagatgtgtccctatgcgtgtatattagcttattttttaggctctagccattttatattctttcatgtgcttctcaatattctttttctttgcactttatacaaattaaaagcatttttaaagcttcttctgtactgtaaactactaggtgctttgccaaccagacagattagaggacctccgctacactgatgccttatttggaacttaaaagaggtgaaattcatatatcataaaattcaccattttaaagtgtaccattcgttggcagaacatttacagtggtgtgcaaccatcactactctctagttgcagaacattcttatcacccccaaaggaggccctatacctattaagcagttagtccccattcccttctcctccgactgctaacaatagccactaatctgcaccctgtctctgtggatttacctattctggatatttcatataaatggaatcatatgatatgtgacctttttatgtatctggcttctttcacttagcataatattttcttttcttttt

SEQ ID NO: 52018 - DNA, 2893 bp, Homo sapiens
atagaaatggggtttcatcatgttggccaggctggtctcaaactgctgacctcatgtgatccacccccccccccccccacgcctcccaaagtgcagggattacaggcgtgagccacggtgcccagcctcctaagacattcttacctggtttctagaaccacctgtaacatttacccactcaactggactttgtttcattttgtttagctgactgcagatgatgaggccttcttgtcagcaaatgcaggtgctatactcagccagtttgagaaagtctctacagaccttggctctggagacaaaattcttgctctggcaagttttgaggttgaaaaaacaaaaaaatgacatggtgcagaagcttgtaacattgatcacattcttaatgtaaatggtgtctttcttctggggttttcagttattgcaaagaaatgaagagattctggaaatgcatcaataacctaagaaaaagcgacataaaaatatacttatggcttgtgtttatgctcttcatcattgtgcgttgtgtgcggttacctgcttgagtgatcctgaacttgttgcgacagagggactcactggactctgttcgttatgatttgtctgtttaagagagaaaacaaagtggacttgatttttattaaggctgtttgtttttaagtgttgatagtgaacgaaaagatgtgaagtaatgatatttttctgcttacaacttatccccactcattggagtgaacagtgacgcaagctcaatagacttcataagtgttcatagaattttacaattctgagtgatcttagaaatcatttctgtttttacaaacaaggaaactgaggtccagaaagagcaagcgactttgcttaaagtcgcatcagagagctgagggtaagactcaggtgtcctgactcccagtttagtatcttttgaattttatttctgtaccatttaaaaaaaataattaacactatttgtgcaagtcagtgtttttgaaaattcagtgtcccaataaaaagtggactgcacactaagggaccatcccccagcctgtaagctgtctgtattaatggggcccgttgtatctcggaattttgaggttggaacaatgggagccctgttgagcgtttcctaaagtgacttagccgcctgcgttgtttgaccagggaagcaacaggaaatggcagctagaggccctccctgtgcgtgacctcttgtcacactcagaggggggtaactgtcagctgttatctactcttcaggttttggagaaacacaaaataagttatgaggaaaagcaaatttctctcctgagtatttacatgtctctgtatgctcaaatatgcagatgtgtccctatgcgtgtatattagcttattttttaggctctagccattttatattctttcatgtgcttctcaatattctttttctttgcactttatacaaattaaaagcatttttaaagcttcttctgtactgtaaactactaggtgctttgccaaccagacagattagaggacctccgctacactgatgccttatttggaacttaaaagaggtgaaattcatatatcataaaattcaccattttaaagtgtaccattcgttggcagaacatttacagtggtgtgcaaccatcactactctctagttgcagaacattcttatcacccccaaaggaggccctatacctattaagcagttagtccccattcccttctcctccgactgctaacaatagccactaatctgcaccctgtctctgtggatttacctattctggatatttcatataaatggaatcatatgatatgtgacctttttatgtatctggcttacttgtggtcccagctactcaggaagctgaggtcagaggatcacctgaacctgggaagcagaggttgcagtgaactgagatcacgccactgtactggctgacaaagtgagacccctgtctaaaaaaaagataaagagagttacctgaatctggaatccttaatcttgggttttccttaaactttctataagtccagcatctgaaatattttgtcaattatcacattaatgtgttcattttgtaagtaagagtactcaatttaaaatgatcttactttaaaagtggcctagtttgcagtgcccagcaggacactgacagtcacagctgtgtgactttttgtgggttacttaatttttttgagcctccttttctcttctattcaatgaggataatagggcctacctcataggattattatgcattcccctctgttaatgcacgtaaagtttttacttggaaaactaactcaccatttaacaaccattctaagcaccatagaatatattttgtttcacaaatttggtattcattcagaataagtatttgaaaagtgagtaaattctatgcaattatagttattaaatgacttataaactgtgtttctcttccacttcttgctacatttaatcttctaggtgttcagatatctttggagattataggcagcaataaagctaaggcagctaacctttcaacattcttgtgtcaggctaatattttggtgaaaggaattcttgtgtttctcaaagaactagagctgaagcagaaataagttccaatgagcaagtgtccaattggaccattgaatgaaatctagtgttttaaacaattctgatgtttcaatgttttgttctgttttcttttgatcttgtgagcagtaagacatattttatgtgggtggtaaaggaagaaatcaagtaacagaatgaggaattgttcccaggaagagttagagttgggacaaatgggttgttaactttgatttttagatcttctctgaagacattaaacatggaatggtcatctttagaaaaataaaagactatgcaactccacca

SEQ ID NO: 52019 - DNA, 1834 bp, Homo sapiens
ggcccctggccctaaactctgggactggcgggcggtcaggcggcacagggggaatcccgggggcctaaggaggttgtcccagtttttgtcagcatctccaccccgaggtggtttgaactttgagccttttgtagtcctgatgaataatttcattttcctcaagtttatgacactcggaacgtcaagaactggaggtttgtgcaatttgagaccggtcggcactgtgcagagatcagagtactaagagacagagattaaaatggcttccagaggaaagacagagacaagcaaattaaagcagaatttagaagaacagttggatagactcatgcaacaattacaagatctggaggaatgcagagaggaacttgatacagatgaatatgaagaaaccaaaaaggaaactctggagcaactaagtgaatttaatgattcactaaagaaaattatgtctggaaatatgactttggtagatgaactaagtggaatgcagctggctattcaggcagctatcagccaggcctttaaaaccccagaggtcatcagattgtttgcaaagaaacaaccaggtcagcttcggacaaggttagcagagatggatagagatctgatggtaggaaagctggaaagagacctgtacactcaacagaaagtggagatactaacagctcttaggaaacttggagagaagctgactgcagatgatgaggccttcttgtcagcaaatgcaggtgctatactcagccagtttgagaaagtctctacagaccttggctctggagacaaaattcttgctctggcaagttttgaggttgaaaaaacaaaaaaatgacatggtgcagaagcttgtaacattgatcacattcttaatgtaaatggtgtctttcttctggggttttcagttattgcaaagaaatgaagagattctggaaatgcatcaataacctaagaaaaagcgacataaaaatatacttatggcttgtgtttatgctcttcatcattgtgcgttgtgtgcggttacctgcttgagtgatcctgaacttgttgcgacagagggactcactggactctgttcgttatgatttgtctgtttaagagagaaaacaaagtggacttgatttttattaaggctgtttgtttttaagtgttgatagtgaacgaaaagatgtgaagtaatgatatttttctgcttacaacttatccccactcattggagtgaacagtgacgcaagctcaatagacttcataagtgttcatagaattttacaattctgagtgatcttagaaatcatttctgtttttacaaacaaggaaactgaggtccagaaagagcaagcgactttgcttaaagtcgcatcagagagctgagggtaagactcaggtgtcctgactcccagtttagtatcttttgaattttatttctgtaccatttaaaaaaaataattaacactatttgtgcaagtcagtgtttttgaaaattcagtgtcccaataaaaagtggactgcacactaagggaccatcccccagcctgtaagctgtctgtattaatggggcccgttgtatctcggaattttgaggttggaacaatgggagccctgttgagcgtttcctaaagtgacttagccgcctgcgttgtttgaccagggaagcaacaggaaatggcagctagaggccctccctgtgcgtgacctcttgtcacactcagaggggggtaactgtcagctgttatctactcttcaggttttggagaaacacaaaataagttaatatacacgcatagggacacatctgcatatttgagcatacagagacatgtaaatactcaggagagaa

SEQ ID NO: 52020 - DNA, 989 bp, Homo sapiens
agtgcgtgcgtccagcggaagtgctcccccggcgcggtccgccaggccagtgccctcagcatctccaccccgaggtggtttgaactttgagccttttgtagtcctgatgaataatttcattttcctcaagtttatgacactcggaacgtcaagaactggaggtttgtgcaatttgagaccggtcggcactgtgcagagatcagagtactaagagacagagattaaaatggcttccagaggaaagacagagacaagcaaattaaagcagaatttagaagaacagttggatagactcatgcaacaattacaagatctggaggaatgcagagaggaacttgatacagatgaatatgaagaaaccaaaaaggaaactctggagcaactaagtgaatttaatgattcactaaagaaaattatgtctggaaatatgactttggtagatgaactaagtggaatgcagctggctattcaggcagctatcagccaggcctttaaaaccccagaggtcatcagattgtttgcaaagaaacaaccaggtcagcttcggacaaggttagcagagatggatagagatctgatggtaggaaagctggaaagagacctgtacactcaacagaaagtggagatactaacagctcttaggaaacttggagagaagctgactgcagatgatgaggccttcttgtcagcaaatgcaggtgctatactcagccagtttgagaaagtctctacagaccttggacggcccccaagttacatgaactacctgctagactcacaccccagcaaaaatattgatgtccccagcaagattagcttcctgttaaagatccaggacctgtgaatacatgcgtaactgcaagaatggaagcaaaggatgaacccaagttaaagcccagcacaagaatatgatgtaagcgcttttgggaaatgcagagattttcttttctcttcaaataataaattacatctaaaaattaatgagagta

SEQ ID NO: 52021 - DNA, 292 bp, Homo sapiens
agtgcgtgcgtccagcggaagtgctcccccggcgcggtccgccaggccagtgccctcagcatctccaccccgaggtggtttgaactttgagccttttgtagtcctgatgaataatttcattttcctcaagtttatgacactcggaacgtcaagaactggaggtttgtgcaatttgagaccggtcggcactgtgcagagatcagagtactaagagacagtacaaaaatcagctgagcgtggtggcgggcacctacattcccagctactcgggagaccgaggcaggagagtcac

SEQ ID NO: 52022 - DNA, 474 bp, Homo sapiens
tttagagatggggtcttgctacatttccaaggctggtctcaaactcatgggctcaagcaatcctcctgcctcggcctcccaaggtgtaacttctagatgagtgtctgtttatgcatacacaacatatccttccagatcttcatttagttgtgtaattgcttccatgacaggaaccagtaaaccttgataaaaattaaggatccgtcaatcagttattgcaatatctgatttgttggactattttggttagtttttgccttcttgtgtttctaggctattcaggcagctatcagccaggcctttaaaaccccagaggtcatcagattgtttgcaaagaaacaaccaggtcagcttcggacaaggttagcagaggtaaaatttctttaaattgatttggttgctgtgtgtttttcatttcctaggccaattcattatgatatcctatggcttaaaaatttgccaggtgattttaga

SEQ ID NO: 52023 - DNA, 1022 bp, Homo sapiens
ggcccctggccctaaactctgggactggcgggcggtcaggcggcacagggggaatcccgggggcctaaggaggttgtcccagtttttgtcagcatctccaccccgaggtggtttgaactttgagccttttgtagtcctgatgaataatttcattttcctcaagtttatgacactcggaacgtcaagaactggaggtttgtgcaatttgagaccggtcggcactgtgcagagatcagagtactaagagacagagattaaaatggcttccagaggaaagacagagacaagcaaattaaagcagaatttagaagaacagttggatagactcatgcaacaattacaagatctggaggaatgcagagaggaacttgatacagatgaatatgaagaaaccaaaaaggaaactctggagcaactaagtgaatttaatgattcactaaagaaaattatgtctggaaatatgactttggtagatgaactaagtggaatgcagctggctattcaggcagctatcagccaggcctttaaaaccccagaggtcatcagattgtttgcaaagaaacaaccaggtcagcttcggacaaggttagcagagatggatagagatctgatggtaggaaagctggaaagagacctgtacactcaacagaaagtggagatactaacagctcttaggaaacttggagagaagctgactgcagatgatgaggccttcttgtcagcaaatgcaggtgctatactcagccagtttgagaaagtctctacagaccttggacggcccccaagttacatgaactacctgctagactcacaccccagcaaaaatattgatgtccccagcaagattagcttcctgttaaagatccaggacctgtgaatacatgcgtaactgcaagaatggaagcaaaggatgaacccaagttaaagcccagcacaagaatatgatgtaagcgcttttgggaaatgcagagattttcttttctcttcaaataataaattacatctaaaaattaatgagagta

SEQ ID NO: 52024 - DNA, 696 bp, Homo sapiens
agtgcgtgcgtccagcggaagtgctcccccggcgcggtccgccaggccagtgccctcagcatctccaccccgaggtggtttgaactttgagccttttgtagtcctgatgaataatttcattttcctcaagtttatgacactcggaacgtcaagaactggaggtttgtgcaatttgagaccggtcggcactgtgcagagatcagagtactaagagacagagattgtttgcaaagaaacaaccaggtcagcttcggacaaggttagcagagatggatagagatctgatggtaggaaagctggaaagagacctgtacactcaacagaaagtggagatactaacagctcttaggaaacttggagagaagctgactgcagatgatgaggccttcttgtcagcaaatgcaggtgctatactcagccagtttgagaaagtctctacagaccttggacggcccccaagttacatgaactacctgctagactcacaccccagcaaaaatattgatgtccccagcaagattagcttcctgttaaagatccaggacctgtgaatacatgcgtaactgcaagaatggaagcaaaggatgaacccaagttaaagcccagcacaagaatatgatgtaagcgcttttgggaaatgcagagattttcttttctcttcaaataataaattacatctaaaaattaatgagagta

SEQ ID NO: 52025 - DNA, 266 bp, Homo sapiens
ctgccgtcaactatttgagaagctgactctgtccaggtaaccactgcttgacgaatttctttaggaattatccagtggaactggtagcataatcatctctgttgagaaggaatggtctgaaagaagatactctatcttggaaggttttctgttgatatttagagacaagcagcaaatattagctcgaggtcaatgctggagattgtaaaacggctctgcattagtaacactttccaatcacaaggaatgtattttcattggtgtct

SEQ ID NO: 52026 - DNA, 1142 bp, Homo sapiens
ggcgctggagcggcggctgcgcttcggcttcgagcccagctctcctggccccaacgcgggcttagcctcccgccttggctcgggcaggcgcccgtcgacccttcggcccctttcgcccgccctggagctgggggcagggtgccagtggaagcgtggggcttggctctgtgattcattcattctccgccgacgggagcctcagacccgctgtgctctgaagagaggagggaagagggggcagccgcgaatgaagggccgggcaccagccgggctccattgtgctcggcggcggggggcgggaaggggctgagggaggtgggatcgggtcccctcctccagctctccggcgtgcgctgcgcccccagcctgctgccagcctggaaatggctccgtttattctcttcgggagaatgaatcgatcctgcctagccttctcttcgtcctccccacctcttctctgctccgagtcttaggaggagaaacatttaaaaagacagattccaatgtggagtgccgtgcaggttgcgagctgccgggtttgcacttcgaggagattttcctgtgtagtttttttcctaatgtgagcgcagggaagccgtggcattactgcttttgggatttttattcacgtgcacgtcgcgtttggttgctcgctccacccccggagacctggtgtggtggagaaatttgaacccgcagccttagctccgaaaaggccgagttacctggctctccctgagtgtcgaggaggacatgagtgaaatgaccagcgaactcattttttataggactcggtgaagccggattctgcatttccctacttgtagactcattttgtggaatagagttgatcgctgtctcctccgcaaagcattttaactcgaataagcaaatgccgcctctgtttgaacgttttggtatttacaagagagaaatcattttacctaagagaactaattgaattggcagcatccttgaaatacctccggacaaggatctgggggtgggggtggatggttcttattctgtggagaagaagggcgggaagaacttcctttcaggaggaagctggaacttactgactgtaagaggttagaggtggaccgagaaggacttttcccagtcttcagtggcacttccca

SEQ ID NO: 52027 - DNA, 5386 bp, Homo sapiens
ggcgctggagcggcggctgcgcttcggcttcgagcccagctctcctggccccaacgcgggcttagcctcccgccttggctcgggcaggcgcccgtcgacccttcggcccctttcgcccgccctggagctgggggcagggtgccagtggaagcgtggggcttggctctgtgattcattcattctccgccgacgggagcctcagacccgctgtgctctgaagagaggagggaagagggggcagccgcgaatgaagggccgggcaccagccgggctccattgtgctcggcggcggggggcgggaaggggctgagggaggtgggatcgggtcccctcctccagctctccggcgtgcgctgcgcccccagcctgctgccagcctggaaatggctccgtttattctcttcgggagaatgaatcgatcctgcctagccttctcttcgtcctccccacctcttctctgctccgagtcttaggaggagaaacatttaaaaagacagattccaatgtggagtgccgtgcaggttgcgagctgccgggtttgcacttcgaggagattttcctgtgtagtttttttcctaatgtgagcgcagggaagccgtggcattactgcttttgggatttttattcacgtgcacgtcgcgtttggttgctcgctccacccccggagacctggtgtggtggagaaatttgaacccgcagccttagctccgaaaaggccgagttacctggctctccctgagtgtcgaggaggacatgagtgaaatgaccagcgaactcattttttataggactcggtgaagccggattctgcatttccctacttgtagactcattttgtggaatagagttgatcgctgtctcctccgcaaagcattttaactcgaataagcaaatgccgcctctgtttgaacgttttggtatttacaagagagaaatcattttacctaagagaactaattgaattggcagcatccttgaaatacctccggacaaggatctgggggtgggggtggaaaagcaactgcgaaatagcagacggagaaattcctttggaagttattccgtagcataagagctgaaacttcagagcaagttttcattgggcaaaatgggggaacaacctatcttcagcactcgagctcatgtcttccaaattgacccaaacacaaagaagaactgggtacccaccagcaagcatgcagttactgtgtcttatttctatgacagcacaagaaatgtgtataggataatcagtttagatggctcaaaggcaataataaatagtaccatcaccccaaacatgacatttactaaaacatctcagaagtttggccagtgggctgatagccgggcaaacaccgtttatggattgggattctcctctgagcatcatctttcgaaatttgcagaaaagtttcaggaatttaaagaagctgctcgactagcaaaggaaaaatcacaagagaagatggaacttaccagtacaccttcacaggaatccgcaggcggggatcttcagtctcctttaacaccggaaagtatcaacgggacagatgatgaaagaacacctgatgtgacacagaactcagagccaagggctgaaccaactcagaatgcattgccattttcacatagttcagcaatcagcaaacattgggaggctgaactggctaccctcaaaggaaataatgccaaactcactgcagccctgctggagtccactgccaatgtgaaacaatggaaacagcaacttgctgcctatcaagaggaagcagaacgtctgcacaagcgggtgactgaacttgaatgtgttagtagccaagcaaatgcagtacatactcataagacagaattaaatcagacaatacaagaactggaagagacactgaaactgaaggaagaggaaatagaaaggttaaaacaagaaattgataatgccagagaactacaagaacagagggattctttgactcagaaactacaggaagtagaaattcggaacaaagacctggagggacaactgtctgacttagagcaacgtctggagaaaagtcagaatgaacaagaagcttttcgcaataacctgaagacactcttagaaattctggatggaaagatatttgaactaacagaattacgagataacttggccaagctactagaatgcagctaaggaaagtgaaatttcagtgccaattaattaaaagatacactgtctctcttcataggactgtttaggctctgcatcaagattgcacaaaaaaaaaaaaaaaaaaattgaatatcactcctccaggaggaggatcttttgaaattggaattgtatatttcactgtaaattttagaatccagcttgtagctagttggggaaaaaagatgaaaaacttgaactacaaattacctccatgtatattattggccatagttaactagaaagttataaatagacacttaatgcaatcttttttcctgatattagccaatgggagaattaacaatgtctaggtcacatcccctttttgtgttcaacacagtgaagattatctgctttttaaattaatttatttacgatatctagagctgtgttttgtgcaaaaacttagtgatgaaagcctgtcttttgttgtaatctgaataatttctcaggatatttttgcactgctgagaagcagtgccattaccaattaattcttgccaggagtgagagagagctgtatctttaattgaaatatactataactgggtgtatagagttcttcccttttttgtgctggaagatatttcactctggtgactactctggtacactctggtgttctctaatcttgtctgttgtatagtttacttttccatattgattccatgtatttatgagaagatattgtctcccattttattacacattttaaagccaactaacgaaggcagctgagtccctcagaaatttttctttttaagtttctaataaatttgacacacagtactgaaatacagcagcccgtcattgacaggctggtctagcaatgttaagtatatttacagaatatgcagttacatttatttatatattttgcaagaaatcttttctgaatgatcaatgcatttcaatttacgaataataatggttattggggaactgtttattatagataattttaaggtgtatagctattttaaagggggtccatttacatcaaacagccgatcagaggactctatctaaattgtgatcgtggcagatagagatggagtcatgtactctatctggctctacacatcaatcacatcttgattcaaacctcacaaggcaatattctgaattgttaactaggtatttcaaaacaggaattaaattcaataggctcttctcagtgaacaggttttaatgttgttttgatgtaattttaaaagacttttagcaaacatgcatttctttatatgatatatttcttttacgaagctattttaaaagtaagccaagtgctgtctagtctgcttataaagtaggaattgcatcagagtacatatattcttgctgtacaatgcctgtgatgttgaggagggttcttttttaaagtgtatgcttgagtaactgactctatggagtctataaatgcactgacttcttgtttgtaccccaaaatgatcgaattgttaagtacaaaattaagctaattaaccaatttgtaaccattttttcactcataaacagctactcaatactagacaattttgttttttatgtatgtgtatgtacgtaaatacatacatattaatttacattagagtgaaaaataaatggtttgtttctgaagttagtttcttaagtgagttttcaggtgtctctgaaaaatttataacaatcatgtattatatgtgctgtaacatcatgtacgttacctccatctattttaggatattttcctcacctatatattatagggagaataatttagatacacatgctcagagctgagatatttctctgataaatcaggtaacaaaatgtatttgattgatggaattttgaagtaaatgtgtttttatccatcagtttctgagtaacaaagagcaccaagttttaatttaaataggagatttaacactagggatcagggagtttagtatgaagagttaaaaaaatttaaaaaacagtgtaagctgttgaaatggcaagtgaattattttaatgatgtaataaaatatttttaaattttgacatagtgatcatttaatgaaaaaactcaccaaaatgtctccatttgaattgtattgataatgtgggacatatgtgtgattcaatatatacatatacccatatgtatatacagaaaattatttttaatactttcctactgataatgaaatttaaaattggaaattttgtgagtgtttttcttgtccaatagagcctaattgtttccttttttagtgatttaacaatctcttgagggctgcacctttaaattcccagattgtcaatagacatgtacagtatatgggataaggtggacacaagtgcacatataaataaaatcttcttaagacttttaactattcatttacagtaggagagtatgtagaaatcatcatccacaagtcataattaggttgtgtgcctactgtagttttttccatttctgtattatataaacatttgcatattaaaatttgatttttcccagagacaagtattatatactgtatctatatttaaatcaaactgtggtaatatatttctcagaaaataatgttggggactatagcctgaacatgtggacttgaagcgacatggaggaggaggttgatcccattgtgtataagttaatatgtgataactattgaatcttgtacaaaaacaaaaattgaaaaaaaaaaagaaaagcaaaaatacagtttttattttgaaatacatttgttctctggagaatgtactttatctttttttcctccagtcttttacagatatttaaaagcatttaaatgatgacagcatttacttaaatctttcaggtgctactggattttgcattagtgtgttatgttgtgaaatcctaactttgacataaaaggttttataagtattcccctgcctggaaaattagtttttgttctcctctctctctctttctcttttccactttctttctgcagactaaaacatgctcacgaagttgcatctctccttgtctctatagaagatctccagcaccatcatagatttgatgttctgctgtcattgaactgttgggaagcagttagaggaaaagctcactttttttttcaggtggaaataaaaggaacactcaaaattaagccaacaccaccactacctttaaaaactagtttatttgccctgttaaaattaaatgtattctttaacatg

SEQ ID NO: 52028 - DNA, 3769 bp, Homo sapiens
ctttttgttttattttagttcagcaatcagcaaacattgggaggctgaactggctaccctcaaaggaaataatgccaaactcactgcagccctgctggagtccactgccaatgtgaaacaatggaaacagcaacttgctgcctatcaagaggaagcagaacgtctgcacaagcgggtgactgaacttgaatgtgttagtagccaagcaaatgcagtacatactcataagacagaattaaatcagacaatacaagaactggaagagacactgaaactgaaggaagaggaaatagaaaggttaaaacaagaaattgataatgccagagaactacaagaacagagggattctttgactcagaaactacaggaagtagaaattcggaacaaagacctggagggacaactgtctgacttagagcaacgtctggagaaaagtcagaatgaacaagaagcttttcgcaataacctgaagacactcttagaaattctggatggaaagatatttgaactaacagaattacgagataacttggccaagctactagaatgcagctaaggaaagtgaaatttcagtgccaattaattaaaagatacactgtctctcttcataggactgtttaggctctgcatcaagattgcacaaaaaaaaaaaaaaaaaaattgaatatcactcctccaggaggaggatcttttgaaattggaattgtatatttcactgtaaattttagaatccagcttgtagctagttggggaaaaaagatgaaaaacttgaactacaaattacctccatgtatattattggccatagttaactagaaagttataaatagacacttaatgcaatcttttttcctgatattagccaatgggagaattaacaatgtctaggtcacatcccctttttgtgttcaacacagtgaagattatctgctttttaaattaatttatttacgatatctagagctgtgttttgtgcaaaaacttagtgatgaaagcctgtcttttgttgtaatctgaataatttctcaggatatttttgcactgctgagaagcagtgccattaccaattaattcttgccaggagtgagagagagctgtatctttaattgaaatatactataactgggtgtatagagttcttcccttttttgtgctggaagatatttcactctggtgactactctggtacactctggtgttctctaatcttgtctgttgtatagtttacttttccatattgattccatgtatttatgagaagatattgtctcccattttattacacattttaaagccaactaacgaaggcagctgagtccctcagaaatttttctttttaagtttctaataaatttgacacacagtactgaaatacagcagcccgtcattgacaggctggtctagcaatgttaagtatatttacagaatatgcagttacatttatttatatattttgcaagaaatcttttctgaatgatcaatgcatttcaatttacgaataataatggttattggggaactgtttattatagataattttaaggtgtatagctattttaaagggggtccatttacatcaaacagccgatcagaggactctatctaaattgtgatcgtggcagatagagatggagtcatgtactctatctggctctacacatcaatcacatcttgattcaaacctcacaaggcaatattctgaattgttaactaggtatttcaaaacaggaattaaattcaataggctcttctcagtgaacaggttttaatgttgttttgatgtaattttaaaagacttttagcaaacatgcatttctttatatgatatatttcttttacgaagctattttaaaagtaagccaagtgctgtctagtctgcttataaagtaggaattgcatcagagtacatatattcttgctgtacaatgcctgtgatgttgaggagggttcttttttaaagtgtatgcttgagtaactgactctatggagtctataaatgcactgacttcttgtttgtaccccaaaatgatcgaattgttaagtacaaaattaagctaattaaccaatttgtaaccattttttcactcataaacagctactcaatactagacaattttgttttttatgtatgtgtatgtacgtaaatacatacatattaatttacattagagtgaaaaataaatggtttgtttctgaagttagtttcttaagtgagttttcaggtgtctctgaaaaatttataacaatcatgtattatatgtgctgtaacatcatgtacgttacctccatctattttaggatattttcctcacctatatattatagggagaataatttagatacacatgctcagagctgagatatttctctgataaatcaggtaacaaaatgtatttgattgatggaattttgaagtaaatgtgtttttatccatcagtttctgagtaacaaagagcaccaagttttaatttaaataggagatttaacactagggatcagggagtttagtatgaagagttaaaaaaatttaaaaaacagtgtaagctgttgaaatggcaagtgaattattttaatgatgtaataaaatatttttaaattttgacatagtgatcatttaatgaaaaaactcaccaaaatgtctccatttgaattgtattgataatgtgggacatatgtgtgattcaatatatacatatacccatatgtatatacagaaaattatttttaatactttcctactgataatgaaatttaaaattggaaattttgtgagtgtttttcttgtccaatagagcctaattgtttccttttttagtgatttaacaatctcttgagggctgcacctttaaattcccagattgtcaatagacatgtacagtatatgggataaggtggacacaagtgcacatataaataaaatcttcttaagacttttaactattcatttacagtaggagagtatgtagaaatcatcatccacaagtcataattaggttgtgtgcctactgtagttttttccatttctgtattatataaacatttgcatattaaaatttgatttttcccagagacaagtattatatactgtatctatatttaaatcaaactgtggtaatatatttctcagaaaataatgttggggactatagcctgaacatgtggacttgaagcgacatggaggaggaggttgatcccattgtgtataagttaatatgtgataactattgaatcttgtacaaaaacaaaaattgaaaaaaaaaaagaaaagcaaaaatacagtttttattttgaaatacatttgttctctggagaatgtactttatctttttttcctccagtcttttacagatatttaaaagcatttaaatgatgacagcatttacttaaatctttcaggtgctactggattttgcattagtgtgttatgttgtgaaatcctaactttgacataaaaggttttataagtattcccctgcctggaaaattagtttttgttctcctctctctctctttctcttttccactttctttctgcagactaaaacatgctcacgaagttgcatctctccttgtctctatagaagatctccagcaccatcatagatttgatgttctgctgtcattgaactgttgggaagcagttagaggaaaagctcactttttttttcaggtggaaataaaaggaacactcaaaattaagccaacaccaccactacctttaaaaactagtttatttgccctgttaaaattaaatgtattctttaacatg

SEQ ID NO: 52029 - DNA, 3693 bp, Homo sapiens
atatcgaggttatctctgccagatcacaagtgtggctggtgtcattctgggtctgactggagccctccatggactgtattctttaattacaaaagccctgcagacatagtacctggtcagaactatgcctcggtttatttatcattttgaaatataatcagaatttctgtgcccatttcattgaaatgggcacagaaattgaaggaagaggaaatagaaaggttaaaacaagaaattgataatgccagagaactacaagaacagagggattctttgactcagaaactacaggaagtagaaattcggaacaaagacctggagggacaactgtctgacttagagcaacgtctggagaaaagtcagaatgaacaagaagcttttcgcaataacctgaagacactcttagaaattctggatggaaagatatttgaactaacagaattacgagataacttggccaagctactagaatgcagctaaggaaagtgaaatttcagtgccaattaattaaaagatacactgtctctcttcataggactgtttaggctctgcatcaagattgcacaaaaaaaaaaaaaaaaaaattgaatatcactcctccaggaggaggatcttttgaaattggaattgtatatttcactgtaaattttagaatccagcttgtagctagttggggaaaaaagatgaaaaacttgaactacaaattacctccatgtatattattggccatagttaactagaaagttataaatagacacttaatgcaatcttttttcctgatattagccaatgggagaattaacaatgtctaggtcacatcccctttttgtgttcaacacagtgaagattatctgctttttaaattaatttatttacgatatctagagctgtgttttgtgcaaaaacttagtgatgaaagcctgtcttttgttgtaatctgaataatttctcaggatatttttgcactgctgagaagcagtgccattaccaattaattcttgccaggagtgagagagagctgtatctttaattgaaatatactataactgggtgtatagagttcttcccttttttgtgctggaagatatttcactctggtgactactctggtacactctggtgttctctaatcttgtctgttgtatagtttacttttccatattgattccatgtatttatgagaagatattgtctcccattttattacacattttaaagccaactaacgaaggcagctgagtccctcagaaatttttctttttaagtttctaataaatttgacacacagtactgaaatacagcagcccgtcattgacaggctggtctagcaatgttaagtatatttacagaatatgcagttacatttatttatatattttgcaagaaatcttttctgaatgatcaatgcatttcaatttacgaataataatggttattggggaactgtttattatagataattttaaggtgtatagctattttaaagggggtccatttacatcaaacagccgatcagaggactctatctaaattgtgatcgtggcagatagagatggagtcatgtactctatctggctctacacatcaatcacatcttgattcaaacctcacaaggcaatattctgaattgttaactaggtatttcaaaacaggaattaaattcaataggctcttctcagtgaacaggttttaatgttgttttgatgtaattttaaaagacttttagcaaacatgcatttctttatatgatatatttcttttacgaagctattttaaaagtaagccaagtgctgtctagtctgcttataaagtaggaattgcatcagagtacatatattcttgctgtacaatgcctgtgatgttgaggagggttcttttttaaagtgtatgcttgagtaactgactctatggagtctataaatgcactgacttcttgtttgtaccccaaaatgatcgaattgttaagtacaaaattaagctaattaaccaatttgtaaccattttttcactcataaacagctactcaatactagacaattttgttttttatgtatgtgtatgtacgtaaatacatacatattaatttacattagagtgaaaaataaatggtttgtttctgaagttagtttcttaagtgagttttcaggtgtctctgaaaaatttataacaatcatgtattatatgtgctgtaacatcatgtacgttacctccatctattttaggatattttcctcacctatatattatagggagaataatttagatacacatgctcagagctgagatatttctctgataaatcaggtaacaaaatgtatttgattgatggaattttgaagtaaatgtgtttttatccatcagtttctgagtaacaaagagcaccaagttttaatttaaataggagatttaacactagggatcagggagtttagtatgaagagttaaaaaaatttaaaaaacagtgtaagctgttgaaatggcaagtgaattattttaatgatgtaataaaatatttttaaattttgacatagtgatcatttaatgaaaaaactcaccaaaatgtctccatttgaattgtattgataatgtgggacatatgtgtgattcaatatatacatatacccatatgtatatacagaaaattatttttaatactttcctactgataatgaaatttaaaattggaaattttgtgagtgtttttcttgtccaatagagcctaattgtttccttttttagtgatttaacaatctcttgagggctgcacctttaaattcccagattgtcaatagacatgtacagtatatgggataaggtggacacaagtgcacatataaataaaatcttcttaagacttttaactattcatttacagtaggagagtatgtagaaatcatcatccacaagtcataattaggttgtgtgcctactgtagttttttccatttctgtattatataaacatttgcatattaaaatttgatttttcccagagacaagtattatatactgtatctatatttaaatcaaactgtggtaatatatttctcagaaaataatgttggggactatagcctgaacatgtggacttgaagcgacatggaggaggaggttgatcccattgtgtataagttaatatgtgataactattgaatcttgtacaaaaacaaaaattgaaaaaaaaaaagaaaagcaaaaatacagtttttattttgaaatacatttgttctctggagaatgtactttatctttttttcctccagtcttttacagatatttaaaagcatttaaatgatgacagcatttacttaaatctttcaggtgctactggattttgcattagtgtgttatgttgtgaaatcctaactttgacataaaaggttttataagtattcccctgcctggaaaattagtttttgttctcctctctctctctttctcttttccactttctttctgcagactaaaacatgctcacgaagttgcatctctccttgtctctatagaagatctccagcaccatcatagatttgatgttctgctgtcattgaactgttgggaagcagttagaggaaaagctcactttttttttcaggtggaaataaaaggaacactcaaaattaagccaacaccaccactacctttaaaaactagtttatttgccctgttaaaattaaatgtattctttaacatg

SEQ ID NO: 52030 - DNA, 3681 bp, Homo sapiens
gagccggcaccctctctctgggtgcttggtgtctgctggtggctggcagtgggcgcagcggaggagagttgtgctgcagctcatacggtgtgtctgtcatctcagtctggagtaaatgcagtgtctgccggtgtctgatgggttctgtccctcgtaatttctgtgcccttgaaatgggcacagaaattgaaggaagaggaaatagaaaggttaaaacaagaaattgataatgccagagaactacaagaacagagggattctttgactcagaaactacaggaagtagaaattcggaacaaagacctggagggacaactgtctgacttagagcaacgtctggagaaaagtcagaatgaacaagaagcttttcgcaataacctgaagacactcttagaaattctggatggaaagatatttgaactaacagaattacgagataacttggccaagctactagaatgcagctaaggaaagtgaaatttcagtgccaattaattaaaagatacactgtctctcttcataggactgtttaggctctgcatcaagattgcacaaaaaaaaaaaaaaaaaaattgaatatcactcctccaggaggaggatcttttgaaattggaattgtatatttcactgtaaattttagaatccagcttgtagctagttggggaaaaaagatgaaaaacttgaactacaaattacctccatgtatattattggccatagttaactagaaagttataaatagacacttaatgcaatcttttttcctgatattagccaatgggagaattaacaatgtctaggtcacatcccctttttgtgttcaacacagtgaagattatctgctttttaaattaatttatttacgatatctagagctgtgttttgtgcaaaaacttagtgatgaaagcctgtcttttgttgtaatctgaataatttctcaggatatttttgcactgctgagaagcagtgccattaccaattaattcttgccaggagtgagagagagctgtatctttaattgaaatatactataactgggtgtatagagttcttcccttttttgtgctggaagatatttcactctggtgactactctggtacactctggtgttctctaatcttgtctgttgtatagtttacttttccatattgattccatgtatttatgagaagatattgtctcccattttattacacattttaaagccaactaacgaaggcagctgagtccctcagaaatttttctttttaagtttctaataaatttgacacacagtactgaaatacagcagcccgtcattgacaggctggtctagcaatgttaagtatatttacagaatatgcagttacatttatttatatattttgcaagaaatcttttctgaatgatcaatgcatttcaatttacgaataataatggttattggggaactgtttattatagataattttaaggtgtatagctattttaaagggggtccatttacatcaaacagccgatcagaggactctatctaaattgtgatcgtggcagatagagatggagtcatgtactctatctggctctacacatcaatcacatcttgattcaaacctcacaaggcaatattctgaattgttaactaggtatttcaaaacaggaattaaattcaataggctcttctcagtgaacaggttttaatgttgttttgatgtaattttaaaagacttttagcaaacatgcatttctttatatgatatatttcttttacgaagctattttaaaagtaagccaagtgctgtctagtctgcttataaagtaggaattgcatcagagtacatatattcttgctgtacaatgcctgtgatgttgaggagggttcttttttaaagtgtatgcttgagtaactgactctatggagtctataaatgcactgacttcttgtttgtaccccaaaatgatcgaattgttaagtacaaaattaagctaattaaccaatttgtaaccattttttcactcataaacagctactcaatactagacaattttgttttttatgtatgtgtatgtacgtaaatacatacatattaatttacattagagtgaaaaataaatggtttgtttctgaagttagtttcttaagtgagttttcaggtgtctctgaaaaatttataacaatcatgtattatatgtgctgtaacatcatgtacgttacctccatctattttaggatattttcctcacctatatattatagggagaataatttagatacacatgctcagagctgagatatttctctgataaatcaggtaacaaaatgtatttgattgatggaattttgaagtaaatgtgtttttatccatcagtttctgagtaacaaagagcaccaagttttaatttaaataggagatttaacactagggatcagggagtttagtatgaagagttaaaaaaatttaaaaaacagtgtaagctgttgaaatggcaagtgaattattttaatgatgtaataaaatatttttaaattttgacatagtgatcatttaatgaaaaaactcaccaaaatgtctccatttgaattgtattgataatgtgggacatatgtgtgattcaatatatacatatacccatatgtatatacagaaaattatttttaatactttcctactgataatgaaatttaaaattggaaattttgtgagtgtttttcttgtccaatagagcctaattgtttccttttttagtgatttaacaatctcttgagggctgcacctttaaattcccagattgtcaatagacatgtacagtatatgggataaggtggacacaagtgcacatataaataaaatcttcttaagacttttaactattcatttacagtaggagagtatgtagaaatcatcatccacaagtcataattaggttgtgtgcctactgtagttttttccatttctgtattatataaacatttgcatattaaaatttgatttttcccagagacaagtattatatactgtatctatatttaaatcaaactgtggtaatatatttctcagaaaataatgttggggactatagcctgaacatgtggacttgaagcgacatggaggaggaggttgatcccattgtgtataagttaatatgtgataactattgaatcttgtacaaaaacaaaaattgaaaaaaaaaaagaaaagcaaaaatacagtttttattttgaaatacatttgttctctggagaatgtactttatctttttttcctccagtcttttacagatatttaaaagcatttaaatgatgacagcatttacttaaatctttcaggtgctactggattttgcattagtgtgttatgttgtgaaatcctaactttgacataaaaggttttataagtattcccctgcctggaaaattagtttttgttctcctctctctctctttctcttttccactttctttctgcagactaaaacatgctcacgaagttgcatctctccttgtctctatagaagatctccagcaccatcatagatttgatgttctgctgtcattgaactgttgggaagcagttagaggaaaagctcactttttttttcaggtggaaataaaaggaacactcaaaattaagccaacaccaccactacctttaaaaactagtttatttgccctgttaaaattaaatgtattctttaacatg

SEQ ID NO: 52031 - DNA, 2448 bp, Homo sapiens
ggcgctggagcggcggctgcgcttcggcttcgagcccagctctcctggccccaacgcgggcttagcctcccgccttggctcgggcaggcgcccgtcgacccttcggcccctttcgcccgccctggagctgggggcagggtgccagtggaagcgtggggcttggctctgtgattcattcattctccgccgacgggagcctcagacccgctgtgctctgaagagaggagggaagagggggcagccgcgaatgaagggccgggcaccagccgggctccattgtgctcggcggcggggggcgggaaggggctgagggaggtgggatcgggtcccctcctccagctctccggcgtgcgctgcgcccccagcctgctgccagcctggaaatggctccgtttattctcttcgggagaatgaatcgatcctgcctagccttctcttcgtcctccccacctcttctctgctccgagtcttaggaggagaaacatttaaaaagacagattccaatgtggagtgccgtgcaggttgcgagctgccgggtttgcacttcgaggagattttcctgtgtagtttttttcctaatgtgagcgcagggaagccgtggcattactgcttttgggatttttattcacgtgcacgtcgcgtttggttgctcgctccacccccggagacctggtgtggtggagaaatttgaacccgcagccttagctccgaaaaggccgagttacctggctctccctgagtgtcgaggaggacatgagtgaaatgaccagcgaactcattttttataggactcggtgaagccggattctgcatttccctacttgtagactcattttgtggaatagagttgatcgctgtctcctccgcaaagcattttaactcgaataagcaaatgccgcctctgtttgaacgttttggtatttacaagagagaaatcattttacctaagagaactaattgaattggcagcatccttgaaatacctccggacaaggatctgggggtgggggtggaaaagcaactgcgaaatagcagacggagaaattcctttggaagttattccgtagcataagagctgaaacttcagagcaagttttcattgggcaaaatgggggaacaacctatcttcagcactcgagctcatgtcttccaaattgacccaaacacaaagaagaactgggtacccaccagcaagcatgcagttactgtgtcttatttctatgacagcacaagaaatgtgtataggataatcagtttagatggctcaaaggcaataataaatagtaccatcaccccaaacatgacatttactaaaacatctcagaagtttggccagtgggctgatagccgggcaaacaccgtttatggattgggattctcctctgagcatcatctttcgaaatttgcagaaaagtttcaggaatttaaagaagctgctcgactagcaaaggaaaaatcacaagagaagatggaacttaccagtacaccttcacaggaatccgcaggcggggatcttcagtctcctttaacaccggaaagtatcaacgggacagatgatgaaagaacacctgatgtgacacagaactcagagccaagggctgaaccaactcagaatgcattgccattttcacatagttcagcaatcagcaaacattgggaggctgaactggctaccctcaaaggaaataatgccaaactcactgcagccctgctggagtccactgccaatgtgaaacaatggaaacagcaacttgctgcctatcaagaggaagcagaacgtctgcacaagcgggtgactgaacttgaatgtgttagtagccaagcaaatgcagtacatactcataagacagaattaaatcagacaatacaagaactggaagagacactgaaactgaaggaagaggaaatagaaaggttaaaacaagaaattgataatgccagagaactacaagaacagagggattctttgactcagaaactacaggaagtagaaattcggaacaaagacctggagggacaactgtctgacttagagcaacgtctggagaaaagtcagaatgaacaagaagcttttcgcaataacctgaagacactcttagaaattctggatggaaagatatttgaactaacagaattacgagataacttggccaagctactagaatgcagctaaggaaagtgaaatttcagtgccaatttcaacctaggggatccttattaaaaattacctgtgggccggcagattcattcctaggtaggttttttgttgttgttgtttgtttgtttgtttgttttgagatctcggcttactgcaacctcggttcactgcaacctccgcctcccaggttcacgccattctccttcctcagccttcctagtggctgggattacaggtgcgcaccaccacccccaggtaatttttcattttaataagatggaccgagctca

SEQ ID NO: 52032 - DNA, 2116 bp, Homo sapiens
ggcgctggagcggcggctgcgcttcggcttcgagcccagctctcctggccccaacgcgggcttagcctcccgccttggctcgggcaggcgcccgtcgacccttcggcccctttcgcccgccctggagctgggggcagggtgccagtggaagcgtggggcttggctctgtgattcattcattctccgccgacgggagcctcagacccgctgtgctctgaagagaggagggaagagggggcagccgcgaatgaagggccgggcaccagccgggctccattgtgctcggcggcggggggcgggaaggggctgagggaggtgggatcgggtcccctcctccagctctccggcgtgcgctgcgcccccagcctgctgccagcctggaaatggctccgtttattctcttcgggagaatgaatcgatcctgcctagccttctcttcgtcctccccacctcttctctgctccgagtcttaggaggagaaacatttaaaaagacagattccaatgtggagtgccgtgcaggttgcgagctgccgggtttgcacttcgaggagattttcctgtgtagtttttttcctaatgtgagcgcagggaagccgtggcattactgcttttgggatttttattcacgtgcacgtcgcgtttggttgctcgctccacccccggagacctggtgtggtggagaaatttgaacccgcagccttagctccgaaaaggccgagttacctggctctccctgagtgtcgaggaggacatgagtgaaatgaccagcgaactcattttttataggactcggtgaagccggattctgcatttccctacttgtagactcattttgtggaatagagttgatcgctgtctcctccgcaaagcattttaactcgaataagcaaatgccgcctctgtttgaacgttttggtatttacaagagagaaatcattttacctaagagaactaattgaattggcagcatccttgaaatacctccggacaaggatctgggggtgggggtggaaaagcaactgcgaaatagcagacggagaaattcctttggaagttattccgtagcataagagctgaaacttcagagcaagttttcattgggcaaaatgggggaacaacctatcttcagcactcgagctcatgtcttccaaattgacccaaacacaaagaagaactgggtacccaccagcaagcatgcagttactgtgtcttatttctatgacagcacaagaaatgtgtataggataatcagtttagatggctcaaaggcaataataaatagtaccatcaccccaaacatgacatttactaaaacatctcagaagtttggccagtgggctgatagccgggcaaacaccgtttatggattgggattctcctctgagcatcatctttcgaaatttgcagaaaagtttcaggaatttaaagaagctgctcgactagcaaaggaaaaatcacaagagaagatggaacttaccagtacaccttcacaggaatccgcaggcggggatcttcagtctcctttaacaccggaaagtatcaacgggacagatgatgaaagaacacctgatgtgacacagaactcagagccaagggctgaaccaactcagaatgcattgccattttcacatagttcagcaatcagcaaacattgggaggctgaactggctaccctcaaaggaaataatgccaaactcactgcagccctgctggagtccactgccaatgtgaaacaatggaaacagcaacttgctgcctatcaagaggaagcagaacgtctgcacaagcgggtaatttcagggctgatgtctatagggatttagggctaacaggttttcttgatcagaagaaatttgcatgtagattcagcacagggatatcttctagttctaggatgtcagaacatagatatgggttgtatgatatgcatttgtttgattaagaaaaatattttccatagtttaatgagaatgaagaatatacgccttttgaagtcaacaaaccatgttgattccccatattatccatggggactagcagtaatgcacaagtacataaaagcactaatgtattagtgctagttgattagtactgacatggtagttaaagtgtgt

SEQ ID NO: 52033 - DNA, 433 bp, Homo sapiens
atatcgaggttatctctgccagatcacaagtgtggctggtgtcattctgggtctgactggagccctccatggactgtattctttaattacaaaagccctgcagacatagtacctggtcagaactatgcctcggtttatttatcattttgaaatataatcagaatttctgtgcccatttcattgaaatgggcacagaaattgaaggaagaggaaatagaaaggttaaaacaagaaattgataatgccagagaactacaagaacagagggattctttgactcagaaactacaggaagtagaaattcggaacaaagacctggagggacaactgtctgacttagagcaacgtctggagaaaagtcagaatcgacgtgaaacctcagcaattcctagtcacaatgttgtaagatcgatcgatcgatgaatagctgtga

SEQ ID NO: 52034 - DNA, 273 bp, Homo sapiens
caaaatacttcatagtgcacagacaactgtttggaattaggtttcatttcctgtcattttcatattagaagctataattggtttggaggctatattgcttgtgtagagtcagttattcagaaaatgaataactttactaaggtaaaagtgggcactgtgacctatttttatttggttaatgtatgtagtctctatacattcagtttgcagaaaagtttcaggaatttaaagaagctgctcgactagcaaaggaaaaatcacaagagaagatgg

SEQ ID NO: 52035 - DNA, 599 bp, Homo sapiens
tgcttaggtgactctagagatccccttaaatgggcacagaaattgaaggaagaggaaatagaaaggttaaaacaagaaattgataatgccagagaactacaagaacagagggattctttgactcagaaactacaggaagtagaaattcggaacaaagacctggagggacaactgtctgacttagagcaacgtctggagaaaagtcagaatgaacaagaagcttttcgcaataacctgaagacactcttagaaattctggatggaaagatatttgaactaacagaattacgagataacttggccaagctactagaatgcagctaaggaaagtgaaatttcagtgccaatttcaacctaggggatccttattaaaaattacctgtgggccggcagattcattcctaggtaggttttttgttgttgttgtttgtttgtttgtttgttttgagatctcggcttactgcaacctcggttcactgcaacctccgcctcccaggttcacgccattctccttcctcagccttcctagtggctgggattacaggtgcgcaccaccacccccaggtaatttttcattttaataagatggaccgagctca

SEQ ID NO: 52036 - DNA, 4915 bp, Homo sapiens
ggcgctggagcggcggctgcgcttcggcttcgagcccagctctcctggccccaacgcgggcttagcctcccgccttggctcgggcaggcgcccgtcgacccttcggcccctttcgcccgccctggagctgggggcagggtgccagtggaagcgtggggcttggctctgtgattcattcattctccgccgacgggagcctcagacccgctgtgctctgaagagaggagggaagagggggcagccgcgaatgaagggccgggcaccagccgggctccattgtgctcggcggcggggggcgggaaggggctgagggaggtgggatcgggtcccctcctccagctctccggcgtgcgctgcgcccccagcctgctgccagcctggaaatggctccgtttattctcttcgggagaatgaatcgatcctgcctagccttctcttcgtcctccccacctcttctctgctccgagtcttaggaggagaaacatttaaaaagacagattccaatgtggagtgccgtgcaggttgcgagctgccgggtttgcacttcgaggagattttcctgtgtagtttttttcctaatgtgagcgcagggaagccgtggcattactgcttttgggatttttattcacgtgcacgtcgcgtttggttgctcgctccacccccggagacctggtgtggtggagaaatttgaacccgcagccttagctccgaaaaggccgagttacctggctctccctgagtgtcgaggaggacatgagtgaaatgaccagcgaactcattttttataggactcggtgaagccggattctgcatttccctacttgtagactcattttgtggaatagagttgatcgctgtctcctccgcaaagcattttaactcgaataagcaaatgccgcctctgtttgaacgttttggtatttacaagagagaaatcattttacctaagagaactaattgaattggcagcatccttgaaatacctccggacaaggatctgggggtgggggtggaaaagcaactgcgaaatagcagacggagaaattcctttggaagttattccgtagcataagagctgaaacttcagagcaagttttcattgggcaaaatgggggaacaacctatcttcagcactcgagctcatgtcttccaaattgacccaaacacaaagaagaactgggtacccaccagcaagcatgcagttactgtgtcttatttctatgacagcacaagaaatgtgtataggataatcagtttagatggctcaaaggcaataataaatagtaccatcaccccaaacatgacatttactaaaacatctcagaagtttggccagtgggctgatagccgggcaaacaccgtttatggattgggattctcctctgagcatcatctttcgaaatttgcagaaaagtttcaggaatttaaagaagctgctcgactagcaaaggaaaaatcacaagagaagatggaacttaccagtacaccttcacaggaatccgcaggcggggatcttcagtctcctttaacaccggaaagtatcaacgggacagatgatgaaagaacacctgatgtgacacagaactcagagccaagggctgaaccaactcagaatgcattgccattttcacatagttcagcaatcagcaaacattgggaggctgaactggctaccctcaaaggaaataatgccaaactcactgcagccctgctggagtccactgccaatgtgaaacaatggaaacagcaacttgctgcctatcaagaggaagcagaacgtctgcacaagcgggtgactgaacttgaatgtgttagtagccaagcaaatgcagtacatactcataagacagaattaaatcagacaatacaagaactggaagagacactgaaactgaaggaagaggaaatagaaaggttaaaacaagaaattgataatgccagagaactacaagaacagagggattctttgactcagaaactacaggaagtagaaattcggaacaaagacctggagggacaactgtctgacttagagcaacgtctggagaaaagtcagaatgaacaagaagcttttcgcaataacctgaagacactcttagaaattctggatggaaagatatttgaactaacagaattacgagataacttggccaagctactagaatgcagctaaggaaagtgaaatttcagtgccaattaattaaaagatacactgtctctcttcataggactgtttaggctctgcatcaagattgcacaaaaaaaaaaaaaaaaaaattgaatatcactcctccaggaggaggatcttttgaaattggaattgtatatttcactgtaaattttagaatccagcttgtagctagttggggaaaaaagatgaaaaacttgaactacaaattacctccatgtatattattggccatagttaactagaaagttataaatagacacttaatgcaatcttttttcctgatattagccaatgggagaattaacaatgtctaggtcacatcccctttttgtgttcaacacagtgaagattatctgctttttaaattaatttatttacgatatctagagctgtgttttgtgcaaaaacttagtgatgaaagcctgtcttttgttgtaatctgaataatttctcaggatatttttgcactgctgagaagcagtgccattaccaattaattcttgccaggagtgagagagagctgtatctttaattgaaatatactataactgggtgtatagagttcttcccttttttgtgctggaagatatttcactctggtgactactctggtacactctggtgttctctaatcttgtctgttgtatagtttacttttccatattgattccatgtatttatgagaagatattgtctcccattttattacacattttaaagccaactaacgaaggcagctgagtccctcagaaatttttctttttaagtttctaataaatttgacacacagtactgaaatacagcagcccgtcattgacaggctggtctagcaatgttaagtatatttacagaatatgcagttacatttatttatatattttgcaagaaatcttttctgaatgatcaatgcatttcaatttacgaataataatggttattggggaactgtttattatagataattttaaggtgtatagctattttaaagggggtccatttacatcaaacagccgatcagaggactctatctaaattgtgatcgtggcagatagagatggagtcatgtactctatctggctctacacatcaatcacatcttgattcaaacctcacaaggcaatattctgaattgttaactaggtatttcaaaacaggaattaaattcaataggctcttctcagtgaacaggttttaatgttgttttgatgtaattttaaaagacttttagcaaacatgcatttctttatatgatatatttcttttacgaagctattttaaaagtaagccaagtgctgtctagtctgcttataaagtaggaattgcatcagagtacatatattcttgctgtacaatgcctgtgatgttgaggagggttcttttttaaagtgtatgcttgagtaactgactctatggagtctataaatgcactgacttcttgtttgtaccccaaaatgatcgaattgttaagtacaaaattaagctaattaaccaatttgtaaccattttttcactcataaacagctactcaatactagacaattttgttttttatgtatgtgtatgtacgtaaatacatacatattaatttacattagagtgaaaaataaatggtttgtttctgaagttagtttcttaagtgagttttcaggtgtctctgaaaaatttataacaatcatgtattatatgtgctgtaacatcatgtacgttacctccatctattttaggatattttcctcacctatatattatagggagaataatttagatacacatgctcagagctgagatatttctctgataaatcaggtaacaaaatgtatttgattgatggaattttgaagtaaatgtgtttttatccatcagtttctgagtaacaaagagcaccaagttttaatttaaataggagatttaacactagggatcagggagtttagtatgaagagttaaaaaaatttaaaaaacagtgtaagctgttgaaatggcaagtgaattattttaatgatgtaataaaatatttttaaattttgacatagtgatcatttaatgaaaaaactcaccaaaatgtctccatttgaattgtattgataatgtgggacatatgtgtgattcaatatatacatatacccatatgtatatacagaaaattatttttaatactttcctactgataatgaaatttaaaattggaaattttgtgagtgtttttcttgtccaatagagcctaattgtttccttttttagtgatttaacaatctcttgagggctgcacctttaaattcccagattgtcaatagacatgtacagtatatgggataaggtggacacaagtgcacatataaataaaatcttcttaagacttttaactattcatttacagtaggagagtatgtagaaatcatcatccacaagtcataattaggttgtgtgcctactgtagttttttccatttctgtattatataaacatttgcatattaaaatttgatttttcccagagacaagtattatatactgtatctatatttaaatcaaactgtggtaatatatttctcagaaaataatgttggggactatagcctgaacatgtggacttgaagcgacatggaggaggaggttgatcccattgtgtataagttaatatgtgataactattgaatcttggccctatgcgtcttctttattaaccatgaatcatcattaaagctgtttttaatttcaaatacaa

SEQ ID NO: 52037 - DNA, 3537 bp, Homo sapiens
tgcttaggtgactctagagatccccttaaatgggcacagaaattgaaggaagaggaaatagaaaggttaaaacaagaaattgataatgccagagaactacaagaacagagggattctttgactcagaaactacaggaagtagaaattcggaacaaagacctggagggacaactgtctgacttagagcaacgtctggagaaaagtcagaatgaacaagaagcttttcgcaataacctgaagacactcttagaaattctggatggaaagatatttgaactaacagaattacgagataacttggccaagctactagaatgcagctaaggaaagtgaaatttcagtgccaattaattaaaagatacactgtctctcttcataggactgtttaggctctgcatcaagattgcacaaaaaaaaaaaaaaaaaaattgaatatcactcctccaggaggaggatcttttgaaattggaattgtatatttcactgtaaattttagaatccagcttgtagctagttggggaaaaaagatgaaaaacttgaactacaaattacctccatgtatattattggccatagttaactagaaagttataaatagacacttaatgcaatcttttttcctgatattagccaatgggagaattaacaatgtctaggtcacatcccctttttgtgttcaacacagtgaagattatctgctttttaaattaatttatttacgatatctagagctgtgttttgtgcaaaaacttagtgatgaaagcctgtcttttgttgtaatctgaataatttctcaggatatttttgcactgctgagaagcagtgccattaccaattaattcttgccaggagtgagagagagctgtatctttaattgaaatatactataactgggtgtatagagttcttcccttttttgtgctggaagatatttcactctggtgactactctggtacactctggtgttctctaatcttgtctgttgtatagtttacttttccatattgattccatgtatttatgagaagatattgtctcccattttattacacattttaaagccaactaacgaaggcagctgagtccctcagaaatttttctttttaagtttctaataaatttgacacacagtactgaaatacagcagcccgtcattgacaggctggtctagcaatgttaagtatatttacagaatatgcagttacatttatttatatattttgcaagaaatcttttctgaatgatcaatgcatttcaatttacgaataataatggttattggggaactgtttattatagataattttaaggtgtatagctattttaaagggggtccatttacatcaaacagccgatcagaggactctatctaaattgtgatcgtggcagatagagatggagtcatgtactctatctggctctacacatcaatcacatcttgattcaaacctcacaaggcaatattctgaattgttaactaggtatttcaaaacaggaattaaattcaataggctcttctcagtgaacaggttttaatgttgttttgatgtaattttaaaagacttttagcaaacatgcatttctttatatgatatatttcttttacgaagctattttaaaagtaagccaagtgctgtctagtctgcttataaagtaggaattgcatcagagtacatatattcttgctgtacaatgcctgtgatgttgaggagggttcttttttaaagtgtatgcttgagtaactgactctatggagtctataaatgcactgacttcttgtttgtaccccaaaatgatcgaattgttaagtacaaaattaagctaattaaccaatttgtaaccattttttcactcataaacagctactcaatactagacaattttgttttttatgtatgtgtatgtacgtaaatacatacatattaatttacattagagtgaaaaataaatggtttgtttctgaagttagtttcttaagtgagttttcaggtgtctctgaaaaatttataacaatcatgtattatatgtgctgtaacatcatgtacgttacctccatctattttaggatattttcctcacctatatattatagggagaataatttagatacacatgctcagagctgagatatttctctgataaatcaggtaacaaaatgtatttgattgatggaattttgaagtaaatgtgtttttatccatcagtttctgagtaacaaagagcaccaagttttaatttaaataggagatttaacactagggatcagggagtttagtatgaagagttaaaaaaatttaaaaaacagtgtaagctgttgaaatggcaagtgaattattttaatgatgtaataaaatatttttaaattttgacatagtgatcatttaatgaaaaaactcaccaaaatgtctccatttgaattgtattgataatgtgggacatatgtgtgattcaatatatacatatacccatatgtatatacagaaaattatttttaatactttcctactgataatgaaatttaaaattggaaattttgtgagtgtttttcttgtccaatagagcctaattgtttccttttttagtgatttaacaatctcttgagggctgcacctttaaattcccagattgtcaatagacatgtacagtatatgggataaggtggacacaagtgcacatataaataaaatcttcttaagacttttaactattcatttacagtaggagagtatgtagaaatcatcatccacaagtcataattaggttgtgtgcctactgtagttttttccatttctgtattatataaacatttgcatattaaaatttgatttttcccagagacaagtattatatactgtatctatatttaaatcaaactgtggtaatatatttctcagaaaataatgttggggactatagcctgaacatgtggacttgaagcgacatggaggaggaggttgatcccattgtgtataagttaatatgtgataactattgaatcttgtacaaaaacaaaaattgaaaaaaaaaaagaaaagcaaaaatacagtttttattttgaaatacatttgttctctggagaatgtactttatctttttttcctccagtcttttacagatatttaaaagcatttaaatgatgacagcatttacttaaatctttcaggtgctactggattttgcattagtgtgttatgttgtgaaatcctaactttgacataaaaggttttataagtattcccctgcctggaaaattagtttttgttctcctctctctctctttctcttttccactttctttctgcagactaaaacatgctcacgaagttgcatctctccttgtctctatagaagatctccagcaccatcatagatttgatgttctgctgtcattgaactgttgggaagcagttagaggaaaagctcactttttttttcaggtggaaataaaaggaacactcaaaattaagccaacaccaccactacctttaaaaactagtttatttgccctgttaaaattaaatgtattctttaacatg

SEQ ID NO: 52038 - DNA, 3500 bp, Homo sapiens
acgggatccaggtcaccaaacggttttctggggatactgagtcacgactacagtaaatcatggtcctagacggtttcctggtgtgcaaaaaactacaggaagtagaaattcggaacaaagacctggagggacaactgtctgacttagagcaacgtctggagaaaagtcagaatgaacaagaagcttttcgcaataacctgaagacactcttagaaattctggatggaaagatatttgaactaacagaattacgagataacttggccaagctactagaatgcagctaaggaaagtgaaatttcagtgccaattaattaaaagatacactgtctctcttcataggactgtttaggctctgcatcaagattgcacaaaaaaaaaaaaaaaaaaattgaatatcactcctccaggaggaggatcttttgaaattggaattgtatatttcactgtaaattttagaatccagcttgtagctagttggggaaaaaagatgaaaaacttgaactacaaattacctccatgtatattattggccatagttaactagaaagttataaatagacacttaatgcaatcttttttcctgatattagccaatgggagaattaacaatgtctaggtcacatcccctttttgtgttcaacacagtgaagattatctgctttttaaattaatttatttacgatatctagagctgtgttttgtgcaaaaacttagtgatgaaagcctgtcttttgttgtaatctgaataatttctcaggatatttttgcactgctgagaagcagtgccattaccaattaattcttgccaggagtgagagagagctgtatctttaattgaaatatactataactgggtgtatagagttcttcccttttttgtgctggaagatatttcactctggtgactactctggtacactctggtgttctctaatcttgtctgttgtatagtttacttttccatattgattccatgtatttatgagaagatattgtctcccattttattacacattttaaagccaactaacgaaggcagctgagtccctcagaaatttttctttttaagtttctaataaatttgacacacagtactgaaatacagcagcccgtcattgacaggctggtctagcaatgttaagtatatttacagaatatgcagttacatttatttatatattttgcaagaaatcttttctgaatgatcaatgcatttcaatttacgaataataatggttattggggaactgtttattatagataattttaaggtgtatagctattttaaagggggtccatttacatcaaacagccgatcagaggactctatctaaattgtgatcgtggcagatagagatggagtcatgtactctatctggctctacacatcaatcacatcttgattcaaacctcacaaggcaatattctgaattgttaactaggtatttcaaaacaggaattaaattcaataggctcttctcagtgaacaggttttaatgttgttttgatgtaattttaaaagacttttagcaaacatgcatttctttatatgatatatttcttttacgaagctattttaaaagtaagccaagtgctgtctagtctgcttataaagtaggaattgcatcagagtacatatattcttgctgtacaatgcctgtgatgttgaggagggttcttttttaaagtgtatgcttgagtaactgactctatggagtctataaatgcactgacttcttgtttgtaccccaaaatgatcgaattgttaagtacaaaattaagctaattaaccaatttgtaaccattttttcactcataaacagctactcaatactagacaattttgttttttatgtatgtgtatgtacgtaaatacatacatattaatttacattagagtgaaaaataaatggtttgtttctgaagttagtttcttaagtgagttttcaggtgtctctgaaaaatttataacaatcatgtattatatgtgctgtaacatcatgtacgttacctccatctattttaggatattttcctcacctatatattatagggagaataatttagatacacatgctcagagctgagatatttctctgataaatcaggtaacaaaatgtatttgattgatggaattttgaagtaaatgtgtttttatccatcagtttctgagtaacaaagagcaccaagttttaatttaaataggagatttaacactagggatcagggagtttagtatgaagagttaaaaaaatttaaaaaacagtgtaagctgttgaaatggcaagtgaattattttaatgatgtaataaaatatttttaaattttgacatagtgatcatttaatgaaaaaactcaccaaaatgtctccatttgaattgtattgataatgtgggacatatgtgtgattcaatatatacatatacccatatgtatatacagaaaattatttttaatactttcctactgataatgaaatttaaaattggaaattttgtgagtgtttttcttgtccaatagagcctaattgtttccttttttagtgatttaacaatctcttgagggctgcacctttaaattcccagattgtcaatagacatgtacagtatatgggataaggtggacacaagtgcacatataaataaaatcttcttaagacttttaactattcatttacagtaggagagtatgtagaaatcatcatccacaagtcataattaggttgtgtgcctactgtagttttttccatttctgtattatataaacatttgcatattaaaatttgatttttcccagagacaagtattatatactgtatctatatttaaatcaaactgtggtaatatatttctcagaaaataatgttggggactatagcctgaacatgtggacttgaagcgacatggaggaggaggttgatcccattgtgtataagttaatatgtgataactattgaatcttgtacaaaaacaaaaattgaaaaaaaaaaagaaaagcaaaaatacagtttttattttgaaatacatttgttctctggagaatgtactttatctttttttcctccagtcttttacagatatttaaaagcatttaaatgatgacagcatttacttaaatctttcaggtgctactggattttgcattagtgtgttatgttgtgaaatcctaactttgacataaaaggttttataagtattcccctgcctggaaaattagtttttgttctcctctctctctctttctcttttccactttctttctgcagactaaaacatgctcacgaagttgcatctctccttgtctctatagaagatctccagcaccatcatagatttgatgttctgctgtcattgaactgttgggaagcagttagaggaaaagctcactttttttttcaggtggaaataaaaggaacactcaaaattaagccaacaccaccactacctttaaaaactagtttatttgccctgttaaaattaaatgtattctttaacatg

SEQ ID NO: 52039 - DNA, 1579 bp, Homo sapiens
ggcgctggagcggcggctgcgcttcggcttcgagcccagctctcctggccccaacgcgggcttagcctcccgccttggctcgggcaggcgcccgtcgacccttcggcccctttcgcccgccctggagctgggggcagggtgccagtggaagcgtggggcttggctctgtgattcattcattctccgccgacgggagcctcagacccgctgtgctctgaagagaggagggaagagggggcagccgcgaatgaagggccgggcaccagccgggctccattgtgctcggcggcggggggcgggaaggggctgagggaggtgggatcgggtcccctcctccagctctccggcgtgcgctgcgcccccagcctgctgccagcctggaaatggctccgtttattctcttcgggagaatgaatcgatcctgcctagccttctcttcgtcctccccacctcttctctgctccgagtcttaggaggagaaacatttaaaaagacagattccaatgtggagtgccgtgcaggttgcgagctgccgggtttgcacttcgaggagattttcctgtgtagtttttttcctaatgtgagcgcagggaagccgtggcattactgcttttgggatttttattcacgtgcacgtcgcgtttggttgctcgctccacccccggagacctggtgtggtggagaaatttgaacccgcagccttagctccgaaaaggccgagttacctggctctccctgagtgtcgaggaggacatgagtgaaatgaccagcgaactcattttttataggactcggtgaagccggattctgcatttccctacttgtagactcattttgtggaatagagttgatcgctgtctcctccgcaaagcattttaactcgaataagcaaatgccgcctctgtttgaacgttttggtatttacaagagagaaatcattttacctaagagaactaattgaattggcagcatccttgaaatacctccggacaaggatctgggggtgggggtggaaaagcaactgcgaaatagcagacggagaaattcctttggaagttattccgtagcataagagctgaaacttcagagcaagttttcattgggcaaaatggggtaaggatttttgtgcttaacacagcttcgaatctgtttatgtatgtgtattattgagcggtggtggtgattgtgttttgtgttttcaaacaaacttgccaccttgctaagctggtcatactttaaagaaataggcatgctaaccttttaggttatttttgcatttttgtagagcggtaccagaggtcataatttaaaaacacatatatcgtttgtaacttgaatatggatttgtgagtaatgtttacaaagacaacgcattctacactttactggtcagactgctgcatcagtttgtaatcaaaatcacattattttagcttttgctgacggttatctttcaaagagaagtactgcattctctcagtacttttagataatcagttgcacaaaggaacgattttaatgagtggttagacaacagtccttgaaagtgatccagagtaaattgttgccctcaccgtgc

SEQ ID NO: 52040 - DNA, 1705 bp, Homo sapiens
gcagtgaggggggtcggcgcgcgtgtctacgcggacgcaccggctaagctgcttctgccgccgccggccgcctgggaccttgcggtgaggctgcgcggggccgaggccgcctccgagcgccaggtttattcagtcaccatgaagctgctgctgctgcacccggccttccagagctgcctcctgctgaccctgcttggcttatggagaaccacccctgaggctcacgcttcatccccgggtgcaccagctatcagcgctgcctccttcctgcaggatctaatacatcggtatggcgagggtgacagcctcactctgcagcagctgaaggccctgctcaaccacctggatgtgggagtgggccggggtaatgtcacccagcacgtgcaaggacacaggaacctctccacgtgctttagttctggagacctcttcactgcccacaatttcagcgagcagtcgcggattgggagcagcgagctccaggagttctgccccaccatcctccagcagctggattcccgggcctgcacctcggagaaccaggaaaacgaggagaatgagcagacggaggaggggcggccaagcgctgttgaagtgtggggatacggtctcctctgtgtgaccgtcatctccctctgctccctcctgggggccagcgtggtgcccttcatgaagaagaccttttacaagaggctgctgctctacttcatagctctggcgattggaaccctctactccaacgccctcttccagctcatcccggaggcatttggtttcaaccctctggaagattattatgtctccaagtctgcagtggtgtttgggggcttttatcttttctttttcacagagaagatcttgaagattcttcttaagcagaaaaatgagcatcatcatggacacagccattatgcctctgagtcgcttccctccaagaaggaccaggaggagggggtgatggagaagctgcagaacggggacctggaccacatgattcctcagcactgcagcagtgagctggacggcaaggcgcccatggtggacgagaaggtcattgtgggctcgctctctgtgcaggacctgcaggcttcccagagtgcttgctactggctgaaaggtgtccgctactctgatatcggcactctggcctggatgatcactctgagcgacggcctccataatttcatcgatggcctggccatcggtgcttccttcactgtgtcagttttccaaggcatcagcacctcggtggccatcctctgtgaggagttcccacatgagctaggagactttgtcatcctgctcaacgctgggatgagcatccaacaagctctcttcttcaacttcctttctgcctgctgctgctacctgggtctggcctttggcatcctggccggcagccacttctctgccaactggatttttgcgctagctggaggaatgttcttgtatatttctctggctgatatgatggagttttgctctgttgcccaggctggagtgcaatggtgccatctcagctcactgcaacctctgccgcttgggttgaagcgattatcctgtctaagcctcccgagtaactgagccagccatgtttgttaataaaaatggggacaatactgtatatatatggttatattttagctttttcacttttcagtatctcctgaggcttttctcatgtcattaaatatttttctaattt

SEQ ID NO: 52041 - DNA, 4545 bp, Homo sapiens
gcagtgaggggggtcggcgcgcgtgtctacgcggacgcaccggctaagctgcttctgccgccgccggccgcctgggaccttgcggtgaggctgcgcggggccgaggccgcctccgagcgccaggtttattcagtcaccatgaagctgctgctgctgcacccggccttccagagctgcctcctgctgaccctgcttggcttatggagaaccacccctgaggctcacgcttcatccccgggtgcaccagctatcagcgctgcctccttcctgcaggatctaatacatcggtatggcgagggtgacagcctcactctgcagcagctgaaggccctgctcaaccacctggatgtgggagtgggccggggtaatgtcacccagcacgtgcaaggacacaggaacctctccacgtgctttagttctggagacctcttcactgcccacaatttcagcgagcagtcgcggattgggagcagcgagctccaggagttctgccccaccatcctccagcagctggattcccgggcctgcacctcggagaaccaggaaaacgaggagaatgagcagacggaggaggggcggccaagcgctgttgaagtgtggggatacggtctcctctgtgtgaccgtcatctccctctgctccctcctgggggccagcgtggtgcccttcatgaagaagaccttttacaagaggctgctgctctacttcatagctctggcgattggaaccctctactccaacgccctcttccagctcatcccggaggcatttggtttcaaccctctggaagattattatgtctccaagtctgcagtggtgtttgggggcttttatcttttctttttcacagagaagatcttgaagattcttcttaagcagaaaaatgagcatcatcatggacacagccattatgcctctgagtcgcttccctccaagaaggaccaggaggagggggtgatggagaagctgcagaacggggacctggaccacatgattcctcagcactgcagcagtgagctggacggcaaggcgcccatggtggacgagaaggtcattgtgggctcgctctctgtgcaggacctgcaggcttcccagagtgcttgctactggctgaaaggtgtccgctactctgatatcggcactctggcctggatgatcactctgagcgacggcctccataatttcatcgatggcctggccatcggtgcttccttcactgtgtcagttttccaaggcatcagcacctcggtggccatcctctgtgaggagttcccacatgagctaggagactttgtcatcctgctcaacgctgggatgagcatccaacaagctctcttcttcaacttcctttctgcctgctgctgctacctgggtctggcctttggcatcctggccggcagccacttctctgccaactggatttttgcgctagctggaggaatgttcttgtatatttctctggctgatatgttccctgagatgaatgaggtctgtcaagaggatgaaaggaagggcagcatcttgattccatttatcatccagaacctgggcctcctgactggattcaccatcatggtggtcctcaccatgtattcaggacagatccagattgggtagggctctgccaagagcctgtgggactggaagtcgggccctgggctgcccgatcgccagcccgaggacttaccatccacaatgcaccacggaagaggccgttctatgaaaaactgacacagactgtattcctgcattcaaatgtcagccgtttgtaaaatgctgtatcctaggaataagctgccctggtaaccagtctctagctagtgcctcttgccctctcctcacctccttttctctcagtgactctggaacctgaatgcagcttacaagacaagcctgacttttttctctgattaccttggcctcctcttggaaccagtgctgaaaggttttgaatcctttacccaacaatgcaaaaatagagccaatggttataacttggctagaaatatcaagagttgaatccatagtgtggggcccatgactctagctgggcaccttggacctccagctggccaatagaagagacaggagacaggaagccttcccattttttcaaagtctgtttaattgcctattacttctctcaaagagaacctgaagtcagaacacatgagcagggtgagaggtgaggcaaggttcatcctgaatgggagaggaagtcgaaccactgctgtgtgtcttgtcaggatgctcacttgttcctactgagatgctggatattgattttgtaacagcacctggtgtttcacggctgtccgagtgagctaacgtggcggtgtggctgcctggacctcctctttcaggttaacgctgacagaatggaggctcaggctgtctgcaagaaaacagttggtttggctgtgattttgacctcctcttccccactgccatcttctaagagactttgtagctgcctcctagaagcacattctgagcacatttgagacctctgtgttagaggggagactgcacaaactatcctcccccaggttgagacgtctgcagagtggcaagctgacttgtagaaatggggtgccatttatgctctacttagacaagggtaatcagaaatggaatcagtgcaggcaaaatttaggatttgccgcttccataaatcaaagcatgactaatagggggtctctgaaatgtaagggcacaaacttcacttagggcatcgcagatgtttgcagaatggttggcctaatgattatgctacagatgggttttaaatgacccgtctaggttactgcttccttgcaaaaaaagtcgaatcctgcattgaattgaatatgaatttctctaactctctccagaaaatggatggagataacttgtcttttcaaggggagctcttctccaggttcactaggtgaattgatttattattatcatattgataatgtgagattctttagccactttggggagcctgtctctccagaagcctttcttagtggtgcccacagttggagcccaggggccatgtttgcaaactgattcatgtgcatggctgacaggagtactggttcactaccaatgcctgagcttttctcttacatagaaaaactgtccactctcagtaatcacaagcagcatccgttttgttttctcttcttgggagacatctgtcaaaccaggaatattcttgaaaagaacgtgagcaggaaaaactgctggtgatactttttttaagttttgtttttatcttgcctgttggcttcaatacatttgagaatacgctgaagagggaaaatttcagtgatggagattctagattaaatatcaggactgatttcctggtgggattatggtccagttttaccaaagaaccaattccttgaatgttggaatctaactttttatattgtcattattattgttgtttttaaacggttctttgtcttttctgttttatttttctcaagctgctttcaggagctagcagaaaataactcaaagttgaagactctggaagattttgctttaacctaactcgcattgatgtattaaatttataattttagcattcccaatagatcctatcattccttaaacataataccctttgtcttggagtagaatactaagttagagttagtggatttctagtttaggagaggagctcaaaactataatctttaacaaattgaaaaatgaaatagggtgttttccctttttgtgcacacctatattaccttaagaaatttccttccatagacagctgcctcaaagggaaatcctctttaaaccgtagttggcgcagaggtcagtcctagtcggagcttaggaggggcggagacgctcacatcgtctgacttgagtcgccactgattgtggcaacagctttgcctcatgagtcaaaaattggcaatttcttttgatttttagttgttgaatttgctgtttcaagcatttgtacatattagaagtctaaggagtagcaagtcagtgggaggactttttcacccctggcattagcagcttcgacctcattttccagatgcaccagctcctattaataagttagcaaggaaagtgtatgtcacgtgcaggaacagtgaggcagggacaggggttctgctccttctcacttcaccaccggcacacagcttgcccctgtctttgcccccaaaggtattttgtgtctagtgtcaaattggagctattcttcactggtccttaaccttgggttttaaaaagaaggcttctctgtttgggtagcgtaagagctgagtatagtaagtcctcttccaaagagatggcaatatgctgggcatctactttaaaacaaagttgtctgatttttgcaagagaggttaggattttattgttcttatttccctttacagttctgcagttccatcacagtatttttttaaataactcaggtgtatgagaagaaattagaaaagaaaattaacttatgtggactgtaaatgttttatttgtaagattctataaataaagctatattctgtaattgtt

SEQ ID NO: 52042 - DNA, 3185 bp, Homo sapiens
atcgctaggtacgaggctgcgctgagggatgtcttgtatatttctctggcttgatattccctgagatgaatgaggtctgtcaagaggatgaaaggaagggcagcatcttgattccatttatcatccagaacctgggcctcctgactggattcaccatcatggtggtcctcaccatgtattcaggacagatccagattgggtagggctctgccaagagcctgtgggactggaagtcgggccctgggctgcccgatcgccagcccgaggacttaccatccacaatgcaccacggaagaggccgttctatgaaaaactgacacagactgtattcctgcattcaaatgtcagccgtttgtaaaatgctgtatcctaggaataagctgccctggtaaccagtctctagctagtgcctcttgccctctcctcacctccttttctctcagtgactctggaacctgaatgcagcttacaagacaagcctgacttttttctctgattaccttggcctcctcttggaaccagtgctgaaaggttttgaatcctttacccaacaatgcaaaaatagagccaatggttataacttggctagaaatatcaagagttgaatccatagtgtggggcccatgactctagctgggcaccttggacctccagctggccaatagaagagacaggagacaggaagccttcccattttttcaaagtctgtttaattgcctattacttctctcaaagagaacctgaagtcagaacacatgagcagggtgagaggtgaggcaaggttcatcctgaatgggagaggaagtcgaaccactgctgtgtgtcttgtcaggatgctcacttgttcctactgagatgctggatattgattttgtaacagcacctggtgtttcacggctgtccgagtgagctaacgtggcggtgtggctgcctggacctcctctttcaggttaacgctgacagaatggaggctcaggctgtctgcaagaaaacagttggtttggctgtgattttgacctcctcttccccactgccatcttctaagagactttgtagctgcctcctagaagcacattctgagcacatttgagacctctgtgttagaggggagactgcacaaactatcctcccccaggttgagacgtctgcagagtggcaagctgacttgtagaaatggggtgccatttatgctctacttagacaagggtaatcagaaatggaatcagtgcaggcaaaatttaggatttgccgcttccataaatcaaagcatgactaatagggggtctctgaaatgtaagggcacaaacttcacttagggcatcgcagatgtttgcagaatggttggcctaatgattatgctacagatgggttttaaatgacccgtctaggttactgcttccttgcaaaaaaagtcgaatcctgcattgaattgaatatgaatttctctaactctctccagaaaatggatggagataacttgtctttaaaactgtaggccagccttagccactgtggagcccttgcctccgagctctggcttcaaggggagctcttctccaggttcactaggtgaattgatttattattatcatattgataatgtgagattctttagccactttggggagcctgtctctccagaagcctttcttagtggtgcccacagttggagcccaggggccatgtttgcaaactgattcatgtgcatggctgacaggagtactggttcactaccaatgcctgagcttttctcttacatagaaaaactgtccactctcagtaatcacaagcagcatccgttttgttttctcttcttgggagacatctgtcaaaccaggaatattcttgaaaagaacgtgagcaggaaaaactgctggtgatactttttttaagttttgtttttatcttgcctgttggcttcaatacatttgagaatacgctgaagagggaaaatttcagtgatggagattctagattaaatatcaggactgatttcctggtgggattatggtccagttttaccaaagaaccaattccttgaatgttggaatctaactttttatattgtcattattattgttgtttttaaacggttctttgtcttttctgttttatttttctcaagctgctttcaggagctagcagaaaataactcaaagttgaagactctggaagattttgctttaacctaactcgcattgatgtattaaatttataattttagcattcccaatagatcctatcattccttaaacataataccctttgtcttggagtagaatactaagttagagttagtggatttctagtttaggagaggagctcaaaactataatctttaacaaattgaaaaatgaaatagggtgttttccctttttgtgcacacctatattaccttaagaaatttccttccatagacagctgcctcaaagggaaatcctctttaaaccgtagttggcgcagaggtcagtcctagtcggagcttaggaggggcggagacgctcacatcgtctgacttgagtcgccactgattgtggcaacagctttgcctcatgagtcaaaaattggcaatttcttttgatttttagttgttgaatttgctgtttcaagcatttgtacatattagaagtctaaggagtagcaagtcagtgggaggactttttcacccctggcattagcagcttcgacctcattttccagatgcaccagctcctattaataagttagcaaggaaagtgtatgtcacgtgcaggaacagtgaggcagggacaggggttctgctccttctcacttcaccaccggcacacagcttgcccctgtctttgcccccaaaggtattttgtgtctagtgtcaaattggagctattcttcactggtccttaaccttgggttttaaaaagaaggcttctctgtttgggtagcgtaagagctgagtatagtaagtcctcttccaaagagatggcaatatgctgggcatctactttaaaacaaagttgtctgatttttgcaagagaggttaggattttattgttcttatttccctttacagttctgcagttccatcacagtatttttttaaataactcaggtgtatgagaagaaattagaaaagaaaattaacttatgtggactgtaaatgttttatttgtaagattctataaataaagctatattctgtaattgtt

SEQ ID NO: 52043 - DNA, 4545 bp, Homo sapiens
gcagtgaggggggtcggcgcgcgtgtctacgcggacgcaccggctaagctgcttctgccgccgccggccgcctgggaccttgcggtgaggctgcgcggggccgaggccgcctccgagcgccaggtttattcagtcaccatgaagctgctgctgctgcacccggccttccagagctgcctcctgctgaccctgcttggcttatggagaaccacccctgaggctcacgcttcatccccgggtgcaccagctatcagcgctgcctccttcctgcaggatctaatacatcggtatggcgagggtgacagcctcactctgcagcagctgaaggccctgctcaaccacctggatgtgggagtgggccggggtaatgtcacccagcacgtgcaaggacacaggaacctctccacgtgctttagttctggagacctcttcactgcccacaatttcagcgagcagtcgcggattgggagcagcgagctccaggagttctgccccaccatcctccagcagctggattcccgggcctgcacctcggagaaccaggaaaacgaggagaatgagcagacggaggaggggcggccaagcgctgttgaagtgtggggatacggtctcctctgtgtgaccgtcatctccctctgctccctcctgggggccagcgtggtgcccttcatgaagaagaccttttacaagaggctgctgctctacttcatagctctggcgattggaaccctctactccaacgccctcttccagctcatcccggaggcatttggtttcaaccctctggaagattattatgtctccaagtctgcagtggtgtttgggggcttttatcttttctttttcacagagaagatcttgaagattcttcttaagcagaaaaatgagcatcatcatggacacagccattatgcctctgagtcgcttccctccaagaaggaccaggaggagggggtgatggagaagctgcagaacggggacctggaccacatgattcctcagcactgcagcagtgagctggacggcaaggcgcccatggtggacgagaaggtcattgtgggctcgctctctgtgcaggacctgcaggcttcccagagtgcttgctactggctgaaaggtgtccgctactctgatatcggcactctggcctggatgatcactctgagcgacggcctccataatttcatcgatggcctggccatcggtgcttccttcactgtgtcagttttccaaggcatcagcacctcggtggccatcctctgtgaggagttcccacatgagctaggagactttgtcatcctgctcaacgctgggatgagcatccaacaagctctcttcttcaacttcctttctgcctgctgctgctacctgggtctggcctttggcatcctggccggcagccacttctctgccaactggatttttgcgctagctggaggaatgttcttgtatatttctctggctgatatgttccctgagatgaatgaggtctgtcaagaggatgaaaggaagggcagcatcttgattccatttatcatccagaacctgggcctcctgactggattcaccatcatggtggtcctcaccatgtattcaggacagatccagattgggtagggctctgccaagagcctgtgggactggaagtcgggccctgggctgcccgatcgccagcccgaggacttaccatccacaatgcaccacggaagaggccgttctatgaaaaactgacacagactgtattcctgcattcaaatgtcagccgtttgtaaaatgctgtatcctaggaataagctgccctggtaaccagtctctagctagtgcctcttgccctctcctcacctccttttctctcagtgactctggaacctgaatgcagcttacaagacaagcctgacttttttctctgattaccttggcctcctcttggaaccagtgctgaaaggttttgaatcctttacccaacaatgcaatgtggggcccatgactctagctgggcaccttggacctccagctggccaatagaagagacaggagacaggaagccttcccattttttcaaagtctgtttaattgcctattacttctctcaaagagaacctgaagtcagaacacatgagcagggtgagaggtgaggcaaggttcatcctgaatgggagaggaagtcgaaccactgctgtgtgtcttgtcaggatgctcacttgttcctactgagatgctggatattgattttgtaacagcacctggtgtttcacggctgtccgagtgagctaacgtggcggtgtggctgcctggacctcctctttcaggttaacgctgacagaatggaggctcaggctgtctgcaagaaaacagttggtttggctgtgattttgacctcctcttccccactgccatcttctaagagactttgtagctgcctcctagaagcacattctgagcacatttgagacctctgtgttagaggggagactgcacaaactatcctcccccaggttgagacgtctgcagagtggcaagctgacttgtagaaatggggtgccatttatgctctacttagacaagggtaatcagaaatggaatcagtgcaggcaaaatttaggatttgccgcttccataaatcaaagcatgactaatagggggtctctgaaatgtaagggcacaaacttcacttagggcatcgcagatgtttgcagaatggttggcctaatgattatgctacagatgggttttaaatgacccgtctaggttactgcttccttgcaaaaaaagtcgaatcctgcattgaattgaatatgaatttctctaactctctccagaaaatggatggagataacttgtctttaaaactgtaggccagccttagccactgtggagcccttgcctccgagctctggcttcaaggggagctcttctccaggttcactaggtgaattgatttattattatcatattgataatgtgagattctttagccactttggggagcctgtctctccagaagcctttcttagtggtgcccacagttggagcccaggggccatgtttgcaaactgattcatgtgcatggctgacaggagtactggttcactaccaatgcctgagcttttctcttacatagaaaaactgtccactctcagtaatcacaagcagcatccgttttgttttctcttcttgggagacatctgtcaaaccaggaatattcttgaaaagaacgtgagcaggaaaaactgctggtgatactttttttaagttttgtttttatcttgcctgttggcttcaatacatttgagaatacgctgaagagggaaaatttcagtgatggagattctagattaaatatcaggactgatttcctggtgggattatggtccagttttaccaaagaaccaattccttgaatgttggaatctaactttttatattgtcattattattgttgtttttaaacggttctttgtcttttctgttttatttttctcaagctgctttcaggagctagcagaaaataactcaaagttgaagactctggaagattttgctttaacctaactcgcattgatgtattaaatttataattttagcattcccaatagatcctatcattccttaaacataataccctttgtcttggagtagaatactaagttagagttagtggatttctagtttaggagaggagctcaaaactataatctttaacaaattgaaaaatgaaatagggtgttttccctttttgtgcacacctatattaccttaagaaatttccttccatagacagctgcctcaaagggaaatcctctttaaaccgtagttggcgcagaggtcagtcctagtcggagcttaggaggggcggagacgctcacatcgtctgacttgagtcgccactgattgtggcaacagctttgcctcatgagtcaaaaattggcaatttcttttgatttttagttgttgaatttgctgtttcaagcatttgtacatattagaagtctaaggagtagcaagtcagtgggaggactttttcacccctggcattagcagcttcgacctcattttccagatgcaccagctcctattaataagttagcaaggaaagtgtatgtcacgtgcaggaacagtgaggcagggacaggggttctgctccttctcacttcaccaccggcacacagcttgcccctgtctttgcccccaaaggtattttgtgtctagtgtcaaattggagctattcttcactggtccttaaccttgggttttaaaaagaaggcttctctgtttgggtagcgtaagagctgagtatagtaagtcctcttccaaagagatggcaatatgctgggcatctactttaaaacaaagttgtctgatttttgcaagagaggttaggattttattgttcttatttccctttacagttctgcagttccatcacagtatttttttaaataactcaggtgtatgagaagaaattagaaaagaaaattaacttatgtggactgtaaatgttttatttgtaagattctataaataaagctatattctgtaattgtt
